United States Patent Application Publication US 2014/0057251 A1 - sequence listing, part 82

SEQ ID NO: 132158 - DNA, 586 bp, Cannabis sativa
cagaacatgaaaatatgagatatgggttagaataaatattgagtttttgtttcattttatcagtgattttattccgttaatggtcagtttaacacaattctggtacattactatgtaagttttaaagtgtgagctctttactgcaatggaagctaattacaagaatccaatagtgctactatctcttcttcaaagtcaagacattcaaacatgttgaagatgatcagctcatttattagtttaaagaataaaactcttgaagagatcatgaaatatttgagaaccaaatgacaaatatgtcaaattataattatgacttttataaaattattattgatcagtcattttacgaatcagtctgatattgtaacactcgttctgtttaatgtatgaactacaactctaaaatcaaagatgatacaagaaaatgatttatagacatttccaagcaaaataatcttgaataaaagttatacaaacaaactctttaagtttcatgatgaggaaataattatatgcacaataacatggttattcaaattacatgccctatacagtaggtagattacattgagaaataataaag

SEQ ID NO: 132159 - DNA, 845 bp, Cannabis sativa
tgtaggtttaccgctaatattttttttaatactgtcctattgaattagaatatttataaattacatggatataatcacctatatatattatatgaaattaattaattattataatcacttattttatttttttatatgaccacttattaggaattggtaaaagacaaaaaagaaatataactaaaaaagtaatttgcggtcaaattttttgaataagtgttaaagtagactttaaaatagaaaaagaagacggaggagaaaaaaatagaaaaagaaaaacaattttttaggattttaaaatatatttttaagttttgttttttaagtttaaattatttttaattaaaattattatttggaccaataaaacttcaacacttgatacttttaaataaattaatagagcagttaaatttaagactaatagacttacaaaaagtgtgaccttaaggagtattgtcgctatttatcaaggttggaaactaatctacaacaaagtaaacattttgaggacttttactgcaaatttttctttttaaattatacacgtgacactgacatcacatttgtctaagcagccatgtcattaaatctttttgctatgtgtgataaaatttgataaaataactactatacaacaatgtaaatagttcatgaattatttttgacgggctgaaaaattcacgagctgaataattcataaactataatttaaaggcaaaaatcttaaatagcctaaaataaataaagaaaaaattttatactatttatttcagtacgtcttctatctattttcgtatccaagatagatttttaatcaatttttttttcataattatatacat

SEQ ID NO: 132160 - DNA, 796 bp, Cannabis sativa
catttttagaatgacattctaatactttcaaacacaatcaaacagatgaatggaatgaaaatgatctattctattttatttcattaccttcaaccaaacgccacttaagtattttgccctcctattgaacatgaagaagaagaataagaaaaaaaaaataactatactctctgggagtgaaatacttacattttattacttgttgcgacgatttgcgttatttaaatttttaacatatttaaactacctatttgtttatctaatctctagactaaccaattcacataaaatatttactatgtttttttcccgcaaagttcataaaatatttgctatgtgtatagccgttataaatccatacattttgtgccccgttcaatttagattaactgataatgggaaaaataaaaattaatttagcgtttgataatatttttgtttttaaattttttattcataaaaaataatttttatttttaaaaacaaaaatgtattctataaccactgttgtttttcaattttaaaaacaaaaatttttcatcacattatttttgggtaagcctaaaaacagatacgtattatttttaggtaaacctaaaaaggattaatcagattaatctcttttccatcatcactccaaaaagatttcttctcgtgtgttgagaattaaactaagaactccatatacactatattctactagcccacactagtacttgtgtgtggttaaagacatttttttttttgacgcggtgatcaaattcacacaagattatcaaaacagcaatccacaatc

SEQ ID NO: 132161 - DNA, 1335 bp, Cannabis sativa
  modified_base (469)..(491): a, c, t, g, unknown or other
ttggaggtcctgggttcaagtccaggtaaaacatgtaggtaaattttttaggaaaaaaaaaaaggaatactatagctagtaaagacacaagaaaagtgctgatttatttatttatttataaataggaaataaatggcaaaaaaaataataaaattaaaaaatagtaattaaccaataaaatatagaaaaattattttatatactattttttaactattttttttttaaatttacgatttgggttgttacagtggtttctatgcgggttgctattgcgatatatgttgcttcgttagttgctatatgaatttttgtatgaaatttcgtaacaatacaaaataaaaactgttttgaaatgtaaaaataaaaagaaattcctaaaataaaatattaaaaatagtcaacaattattattattttatgtgtatatatatatttttgtaaggtacaattattattattattattnnnnnnnnnnnnnnnnnnnnnnntattattattattattaggatgatgatgatgatgaattaaaaaaaaaaataacgtacctgatttgtgaatagagcaattcaaggtgggaaattatgaaagtctctcttagaattttaaagagtataaaaatatgatggtgatacttatgtaatggaggaattgaatttgtaaggagaaatagcatcacttcaaatatatatatatatatatatttatatttatatatttatataaagaaaaagaaaaagaaaattcaagcttgtttgaattcaatactttacttttactttaagaataaaatactttaatttccaaacaagcatgcatacatatgaaattgaaatttttatgtttagtgtttcacgttgtaattttatatatatatatataaaaaaaaaaaattggaaaaatttgtgaattaaaatgttaatcaaaaataaatacgtatataactttgttggattgacaaattaaaacaactatgtatcgatgtagtactatgacacctcctctgtggcctttaacattttcctttaccaatagcacaatgcttgaacaaatagatgatatactgttattattgtattttaatatcgggtcttatgtgttttgatttaataaataatataaagaacctgtgcgttaatcaattatagggtggcatgtcggtacggtagggtgatttagaaatcagccataaaaacaaaaattacttcaaaatatgatttgtttttcccaattatatggcaacaagaattttccaagaatgtcaacgaaattgccatagaatttcaatgaattgtcaacatatggaagaggtttcaatggttacatttttattgt

SEQ ID NO: 132162 - DNA, 1879 bp, Cannabis sativa
tagggcacaaaacccaacacatttctccgcccaagtgtaaagaatgacagacacgtgtgacttatatctgctgccacgtcacagtgcaaaaaatgggataacactccaagagataggcaaaacatgggcataaactagcctaaacctgagactacactaacagattgacaaacaaaagaaaaataacaaactaacaagctaactaaattagagtagggtacctacacagccatctgtaatccaagcttgcagggagccgtcaaaatcggccaaatcgacgcaaccaactgtttgttatgatttgcccaccgagccacaatatgggcgacaccattacaacttctctcgatccaatgggccactaaataattaatattactaataatataatacttttgtaaaagtatatttttatgcctttttatttttttatttttttattatacatttgtcactaaataattaataatactaatagaataatttattattaattatttatattaagtttgaatattatgataatattatgggtttaataataagtttatattaatttatttaattatcatattatagtaataaaatggattaatcaaatgggtaggagttatgagaatgaaaatgaaattaatataaaccacaaaagtttgaaatattttttcactctaaaggatctaaatatgaggcaatgacaatggttagagttagtgaaagattactactgtgaaatcctctaccatcccggcaaagcaaacgtagtggcaaatgcgcttagccgaaaatgtctatggcaaatctataaattgagagaagtctctctaagattggtcgaggatatggccaaggctgagattgagtttgtagtcaggaagttggaaaatattacattgcaatatgatttactagaaagaataagattggccagtagaatgatcccgaattgatttaactaagaaagaaggctgaacaccataggctaacaggtttacttcaacctttgaagatacctgagtggaagtggaaagacataatcatggactttgtagtagggttacctaggactactgggttgcatgattccttatgggtgataatagacagatttaccaagtcaggacactttttacgtgtacgagtaacttatactgtagatcagtatgccgaattgcacattaaagaaatagtgaaacttcatggtgctctaaagtcaattgttccagaccgtgatcccaagtttacttccaagttctgggagagtttacaaaaagtcatgggaaccaagttgagatttagtatagcctttcacccttagatcgatggtcaatctgagagaaccattcagatagtggatgacatgctacgagcatgtgtgatagattttgagggatcttggagtaagttcttacccttattgagctttcatataataacaactatcagagtaccatcagtatggtacattatgagatgctttatggtagaaaatgttgatcgcttatccactaggatgaggctggagagagatgttatcttcggctcgaattggtccaaagaaccagtgaagccattgagaagatttgatctcgtatgttcatttcacaaaatagacagaaaactctatatttctttgagtatcacctatgaaaggggtgagtaggtttgggaagaaaggaaagatgagccctagattcatcagtccttttaagataatggagcggataggccaggtggtctatcgattagccttaccacctgcgttgtttggggtgcgtaatatcttccaaatctctatgttgagaaagtacgtgtcagatccaacacatattttgagttacaatgatatcgagctccagacagacttatcttatgaggaaca

SEQ ID NO: 132163 - DNA, 561 bp, Cannabis sativa
tttatgacattttttaaatgttttagtaaacaacattaataaaaattttgaatttttttttatttttatattttaaaatagtttttttttttcttttgtatttttacaaaattctaaatagaaattcttataacaactaacggaacaatctaagtcgcaattaaaattcacataacaaatcacatagaaattactggagtaacctaaattagtgatgatcaaataaagtcttacaaactggtgaggaagactagactccatagctcttctggaattgggccaacaacatccctttcattaattttcctgtaaagaaaatgtcaagatgatgacaaaaataaaaaactaaaaataaaactcatagtgataaaagttggatatatataacgtaaaattattattacttttgaatattggtgcaaataagtagtattattatacaattcaatatatactctattatatttaacactaatactctttaataatattctaaaaaattcctcagaaaaaaataatattccgaaagttggaattttttttttcatttttatactttaa

SEQ ID NO: 132164 - DNA, 868 bp, Cannabis sativa
aagaataaaatacccatacatgggtaatacccattaagaacatacccatatatatatatatatctatattataaacttgaaagataatttatcatctctctttgtctttgaccttcggcatagacaccaaaaccctcacctcctgtatatttcataagttcttaaaaaaaaaaaaaataataaagaataaagtaattgtttaggagaaactctttgtagattcaagagaagtatcaaggtaagctttattaattattctagcaatgaatttttttgaattaaggaattagacttttaaagagggttatatatataaaatttaattttagaattcagaattatgttgttgttagaatatttgttagagtatatattatgattgaaatttgttatttaagaagttgattaggtgacttagattgtgttcttgagtttagaatgcaatgatttatcttttaatgacatttttcatttaagggctcgatttttatgtcggttacgtaaggatgatagaattcatagtatatctgtgcactgtgaactttggagtgatttggataagtttggtagtgtttcggtgagtgcgaaaatttatattttcgtgtttcatagttttcagaaattcataggagatcagaaatcgtatttttatcataatttttcactcgggtgtccattttagacgttctatataccgtctcgatgcttgtaacgagctctacgatatggtgtatgttttagagccaaataataagttttattttagtgtattttcatcgcgagattcggtagaaaatcctagattgtcttacgcgagtgttaagtggtgttttgggataaacacttattgatttattattgttatgac

SEQ ID NO: 132165 - DNA, 523 bp, Cannabis sativa
tttattgtggggagagatgcaaagaaatagagtcaaaaaattaagtgagtttatgtcaaaggcttagggtattactaaccttgaggatgcttatatacaagactttggtgttccttcggctccaaccccttctatggccacatccagcttcgcatctcaagtttcgacttcagccttgactcttctaggaactcaattttccccaactatttacggacctactacccctgttctcgtacctacatagaaccattttttcaggtacagggtagcacagactgggtacagtatggctcccagacatgcaaaaatcgaggttctagaatcaactgtgagccactctcggaacaaagagggggcaagagtaataactgcaatgactcttcaaaaaagctgagaaaaaatatgatccaaagtacactaagtatactagtctgatagacacacgagaaaatgtctacaaagcaacctgcaattgttggaatatattttaccaggacttagatttactaacaaggatgtt

SEQ ID NO: 132166 - DNA, 570 bp, Cannabis sativa
  modified_base (520)..(529): a, c, t, g, unknown or other
gggttgggttgtgatttatatgatatggtaaccaggcgaatcatagtttggtggagctaactcaagcttggactaaggttcatctcaatctcatgtagatggaggaccaacctaacggctaacgtgaacaaactcagttatgatatctaattttgatacgctctaacattgactggaattttttattgtcaaactccagtccagaggttgaaaagaaattctgattcgtccactgatttgtacttgatgatggctgcttctaacaaggtttttttttttttttggtctttcgttgaagcttgaattgggctatgtgtttttctttttttttttttcgaaaagaaggaaaattccattaaaaggcagacgacggaaaagatcataagatcaatacaaaatgaggaaattacatattggttttttaaaattttattaggggtgttcattcatccaattaaattcgtattattttacactcagtgcatttgaaatttactagggggcgtttggtatgaggtgnnnnnnnnnntttgattatagggaatattatgaagaagaatatgattatag

SEQ ID NO: 132167 - DNA, 624 bp, Cannabis sativa
agagagagagagagaaagagcaatgggttatccatcataatcctaggtactaaattagccaaaaactttaatcgacctcacccactagtcttccatatgtcaagtggtgaataaaaacatataaaataggaacaatctttatgataaaattaattgaaaaatgtaaacttaccagttggccaataataatattgacgagataataattttagttatcataatatatataaacagatatatagagatttggaggatatatatatgtatcttatatatacacacacatgtatgtttgcttcctccacaagcataattttattcaaaatgggggcgatatatagaccggaattgacaggccctgatcctgacccacccagatatttcaaagggcccgaagcttgtgacattgtgaaagcttctctctctccctcccttctctagggttttgaggttccttttcatttgccatttttggatttttaatatcagactgtagtttcaggcatgctggttgataattaaccctttaaggttattactccaaacaatatttactttacctggtttattatgactataaatttacttaatgtatgttaatagaaatagttctagactactact

SEQ ID NO: 132168 - DNA, 688 bp, Cannabis sativa
aatgtacatgttcactacttattagtagtctcactactaaatgttactttattacaatcatgcatgcatggcggcaaagccctttttatttaatttaaatatatttgctgtaaattttagacaatttaggtctctaatctattaatttattaaaatagtaaacattagtaatagaaaagtttaatagaccaaatatttatataaaaaaaaattacaaaaaatacgtcaatataaaataatttttatttttattctttaattttttttttataaaaatacttcttcaatacaaaataataaactattttttttttagttttatagtttgtgttatagttgtcatgaggttgttttttagttattttgtaattaatttataattatcgtgaggttgttttctcaattttgttgagcaaaatatatttttataattttaaaattttacaaatatatttttgtaaataaatattttaagttaaaaaattataaataaaacgttaaaaaatatatattttaaaattctaattaataataaaactaatatttacaaagacaatgaacaagtgatctatttttcataaaaaaaaggctaattagtaatttttttccccgaactttgacatgtattaaatcgtgccccctgaacttttttggtcgttaaaaattcccctcgaactattgagattgt

SEQ ID NO: 132169 - DNA, 665 bp, Cannabis sativa
ttttccctccaactttcctcatggtcccccttaggctcgtggtcaggatggtataagtttagaggtggtcctttcatggtaggggaatattttctgtttgggaacaaaaaatacaatgccggctgtgtcataagcttggtcacacagtgcaacagtgcttctattttttggacaagaacttcactggccctgattaatcatttcaacaaattcagtggctctgttaatattcttgagatgcaagccgctttagctacatctaaaactattgctgatccatactagtatcctgatataggtgctacaaatcacttcacacctacagctcaaaatctcaacaccaacaatgaattcttcggagatcagcaaattcatatgggtaatggagcaactttgcttattgaacatattaatcattcctctttcacatcaccatatgcatctcataatctacaataattctttttgtgtacaaatacatatgagtaaatttacctggactacgtgatattattttgtcaaaaatacaatgtatgtagataattctcgacaaatctaataccatgattcttgctatctcatattatagtttatttcatatataaatatttaacatttattgttgacaaaaattttattatatgataatttcctccaatattgac

SEQ ID NO: 132170 - DNA, 1483 bp, Cannabis sativa
  modified_base (1429)..(1434): a, c, t, g, unknown or other
ttctcttcaatttttaagtgaaaaggttaggtttgattatgtaattttaggctgaaggttctgttgagtttggttattgttagaattgagttctagggattaatttatgtttgtttgagctggttttggggaaattttttgttgttggcaaggtttgagctagatttgagttttaagctcaaacttagctcaacaatggcattttttaattcagagctttgtggatgcttttatttgttgaaatgtgattattggtgttctgaaaagtttgggaaggtttggattcaatttgaggtagttttgggattctggggaaaacctactgtaaaaatggcaagtcgttttggtaaaatggcctactatttttctaggcagaaaacccaaaaaaaacggcctgtcatttgcaaagaattagcctaccagttttttggggtatttttcctttcagtgttttttttcgatgtgtagggtttagtcacgctagttatagatagggaaatcgttagtttcaagtttaagtctccaaaagtgatttagcggatcacttaccagttttaagtaaactgtgacttagggccttaaatcgttgagcagtagtttccgctcagagttaccgggatgcttgcattcagactcaaggtaagattagtataataatatgcgtatgtgattacatgtttagcgtggatgtttatgaaaatctgttagattacattgaaatagtggtatcaatatacatagagttatattggatattgatcaatgtatctttggcataagtacttattgacgctatcatatcggtacgactaggtaccaagtatagactgatgttatggtccatagtactgtcgtacgaacgttctagactcagtacgtatggacgtgggatagggttatgattgggtgtatgggcacttagttataatctggtttgtgttatgatatgattatacttttcttattgagtctgtcgactcacagttattacatgtatgtgcatgtaagaattagaatcgaaccgggaggagtctaaagctagggtgaagattgtacatatgaagacggttaaacctggagcgtttagggtcttcaagacggttacactattttgctcatagtgtattcgatccgcactaagtacaaattttatattttcgatccaattcgcacaatagcccaaattgggtcaattattttagatttattacttttcaatattaaattattaaatatttattaaaaaatatatgtttttccacgtaactaacaataaaatataacaaattattgttattttatgtttcaaacaacaaattaaaataaataaaataactaattcaaaagaaaagaaaaaatgtaaaaagaaatatagcaagaaatgtttaatttcaatttaaattgaaaaaaaaaatatatctttatatannnnnngtgcctatctaacggcaattcttgatttaacgattctttttttatttag

SEQ ID NO: 132171 - DNA, 752 bp, Cannabis sativa
agtttgtcgatgaggaaagcaaagtgtgaaggtgacagccctttagtgagacaatcggctatctgatcatgagatgggacatatctcacatccaattttccttgtagaactttgtcacggacatagtgaatgtccatctcaatgtatttggtccgtgcgtggtacaccggattggaagcgagggcaccgacaccaatgttatcacaccatgtaatggatggaacagagaagggtacacttaattctttaagtagtgattcgatccatgaaatttctgctgcaacgtgtgccaatgcacgatacttggattcggtgcttgaccttgacacaaccggctgtttcttcgatgaccaagagaccaatgattcacctagatagacacagtagcttgcaattgaacgtctgtcatcgaggcagcacgcccaatcggcatctgaaaaccctgtgatttacaggttgttgttgtagcttaagtgtagcccgtgagtcctagtacccttcaagtatcttaagaccctcttggctgcactccagtgagttgtagtgggtgattggagaaactgacttagcttattaactgcataagctatgtcaggacgagtgtggcacagatactgtagcgcaccacaccaatcacactcctgtatgctgtaagattgtgcatcaactctccatcggttatagacatcggttttccaacagttacaggagttgggcaaggttttatgttagtcatgttgaccctccttagc

SEQ ID NO: 132172 - DNA, 852 bp, Cannabis sativa
caaaacttacccaaaccatcaataaaatatgtcaggtaagtttctttttggtgcataaatgcacgggtataactatttcctaccatattccaattggcgggtaaggattttacctgccaaataaaaaaactcgcaaatttctacaccagttaaagtcatcttaccgaccaatggctcgatttaaccagatattaacaccgacgttagaatttttgttggcacataaactcgccagtaaacctagttttgccgatgcatttggatattgcgccggtaaagattgttttaccgatcgagtattgcgggcaagttttcgtgacgcatttaggtgccgacaaaagtttaccggcgcgttgtgcctagttttgtcggcgcaaatttatgccagcaaaagcatttttttcttatagtgaatatagccccaataatcattatacttcatccccactatcaaatatgatttccaccagtagaaaattattattcaaaaaaaaaaataagatttttaacaaatatttttgtgaaatggaagccctaaaattaaatgaataggctctgataccacttgttaattttcaaacccaatgagtattatataatcataatgcatcccaacaataacaattataatactcatcaaacaactaaaaatcaaatcattttatttaagacattgaataataataaacataccttaatattgacattctctatttgtgagtctccttgattcaccataaatacatctaagtagagaacttatgaaaagcatgccctagcaaaaaccctttatcaccttatcacccttatatatatatatggaagaggtttcaatggttacatttttattgt

SEQ ID NO: 132173 - DNA, 905 bp, Cannabis sativa
ccaagagttgttgcttcctaacccgaagaattatctcaccaaaaaacttctgatttgctgaagaaaagtaagaaatttccccaagcttcaaagcttctaggtgaccgaccccaaagacagagaaaagaggtttacttgtattttctttaatttatttttaatttctaattaaaatcctatccctatttcagcataacatatgctcataagaggacagactaggaatttgataatcttaattcaaataataaatcatttacaagctaacatgaaatgacctatatacccccttcttaaaataaagataaccttaagacctaggggtattatggtccaaaaccataaccccttagactcccgacggtctaaatgtccactatataccccttaaaattaaaagttctaaaccaaaaccaggtgactctatgggccgcacgtcgcattccattattaccgagcataaaacatgaaattcataaaaattcacatataacataattaatgcatctagtattcaaatatatcactaaaattgagaaaatattttcctaagacttatttctgacaataacccctaatgcctacttgaaaacacaaaagtacataataatcattgaaccttttaattttctgctacttcccatgatttaactatgcggtcattacaattatccccccgttaataggattttgtcctcgaaatcaaatctgaaattttagacactaagtctacaaattggattctaatttccaggtgttttccttcaccttactgtttccttaagtatcttatttaatatcaaagttccctttcaaatacttttaatcttcccaattccttcattgatctgttgtacgaattttagacctaagtattttctctcccctgtctcatcccagtggat

SEQ ID NO: 132174 - DNA, 647 bp, Cannabis sativa
acatatatagatatataaatttagatgattttatatgatatcatatataattaaaattgactcgttgaaatagactgtaatcactacataattagatataaaaattatgataattaattttacagtttggagttataatttttttattcttgtaactttagtaccgaatttagtgatatctttaaattgttgtagaaaactcatttgtcatgtaagatttaggactaaagagtagaaatttggcattatgaataaaaaatcaattttcaagagaaccgttcattatcccctttaattaaataaattttgataaaaacaatgaaaatagaaatgacaaaaacactaataaagcttaattatcatgtgcaacttttcttggcaattttctaagacatgtattacaaagtagttggtagtattagttaattcagttggaaaaattatgagtcataagtagtcaatggagaaaagtcagttgttaagatttactattggaaggagttgattgagtgataatataaatttctaatttaagtttgaaacgtatggaataaggaatataaattcaagactgtattatataataattctaaacttgtaagtagtcatatataaataaattcaaatctgcaactgcaaacccaaat

SEQ ID NO: 132175 - DNA, 989 bp, Cannabis sativa
tctctctctctctcttgtacacgctcacgtggctctctcttcctctctctcacacgaacttaagtctataactctctcttattagagatctgcctacttgattcatgctttgtaaccttatagagagctatatcaaatcttacctatagtgatctgaatagtattatctttaggtatcaatacaattaaaaggggagtaggtcattacccgctaactaagggggccgaacctttataaaaatctttgtatttttcacttttgaattctaattgtgtaacatgtggtttacatcaaattcatacgactttattgtcgtttgaccacttttgagatcaacaataagcatatgttcataaactttagctaaagagctaaagaggataagattgggattttccatttctataaatacattatcaataatagaaatcaacgcttagtttaatataaattctattcacataacttaacaaatttttaaacatgcaaacatgaaagataagatatgaaaaaaaaaagaaaaaaagaataccaaaaataaatatatcttaaaatttctaaggttattattgagaaaatggtagttagaatccaagtgtggagctcaaggaatagttacacataattcattcttcaaacctattttattattatttttattctttgttctttctttctctttttttttttctcatattttttttaattagataaataaataatatctaagaccatatccaacgaaagacataaaaattgtattatatttaacacaaaaaataattttgtggtaaatttacaccaaattttaattttgtgctctaatgcacaattgtaaaattttgatataaaatttaatatctaattaatgttttattaaaaaaagtaaaatctaataaatttataatcaattttattattattttaatatgtaagacaataaaaaaaataatataaatgttttataatttaatgtgatagttaaata

SEQ ID NO: 132176 - DNA, 997 bp, Cannabis sativa
atcttcttttgatcaattgaagaaggatctagggaaggaaggaacaaagaggaaggttaagatagagtttgctgatatcgaagacgaagttaatttctggcaaccatctgtggtgtgttatgttattggagctaaccctccaatcagcatactagaaggtttcgtgaggagaattcggaaagatgaggttgttaaggttggattgctagccaaaggtatcttcatcatccgatttcaaagtttagaataaagagacaaagtgatgcagcagggttatgtattttttgatcgtaagccaatggtgatgaagccctggaaccctatcgatgatttcaccaaagaggaagttactaatgtgcctacttgggttcagctaaagggtctggacatcaaatactggggagaggcttctctgttcaaaattgcaggtcaactgggagttcctttgcaagtcgacaatgtcactaaaaatagggataggctgcaatatcccaggatcctcattcaagtaagtttagcacaagtttttcctgaaaaaatcagttttatcgatgagtttgatcatgaagtggatcttgatgttaaatatgaatggttgcctttagtgtgttacaagtgttctggaattggccatagcacttctgattgcggaaaaaagaggagaaaaaagaagcagggaaacaaatgtgggtgcctaagaaaccagttatgaatgcagagaaacagttggatgatgaagggtttcacaaggtcagcaaaggaaaaaaagtagtgtcaatgaagcagacagaaggggcaatgacaaagaatatgtttgaatccctccatgatgctactgatgttatagtaggctctgaggtggattgtgatataacagatcaggaatttgggcacaaaacaggaggggagggagatccctcttcctcaaatggataggtttttatgctggaatgtgagagggattaacagccagaataagcataatgagatcaagcaa

SEQ ID NO: 132177 - DNA, 840 bp, Cannabis sativa
gccagtcggttcaaggtcagctgaatgttgcagcagcggaggcgatgggagtcaaggaggctctcagttggattaaagaaaaacaatggaatcatgttgaagttaaaactgacagcaaattaactgtgcaagcagttcgtagttcaattgttatgaaatcagtgtttggcctccttgttaatgattatcgttatttattccaagttatgcctaatgtcagtttatgttttgttaaacagtctgccaatcgagttgctcactatgttgctaggcaatctcgattttttgctgatcattgagtccttagttcaaatgtttctgctatgatgcaggaaatattgtatcaggattcaagctattaataaaggttatatttactttttcaaaaaacatagtaataacattattttaaaatattaattatatttggatatcaagtggcaagatagctggtaaatatacagtaaattaacattgtgtaatatttaatataataaatatttaaaataaattttatctattaaaataaatatttttttaaaaaataaactcaagtttcataacaattttataacatatttaaaataatttttatctattaaggttatttaattgtttttgcattccatatgtgacaagtgagatttatactcgtttattaaagtagtatactgttgggtccgcctctttgttgttgggcttggaccattaatggcttaaggcccaaattaagtaaaacctaaaaaaacaacaaaaagaaaaaaaaaataaaaatgttggtcgtgtatcgtaaacagtaagcagccaagagaaagaaagaaaaagagagggaacgaagag

SEQ ID NO: 132178 - DNA, 830 bp, Cannabis sativa
aatatgcaacatactacactcatagagaaatcaagattgaaaacctaaaagtcaaaagaaagcagaattcacttactagtttttcgaaaatttgaagaactttgcaataaaaactctgaacactgaaattctgagtcttgaaaattttaaagtcacggggagcactctgatgaaacacagaggaagaaggtgagagacaaagagggcgtgcaaattcagagaagaggttggttgagagatttttgaattctgaaggttttgtgggcagtaatggcaaaaataaagggaaaatttgaaatttatacccaattatggtggtaaccgttcgatcaagagaaaaatagattgaaccgatgggaactaaatgagaaaggaacagtcagagcattaaatggtaaaatgatttgtctttaagttttgaaccacgaaaataaaagcatgtaaaatttaaatggaaaaatatgatcgtaccctttaggcatttaaaaagtcattttctctaaaaagtactttttagggggcaattgttatacctatatttcatgcagcaataagaatttgacacgtgtatcaaagctagaatatgaaccaactcaaatcacacattattaaatgcacttaaatgactcgcctcaagaaattcagttaatagaaatactcgaactcgccgccatatagacaatagggagatgtgagtaataactatggactgatgagaccagcgagatgaataggtccatctcgagatagacagattataaaatataattgtttggaacgagtagataatgagtttgtagctcattgatccacatactcatgagtatgtt

SEQ ID NO: 132179 - DNA, 791 bp, Cannabis sativa
gtttgtgttccctgaggctcttttcccgatcgacgcaccgtctcttcttccatatctggttcatcatgttgagtatcctccatgacaaggtggtttggttatatcggggagacgtgtttcgtttttttttttttacaaagactctcaatgaaagcaccaaacagttaatgcatattttcgttaaaaataaatgaagtcttgtaaagaaaaaatatatatttatcgttaataaatatatatatctatcacgaagaacttttatgtggttttgtaatttaaatctacatactccataagtcaatattatttctgaatttatctttatagtgtttactgattacaagagaatatctttggatattatcctaatctcacaaagtttttctttcccaaaaagaccgatccttttttccgtaggttttgtccttatttataagatttttaggaatgacaattattctcttttgattttatctaggtaaccgttcattaaacatggacaatccccacgttttatatttacagcatgtggataaataaaataactgttgataaccgctttttgttcttatcaggaagtagtttgttcgtagctaagataacgtattccaaatatagcttgtattcttcatcggtgttctggaatagctggtcatttcccgcgagacgctagttaagatgtttgtcctcgctattgtcttttacgacaattctcaaactagtccttaggaatcccgagataggttgcactttgcttatttctcttaatctttcaacatactcacgagtat

SEQ ID NO: 132180 - DNA, 521 bp, Cannabis sativa
tgtgatcttttcttctcttacttttacgaataagcttcactctgtgtgtgtcatgaagtaaacgctctctactaggaattcagcaatcttgtcataccattctctcgaagcttgcttcaatctatagagcgcattttttagtttgtaaacatagtctagatgagctttatcctcaaatcttcttggttgccctatgtatatttctcgatctagttctccatgtaaaaaggcgctcttcacatccatcttccataacctctagtctttactggctgcatgtcttagcagaacgtgcactattgtaatcttagccagtgggctaaacgtctcgtcataatcttgcccataatgttaagagaatcctagagcaactaatcgatccttgtatctctcagttgaatcgtcaagacgagtctttaccttgatgacccatttgcacgaaatgggtttcacttccttcggttttggcaccagctcccaagtcttattcttcttaagagcagttatttcttctttcatag

SEQ ID NO: 132181 - DNA, 1040 bp, Cannabis sativa
ttacacttagttattgtaatgtggaaaatacgctaagtgtttaacaaatgattcgcctcgtcaatatttcttatgaatagcgaggtgggcacctcgctatacgtagtccgaagctgctctgggtaactttacttattcctttataataaacgaatcttctctttggatctgtgtatttcgaggtaggctggtgtcttatcaatataggtattaatagttttgtatccttgtctcgcttaaaactatacagccaacgagttatgaatatgctctattaattctatatttaatgagttattcctctttgcattagatgatataacattgttatattaagtggttcatattccactaattgacacgtgtcaccctctaaaatgtagccaaattttaggtataacaattgtcccttaaaaagttgttccttttaataaaaagagctttttaaatgattacaagtgtatttttttcttaacccaatttgaaaaattgtatgcttttcaattttggccgttcataatttcgaggtgcatcattagcattaaatgcctatcttttccaattctcttttgttcccatccattagatcaattttcttttaatctaacggtgatcatccttaaagtataaaacttgagagaaagtcataatttcaccatttctgcttttcaaaatgagaaatgtaagtaaatagccctatttttaactttagtgatagttaatgtcccttttttaaaataataaagcaaatgtccctttttacttttcaatacctaaaatatccttcattatataaaatgtattataaaaatatcttagagtaatatgaatataacatacatatactataccatagagtaatatgagtattatgtcattttttacttttactaataggtattcttttaattttatttttatttctttccttcataatatataatagaacatacaaatattataccttagagtaatatgaatataccacaacaattctatagtcaaataaatatatatataaaaaaacttaaataaacttc

SEQ ID NO: 132182 - DNA, 556 bp, Cannabis sativa
ttattaaatataaataaaaagtaatttctcataaaccaagaattcggttatatagacacactttatacagaatagatgtcagccgtacacataatactaaaattgaaacacatatatcagataacatataaaattgggctgggcagaagccattacttatatacagccgcaattgcaaaaaaagaaaataaaaatatctcatcaatcaatcacttgcatcaatatattactgcataatcttaataaaacaaaccgtaatcatcaaccgcgaaacattctgatcacagtgtatatacataaatatttacgcccatcagcccattaaatcaatatatatatatatatataatcttacaaattgtataatcggcaaattgtataatctacatagattattatctttatacttaggttaaagttacgtgacaagtcacgtaactttatctttatactagttagtgttattttagtttttagttattttttaatattataattttaaaattaataatgttcaacatagtgataattgttaaaattttaaagcataatagtg

SEQ ID NO: 132183 - DNA, 1242 bp, Cannabis sativa
catccatgttagaatttttttttaacggccaaaaaagttcagagagtatgatttggtacatgtcaaagtttgagggaaaaaaattactaattagcctaactaaagtttgtaatgattagtaaccaaatatgtttttatgtctaatcattttgaatgttcgtcggttcaagggtggggcagtagggccacatccaagcccaaaaaatattttaataaaaaagtctcaaatttatgttttaaaaatactatatatttttttaattttgattttttttttttgaaaaatacttaatttatttttaagatagtacatttatattttttatagagagaaaagacctctcttattttcattatattcagcgacagtggctactataaaaaatgaatatatgtaatgtgtatgtagggcttgtacagggttatatacacagtaaaatagaagcccattgggccggtattgggccgaaacaaaataaaagcaactctaacaggggaattttcttaaatatgaaaattgagggtataatttacttggtataaataaataatagtatagggttatgagttttttttttaaaaaaaaaattttctttacatttatatggatttttcttatgctatatttttgtaaaaaaagtggaaattccatatttgtaaaaatgaaacttacaaaaatactggaatttgagtgaatttttaaaaaaatactgtcacacggaatttttttcaaaaatactgtgtctttataaaacaccagtaaaacacaaagcagaacaactcaaaacaatagtagaacagctacaaaataccagtgaaacttaacatagtatactgcagtatgaaacttataaaaaatatagtaaaaaagtaaaaaattctgcttgacaatatttttgtaagaaaatggcaaaagtgagtataccatgtaaattttccttgtaaaacaacaataagttttgcccgaaagtcaccggcactggaaaagtcactggaaaagtcatcaaaaaaatcaacgtcgctgggaaaatcgctgaaaaagttatcggaaaagtcactgttgccggaaaagtcaccgtcgccggcaaaatcacaagaaaagtcaccagaataaaatgtctaagatataactaaaaatataaccggttatattatgttacagaaccattaaatataaataacataaaataactcaaactagttataattaaaatagaatcggttctataatagtgttataat

SEQ ID NO: 132184 - DNA, 897 bp, Cannabis sativa
gtatcttgatttctacgcagctcaggtggccaaagaaaaccccgaggcgactgcctccacagctccagccgaccaaaggaacaaaatccctgctgcctagagtattgatccttcggccccctcagaccaaggcgctccgtaccaagagccttagactcttgtcgtttgaatatttatttcttccttatatatatatatatgtgtgtgtattcggcctataggccttcttttgagaaaaatgatcgaccaatcggtttttaaacatgaaatatgtttttcatttttaagacaactggctgactgggtagcttttaatcccagatttaccgtgctttgttatctttttttcaatgaatatcgtaccttgttatgataattgtttgtgtaaccgtgtttgttttgttttgttttgagtttgttatttacttttaccaatgctttgtacgagtatggttgccccctaagtgacctagcagacttttgactcttggtcacttgcgtttcacaagtatggtttttgtctatttggttccttgaattcgagcagacttttttacgcatttaatggtaaattcataacttgctaatagaattgacacaatttgaatttaaatagacatctttattcattcattcgtgggaatatttttgctaccgtagcaacttacataaaagttgttatatctaaaccgatctttacctgaatttaaacaaaacaaattgcattaaaaagaaattgtattttgagaggtggtcatccgacctgagtactttgtcatttcacccaaatttttgggtgtggtccgcccagaaggccatttacttaagagtaaatgttcttaaattttgtacttagaatggtcatccgaccttgtactgttactggtagtattttct

SEQ ID NO: 132185 - DNA, 604 bp, Cannabis sativa
gagtcatgctcgcaagcatcgatgagtgcatccatgcatcgagactctctaaccaagatactcacactgtccataggttctcgctatggtaagacgaatcccaacaatgacgtgtcgctcgtgaccaaggtagaatgggtggcaagaggccaacaccaagtcaacgtgccaacgcttctatcatgccccattcgatattgtccgaacagtctctctcgtcgcctaaggactcccataggtccatggactattcctgaagacgccatgcctccacgcattttagtaggccctcaagacaagccaccaagctagttgcatacattagacctctgtcccttttcaacatggtacatctatcccatacgcgtatgcaaactagcctacgaatgacacccatgtcatctcgtactgagactcgttgccaaggcgcaccacaacatctcttagaggatctaggtcacgtcccgtgcaagcggcataccagcaaaccaagggaaatgtaccagtgaacctctggcggctttctaaacgcactaccgggtcggcccgataatgtccatgagtactccaactcatggagacatatgagtcccctcgtggtcct

SEQ ID NO: 132186 - DNA, 674 bp, Cannabis sativa
tggaggcttgaagcggggacgttacactaaaccccctgaatttaaaggtttcaaagaatcaaacctcaagaaaaaaatcaacaatggcagtgattaaaaaaaaattggtcttgtagctagtaaaaatgcaaatccacatcctcttcttcctcctccttcaacttagcttattgctcgatctaggaggaccaaacttggccgttgttgagtgaggagagacgagagctgaaaaactcaggggaggggagatccaattcttcctcgagttttcacatctgttgaagctagaaatggccctcgtctcgtggttgtgggaaactctcgggtgagctcgggggaggatggaaattggggttttgggtttcgtggtttgggaattctgattttgtggtctgactttagtgggctggagctcctggtccgtcggtggcaccgatgatgcacaagcagagagaaagagagagattatcaagagaggaagagagagagatatataaggttttttgaagaggaaggagaagaagaaagaaaagaaaaagaaaaagaaaaagaaagaagagaaaacaaataatataggaaaagaataaaataaaataaaatattttttataatttatttattttttataatttttataatattttaataaataatattacatggaccactaaaaa

SEQ ID NO: 132187 - DNA, 1254 bp, Cannabis sativa
ctctaagcaaccaaatcttggagagcccacgatctctttctcaaaaggagatcctgcctaagtcagtttctcgcacaacaactccctggtcgttactgcacaaaattgggaatatgactgtagcaagatacatggtggacaatggagcctcctttaatattcttttcaaatcaacaagtgaaaatatgaggctctaacttgcttacttggcaccctatagtcaagtgatatgtggctaaagaaccatcgggtatatcagattaccctttactattggagaaaattcaaccactaaaactctaatggtgcaattcattgtaatcaatgttccctcgtctttcaatgccatgataggctaaccagacctatgcaactcgaaggcaataacatccatctaccacctttgcctgaaattcccaacaaggcatgaggtaggatgtcgagaggagatcagcaatctgcccgtcactgtcacaacttggccttgttcaaagccaagaaatagaagatgcatccaccaaattaggagcatacaagcttcatgaaagacttaggcctgtactggtacagagtcatgccctttagagttgaagaatgtagaggccacatatcagaggcctgtgaacaaaatattcaatgatcctatcggccgcaagatggaggtgtggacgacatgcttgtcaagtccaataaagctgggggcatatggagaacctagatgaatttcaaaatcctccgcagctacaacatgaagctcaaacccagataagatccaagctcttttggacatgaatttgcccacaataatcaaggaagtacaaagccaaacatgatacatcactacactgggagatttgtgtccaagtttacaaacaaatgggtacccttcttcagcattctcagaggcaacaaaaaattcgagtggataaaggaatgagaaactacattccaggagctgaagaaataaattggctcaaccacctatgttgctcaaatccctagacaaagaagtgttaggcatgtacctagcagtcacagaacatgctgtgagtgttgtcctcacaagagaagaaggcggagtacaacaacctgtacactacatcagcaagaaactgatcgacgctgaaagtcggtacccactcatggagaagctgaccacaacttgctcttagcttccaaaaagctaaggccatacttccatatacaccgatcaacagttgcggtaggttctacagaaacctgaagcatcaggcc

SEQ ID NO: 132188 - DNA, 700 bp, Cannabis sativa
aaattaaaagtcacccataaatttctcataaaccaagaatttcagttatataggcacactttatatagaatagatatgttgatatgttcaatgtcaaaatatataaaagactcagaatgtgaattcatcactatatattattatgtcgtcgttccaacattttaattggtcccatcttcaaaacattttaattgtctctttgagtaccatcatcaagacacaattttttctcaaaatataaaaataaattaagagagagagagagaaattatacacatatatgcatgcatgatgacttttatacatataatttatgcacaatattaataataatgtgtgtatatatatatatatttttcaattgtaaattttattcaagtaaaccaacataatatcatatgtagattaaaataatgtgacaataaaatattatgtgaaatatatattaaatgtttggtaaacaaattgtatatataatttatttaacctacactttcactttgtaacataaaagaaagttacaagattaattatttttgtaacttcttttggttgctgatcacattttagtgtaataaaaaaagtattatactcatttatatgagaaaaatatggtgtgtatgaagcctaagtgtgatcatctaaaatactatataaaggagtctaattaatgtgctcatttattgtaacgtccccgctt

SEQ ID NO: 132189 - DNA, 809 bp, Cannabis sativa
  modified_base (314)..(317): a, c, t, g, unknown or other
tatgttcatcagcaagtctcattccaagggtcccacacaatcggtcccgagtagcattaggcacattagtattgaagaagacagaggacttattgaaattaatttgttggccagaagcgatctcacatagctgaagcagatgtaatatatttgaagcctctctattatttgcacgacaatagacattactatcatctgcaaagagcatatgagatataaccggagcaccattagcaaccttgcatcctttaagcctaccatcctgctcaaacttccgtatcaaagatgagaagccctcagcacaaataagaaannnntaaggtgatagaggatcaccttgtctaataaccctctcaggaataatcggacccagctcatgaccaccatgaattattttatatctcacagagctaaccgtagcaataacaagatcaatgaaacgcaagtcaaaacctatttcgctcatcatagctcgaagaaagtcccactccacacgatcataagttttactaaaattcatatagcttttttttgcctttacgctttttttttttttgagatagtgcataatctcaaaagctatcataatataaaaagctataatataagctattataaaaaaaaaaattatgaatgccaaaatacggctgcataacagggagctaaggattgtactgcaaaaatttcttatatgatgatataatggaataagaagataattatgaatgttaatctacattattgaatactaggtgaagttaacacgtgcaatgcacgtgtctagttctccatgttacattttatttata

SEQ ID NO: 132190 - DNA, 560 bp, Cannabis sativa
aactatgtttggaaactttcaaagtctctccctttagaagcttgaaaagtattagagcataaaactaggaagatggctgtgccataattattcatgtcccaaaaaaatgagtgtattgtagagtttgaaattgagctccatttgtttattttggcattctagacagctgcatagaattaatcttgtttgttttgactttttggaaattttcacttcatcatagaaaatgacaacatcaacaacaaaaaattgtctaaggtacttttctttttaataacaaggaatttaatattttaaaggctaattatgaattttatccctcctttaatatgtattaaatcatgttatcttctgaacttttaaggtcgttaaaaataccccctgaactattgatattgttagatttaaggacttttgtctaattttagtaaaaaaagtctaacatggatgaaagttgaggaggcatgatttaatatatgttaaaatttgaggagcatgatttggtagatatcaaagtctggagagcatagtttagtacataaacaatcactgaaatagta

SEQ ID NO: 132191 - DNA, 604 bp, Cannabis sativa
  modified_base (563)..(564): a, c, t, g, unknown or other
gaaaagtgttttgggaattttttttttcatcagaaataatgaaaagtaaactcgaggagaaaacaagaattctaggggcatgaaaactgcgcccaggttgacaattaacctggtgtgctagtttcgatcactcaaatgcgaattatgctccgagcattctctccatcatggtttaaaacagggtataagagacctctcccccaatttcaagaaccttggaagtatcaaaacaacttcctagaagctccagaaagatcacccaacgcccaggctaacaggtgacctaatgcgctgggttttccttatctgattctgattctggattgagctttcatctagtttttcatagtaactgagatctatgaagtcagacaagtcaaatttacaacttcatattttcactttttcgaaaaagtaacttactcgtaaattgggcagttttgagtctcctaattccgcagaacaacaatatcttcaagaactggtgaacgacttcacgagaacacaagaactaactaagtgatgtctgaatatcacttaggcatcaaaaaaatacatccccnnacgttttcccactcacccagcgtccaggttgacgtcatat

SEQ ID NO: 132192 - DNA, 931 bp, Cannabis sativa
aaaaaaaaaaaaaactcaaaaaccataacctgcataaatatttgtaaaaaatatatatttggcactcaatgccccagaacagttctgaaaaaatatgcagattaagtttttgattttataagcattttataaatcataaaaattagaatatgtctaatgtcattcaacacatataaaaacacgtctaataatcaagttgagtccctacctattctgagtcattaaactttgttcaaaactaaaatttataatgactgcatacttaggtatggtatcgaattagcagacaattaacagattattagcgagttaatagttattcatgattatatgtgcatttataagacatattgtcaaaaatatgcattagagaaataatttctcaattatagaaattttattgaattctaggtgtatcatgctatatatgaattttattatttttatgatttgtgctcgttaacagtgaaactcgacaatttagctattagtatcacaaagatatggtttagtattttcattagctattagtattactttttctttttctttgaaaaaaaaaaacattattttttctttaatgcttaaggcaggtacggtttctataaaacctaccttttatttttattttttatttatttattgatgacaacagctagatttgttgttttttttaaaaaaaaaaaaaaaattgtgatatagtgacgtgctaagcgtgtcggaatacatttatccagtcacatttagcgtgtcactatagactagtatttttaaaattaataaaaaaagagaaaattttaggttttactctatagtgactctctattaagggtgttcatcgaaccgctcaaaccgcccgcaccgcaccacaccgcaaaaaaatgttgtttgaaattctttgcggtgcggtcgcggtttgaatttttcctaa

SEQ ID NO: 132193 - DNA, 1030 bp, Cannabis sativa
acgaaagtgttcaaagaagcattatggctttgagggatttttcatgaaataaataaaatgaggagtaacagtttactcggatagcctgtcatcgatccatctttacaagaacctatagagcaagcatataaatataaatctttattggattagagaaaagatagaagaaggactaattgatttggagaatgtcaaagtagaagataacatctttgatgttaggactaattaaggtcctaacagttaacaagtttcagcactgcctgaacttgatcaatctcaaaacttagcatactaaggtacctcgaacaccaactatgatggttgcattttttcttcatcaccatgacttttaatttaaaggaattatgtggaatttgtggtatagttcctctgaatgaaaaggtctcaagtcaagtcttgtggaaagttatttgtcgatcggaaaggagttatgaaaggctagcttttccatccagataaagtgtttagggaagctagttgtccttcaaaaaggaaaactagaagactagttgtcccttccagaagggggtctcggatagcttgttccagttggctttgtgcttatttgagatgtccttccaaaatatatacgctttgtcaacttgagacaactgtccagaaaataggaagcgtagttcatatctggagagctcattgccagagttcacttggagatctcactgtaaggagctagttaaatcggttaagtcgtaattgaattaactacttagtcgttacagccactgcctttaggattagataacctcatcctataaataccaccattatcatcctttgtaaagtaacactaatacgattgagagagagttttgattgataggtacagagaaaagagagagattaggttttgggtttcgtcagaagaagcttttgtagatgaagaagcttcttgggtaagagtcatagagagataaacactttgagagaaaccaaacaaagaatcctatcaactgtattgtacctgtgttcttgctcaatcaataaa

SEQ ID NO: 132194 - DNA, 549 bp, Cannabis sativa
tccgtacagtaacgggacaaaatccggtccctatatatatattttttataattttatattatttttttataatattgtaataattaaatttatgtggaatgctaaaaattctctatgtgtaggtgtgataaattttttatattttgcttttggtatattaaactattttatagatttaacaaatttttttaaagtatcttaaataatatttttcttataactagatatcaatatgtttttataattataaataggttataccttaatagaattatatatataaaatattaaaaatacatatattaaagtctaaattaatcaatgcacttaaattatttttatttataactagatgactatatcgaaattattatttcaaataacattttaaagaaattttattgtatatactatcatctaaaaattaaatattatattgattctatgggaccgtttggaatagctttttaaaaagttgaaagtgctttttgaaaaagttgttgcttaaaaagtgtttggtaaaataaaaaaaatagcttattttaaaat

SEQ ID NO: 132195 - DNA, 537 bp, Cannabis sativa
ttaggacacaaaacccaacataatttacattgttttagaaattcatatttaggatgttatatgacatacatggtagtaaatctagatcttggtaaaactataatccaacatgtcattacccggttgaaccagtacaggtggtcactggggtatatatcttctgtgtacatcgtcattttgggtattttaaagttttttaggagctctgcttcaaggatatttctagcccaaggttctcggtcttcacaatcagatttcgaatcatcccccttttaccttcgagaaactttagctatatcttttcagaggatagctagttcagcccggattccctcatttatggcaccctctgagactgatattgcttgtttctccttttccaagtgattcctaagatcaccgtgcctgtcattgagcttttgccttaaatcaacaggggttgtttacggtttttcctccctctttcccctggctcctgatgtacagatacactatttcagtcttctcggtcctgagtgttgggctttgtgccctaaa

SEQ ID NO: 132196 - DNA, 558 bp, Cannabis sativa
ttaacagattttgtactcattaaaccataaacatgaaaactacatgtaaacataaataatttctaatcttctattgataataaatcaaatcagattgtattgaaatgggttttacttaaggcatcaaatcccaacatttgtgtctcaagccttaacatggattggcaacttgtgtgtaaatcttatagggcggcttgcacgaacttttgtagagtatccttaaaagactgttttctttgttgttgacgatatggcatattaggttcggtatgactctgattgggtgagttttattggtgcccttggttcattggaggctggttctgtctccaaaattttttttggatgatttctccaatttggattataggattgagaaaatgggatatcaaatgaattctcatagtttgaagagcatttgcttcttcagagaatgcctcttgctatataggaaatgatggacaagactgtgcattatgtcttgtattataacatagagaacaaaattcattcctatgtataggagcaatcttggaatgacttaatcacatagctctc

SEQ ID NO: 132197 - DNA, 669 bp, Cannabis sativa
tatatatatgtttccatcttcctatggttacttaacgttgaagtatttactaattaaaaacaaatggatgacataattaacctaaagcttcctttagtaaaattagaatatatatgtgctaaagtacaaaacaattatataattgaaaaaaaaaaaaaaaaaaaccgatgattagggagcattatatataattttagtgcttgaaaattcaaacctaatttgctgagttttgcttatttgttttaatgtttatatatgtttattattttcaaatattcatcagccgctaattgacaataggccgattgactaaccccaaataactagaacaaatatttaaatacacatattaatttttatatataaatatatatatacactaaaaagtacactaactctagtggattttctatatatgaacttgcatataattatatgtatatatatgaattagtaagtagtatatagaaatattttcagcaaaaaaaatgtagtgtatatttatcaattatttaaatatataataattaattattatgtaattttcttctatttgaagcacacaagtgggctgtacatagttccaacccgattacaccaggagagataatgagaatcaaagataaaaaaaaggttaaaaaaaactgtgtatgagagagagagagagag

SEQ ID NO: 132198 - DNA, 1244 bp, Cannabis sativa
  modified_base (50)..(55): a, c, t, g, unknown or other
gatattataatcttaccattgtatatttctaagtcaatatcactggttgnnnnnngatcaaaagatcttaatcctaacatagttaggttcgatctcaagaatgttatttgagttctttaatttgttagtcaaagcctacaatttggttcgggtcacacgtacagcttgggaacatgatagtatgattgcattggagcgctaaacatagatatgaaatctatagcttctatctagtcatagaaatgaaatgatgatttgcttcaagcttggcttaatagagataaatggagatcatgggctctatgggcttctgttgctttgagcttttgtcttcgacaactaggacttcgagtttgggctcgtgatggagtgtcatatcatagagctccctagcttttctatattctccagcaatgcggggtcctcctattatgacccctagatgtcctgccacggatggtggcatcgtatctccattttagcctcctcgcacctaggtctgattgtcttacaaataacaatgctggtggggatttttatgccttattgagtactcaatctccctcttcagattttgacactcattagtgtcgtggccgaagttggtttgatatttgtagaacttcgacatgtccctcttgaccatctcccttcttaatgggaaagggcttttggtatcggaccgttccctaagtggccatgaggatggttttaggcttctctgttaggagggcaaagcaactatacttctcctccttgttggtgtcatgcttatttctagtgtttttaccactagaagtcttggcagagttgcttttgtctgcctgtgcgccttgtgggtcatgaggctgttgggtgcctcatgagtgcttgctgttaacatgccctgcctaggcctgtcgtatggcttcctcaagtttgataaagtcatctgctctattgaggtactccttcatgttattggtggatatcctctggatatctttctagaagtcgcttagtgagagtatggcccccagtatggctgtatatcgaccttcttctgtaaggcatttgacttttgtagcctcgaccataaatgtctgaatataatccttaagagattccccttgttgttgtttgactttgacaaggtcttccagctgtaatggtacaagtcttgaggacgaaaattgtgtatagaattctcgtgacaacttagcccaagagttgaatcttcccgcggtgagtttaaagtaccattg

SEQ ID NO: 132199 - DNA, 691 bp, Cannabis sativa
aaaaaaaggagaaaaaagataatattgaaactaagaagtataacatgccatgtcatcactcctaacaaaaggattatataaatatatagatagggctaaaaaatcaatcaaatctattagatagaataattgaatatggacacatagaataatcccaggaaaaatattctaacagaaaaatgaaaatcacgagactaatgtaattttgaaacataataataaatagtaataatattaatcaattcttgaatcttccattctattattgattgtatcttgggaaggaatacaatgataaataagtttattaattaactataagaactaagtttgctaagtatcgtaattttggaccatgttactccatatttcttgaatcccagcatccaacactcgccaaaacaaattcaactcagaaataaaatcttcttgattaacatcattattactttcttgagccaaatattgatcattacaacgattccaattttctttcatcttatcactgactcttttcaaattgtccttgaaaatattactttcaagatcctctgcctttaaataaaatacttcatcaaagttgttctcaatagggatgaatttaggacttgaaaagctcacctcgaaacgaagaacttcaatgctcatacgatgaactaatgtctttgatttcatcattcaaataaaatat

SEQ ID NO: 132200 - DNA, 519 bp, Cannabis sativa
tatatataatataagtaaattctataaagggatgtatgtgatgtatttttattgacattctatacaattttaaaaaattttgaaaaaatttaacacgttcaaaataaagttcaaacattctgttgcattcgtaaatattttattttatacgctgctttctacataatagactatttctttataccgaaataggtagagagtgggtcacctttttaaaagggtgcattataaaaacactataacatatatgtatagtaatatatagtgtaaatacttaagtttaactatcggttggagataaataactaagtattttttacagcaatattattaactaacttatatttttgtaactttcgtaagtacttcactattaaatgtaaagttattatcttttattttttaattggtatattaaattaatttttaaataaaaaataaaattttaatgacctgtactaattagagactgttttatggctattaatttgacacttaatagccgtatttattgaagtt

SEQ ID NO: 132201 - DNA, 816 bp, Cannabis sativa
tacgtatttgtaagattttagaaaggcaattaatcttgtgtaattattttgtcttggcttatataactccgaatttaatttatgtttaccttgtaggaaaggactttgttttggattgtttgctcgattagttgaatctcacaagctaatttttttcttaagattttatttttttgaatttaatttatttcctacttaaaagtttgatacttacattaatttatatctctatctctttatagaaaaggagagacataagatggtgacatgacactttaaaatgataaaatctctctaattaacattatttgttttttttttaattctctcattttttaatttttttttagatttaaaaatattagttgattaattaaaaaaatatgctacaactattaatttatatatatttttatttttaaaaaaattatatatattcttatttaaaaaaattcaggtgcagttatagtttttttattatattaaaattttataaatattattattatttaattaaaggaaaaaaatatataccaattttttaaaatatatatttatatcattcacctacaatctatgtatatatattgttatttcaaaaaaaattatgctaagaaattattatcattttatttattgttttaattaataagttaaaaaatatatatcagggtcaaccctagacataggcaggctaagtccgtgcctagagctcacacctttcaggggtccaaaataaaaaataaaaaaaattattaggcttttatttaagtaaaattaagtgtattgtaaacaataaatattcacagcttagtt

SEQ ID NO: 132202 - DNA, 1379 bp, Cannabis sativa
aatacatataagtcaagactagtggcaaaaggctatcttcaaacacctggaatcgattatgaagaaacctttagtcctgtagtcaaacctgtgactgttaggacagttctatctcttgctgtcacctccaattggccagtcacacaattggatgttagcaatgccttcttgaatggtgatttgcatgagacagtttatatgaggcaacccaagggctttgaggattcagaaagaccaactcatgtgtgtcatcttcacaaagctatctatggtctgaaacaagctcctagagcttggaatgaaaaattgagggatactctacttaagtggggctttcatgcatctagatcagacacctctctttttgtctatggtaaagactccaacttgatcatcttacttgtatatgttgatgacatcctagtcactgggcctaattctgctcttatctccaaattagtgactgatctcaatgcttcatttgctttaaaagacttgggtcctgttcattattttttgggtattgaaatctaccgagatgctagtggaatgtatctctcccaaagcaaatacatcactgatttacttactcggcttcaacttgatggagtcaaaagctgtcctaatcctgctagttctcatcagaaattgtcattgaccgatggtgatccatttgaagaccctaccctttatcgaagtacacttggtgctctccaatatcttacattgactcggcctgatgtcgcgttcatcatcaacaaactaagtcaattcattcaagctcctactgttactcattgggcagcatgcaaacggctccttcgatatcttaaagggacaattactgatggcttattactcagaccagcagcttctatggacatctccgcttactctgatgctgattgggctagtgcgattgatgatcgaaagtctactggtggttatgttgtttttcttggaggaaaccttgtctcttggtctgcaaagaagcaagctgtggtagcccgatcgagcactgaaagtgagtttcgaagtctcgctaacacggctgctgaaatcaagtggttagttcacttgttgtctgaactacacatctctcttgcttctccaccagttatttgggttgacaatcaaggagctgctgctcttgctgccaatcccattttccatgctcgatccaaacatatagagattgatctccattttgtgcgagatcaaattttggcaaaagaactttcagttcgatatgtaccagcagtagatcaggtggctgactctcttaccaaagctttatctactggccggttcatgtatctcaaaggcaaactcaaaatggcttctacaccttttcgtttgagggggggtatcaactgaaa

SEQ ID NO: 132203 - DNA, 1514 bp, Cannabis sativa
ccatatatggatttttgaagtttgcaaactaaattcgtacctgtggaatcagaggcagataaagttaggccaggaggtaaagtcatgtagacctcttcattgagatctccatttaaaaaggcattgttaatatctaattgaagcatatgccattgtttgatagtagaaatggcaagtaataatttaaatgtgaccattttggccatgggagaaaaagtatcaaagaaatcaagtccttcttgttgtgtgtatccttgagctactaatcgcgctttgaatctttctacagagccatcactgttgagtttgattttataaacccaacgacatccaatggctcgtttatttggagggagtggaacgacaatccaagttttgttgttgcgtaaagccattaattcagaattcatagcatctaaccaatgttgaaatttgatagcttgttgataagtttgtggttccttaagagaggtcactgcaagaatgaaagctttataagattcggttagtttatgataggatatgtatttatcaatagagtgaggggtggtatgtttatcctgtaaaaccgagtagcattcaaagtccctgagataggcagggggttttgtagttctgccagttcgtctaggcaccactgttggtgcattatgtggaatttttggtgtgttgggtacatcagtaggctcgacttctatgtcaggtgcaccagaattttcttcctgcacaggaacatcaacactaggaataacaatgttagtggaaggataatcattgactggtgcgtttgaaacatcagcagcaggcaaaataatagtaatgaagggatcaacattactagtgtcctcattcagttttgagaatgggaaaatatgttcacgaaatatcacatttctagataaaaaaaagtatgtttagtgtttatatcatacaacctatatccctgcacaccttgaggataaccaagaaagatacaagctttagctcttggagaaaatttagtcctgttggcagtgagggtagtagcaaaagcaaggcaaccaaaggttttaagatgagtgtaatctggctgtttttgaaacaacaattcataaggagttttattgttcaagttaagagaaggaatacgattaacaagataagcagctgtcattatacattcagaccaatacttgagtggtgtgtgtgcttgaaaacaaagggcacgagcaacatttaacaagtgttggtgttttcttttagcaatagcattttgtttaggtgtttcaacacatgtaaaatcatgtaatataccgtaacttgaaaataaattttttaaaacaagctcaggcgcattatcagatctaaacttcttgattttgcaattgaattgagtttcaacataagacaagaattgacagtatgaacatcagatttgtgcttcaaaagatatatccaagtaaatctagatctatcatcaacaatagtaagaaagaatctaaaacccgagtgagattgaacatgatagggacccc

SEQ ID NO: 132204 - DNA, 547 bp, Cannabis sativa
tagccataaactagctcacactggaaggaaagataggccagagtaaattaatttcattctaaaatacttgataaaatttgccaaataaaagagttttataaagagcaaaatgctagggaataaattttcaagttttctagatcgatttgcttgaaataagatttaagcttttgattttatttttgtgatgaagatctttctgtgatgctctttagtttatagttttctactatattccatgattatacttattgcttactgtctaatccttttataggcttaaaatttgaacatatgtaattgtcaaactttacaaaagccatttagaggtatagttgaatagtttttggttttccactcgaaaccaaaaccatgaatgtaagtacctatatttgtttgtttgttctcttttagtttgggctttgtgttcgttcattatatataaatataaatatatatacatttcatgattatatatatatacatacggtacattattttattttctgtatatatatatatgtatatatgtttatatatacattat

SEQ ID NO: 132205 - DNA, 549 bp, Cannabis sativa
attacgcttgttttctatgttttcaggttctttggaataatagaggtctcgggatgcaaaagtccagtaaaagatgagttgagccaagaaaaacacctatttgaggcgagatgcaattctggtcgcggctagatacatcttggccgcggctagatcatgaagcaggaagccagaattttgaggcttcagtccccgcgacgagacacaccttcaccgcggcgagacacaccttcgccgcgaccatataaaaattacagaagcagtttttttggtgtctatctggccgcgacaagctacagcttggccgtggcgagatcccgtacggcccggggtaaaattatccgacgaaccctaaaaattacttataaatagaaaactgcgatgggaagtcgggggaagcgatttggagacctaaaacacaacagaaagcggccggaagagcagagcaaatcaaagtgaagatccagaatcaatccatcaacagtttctttctctattcctctttaatttatttatgttgaatattgtcataggaatggttatggattt

SEQ ID NO: 132206 - DNA, 507 bp, Cannabis sativa
attggatcagatcatctaaatataaatagacatagacctacctaaaaataaaaacattagatgtggtccaataaatacccctacgtatacatttataatatataatcaatgtgaagaaatggtctcagacaaaacttctgtatattttttatctacattattctttttttcttctaaattaattacttaaactcattaataagggtaacgtctatataacttacatttgaaagaaaaaaaattgcatataaaaaaaaacttgttttaattaatatttttccaatcacatattgaatgttgattgaatgttcttttttcattttctttctctctgttaattctatatttggcatatttaattgacaaaaatattttattatttcctgtgaatttcagcttgtatgtttaatttagttttctgattgtgtgtatctaaacttggaatgaaagttgtctagctttcctatttatggaaattgaggtaaaaatggtaagttttgattacac

SEQ ID NO: 132207 - DNA, 580 bp, Cannabis sativa
  modified_base (549)..(553): a, c, t, g, unknown or other
agagagagagagagagagagagagagatgacaaggtttctggggttggggttgggtcttcaacgtcgcacgagaggaattgagggagagagttaaggtctttttatggttttcaaaattgagggagaaactttctatttataccttttttttatttattttttatatattcttttaaaatgtctttattggtgtcagtttataaccgaaaccaaatgatcttttagtcttaaatatgaactgacacctatacgcaatctatatgtatatatattttttttaacttttttttggtctcgaatatacttttagttttgatctactaaccaacacttaaagttattataggtgttagttataaacagaaactaaataattggggtggtctttagtgtaaaaaaaacgtcgctcgaactgaaaccaaaagtctattagggtagtagtgttatggtataatactattttaacatccataacataattggtcacttaattttatattaaaccttataataccatatatatatatatagggaaatttcattttttnnnnntaataaaacccccaatatcaaaattta

SEQ ID NO: 132208 - DNA, 528 bp, Cannabis sativa
tattctcacccaggaaataatccacaagatcaggcataagaggggattgggaggtttaatggccctaaaacttgacatgcataaagcttacgataagatggaatggaattttctggaagaagttcttgtggcgaatggtttcaatgataaaactcgtaagcttctaatggggtgcgtaacaagtgtctcttattcagtgcttctcaatgggtgtcctctcaagaaattgtatcctcagagaggtttgcgtcaaggagatcccctctctccttttctgtttctcctctgtcaagaggtcctttcaaaattaattctcaaggctgaagctcaaggctctatccatggtatcaaaatagctcaagcagcaatcccggtttctcatcttatgtttgctgatgacaccatattgttctcccgtgccaattccactgaagcaaaaaagatgatggagtgtctctctctctatgaaaagtggtcgggacaatcgtgcagcaaaccaaaatcaggtgttcttttttccaataactt

SEQ ID NO: 132209 - DNA, 750 bp, Cannabis sativa
ttttttttttttttttttatgggattataacaaactatatatacgtatataaattttctaatagaacttaaatttatcatttttctatataatttcagcttcaataataacaaaacaggttaaagtgagtcaacataaatataatacgattttgtatgggttgagttagaattgagaaaattagatacgagtaaaaaaataaattaatacacttaacacaaaatataaaaacaagtcacataaaatatgacaccaatacaatactataacatattttgatagtcttgcatcttactgcaatgatccttaatttgtggtagtggtgccaatactaaaagacacactatgtgatgagtaacctgacaagtggctattcaatgatggtgaggtaataaaagctatttaatagagtagaagaccaagtgaagtaaagacatggttttaggcagatttctagggtgatatataataatatatgagcattgttattaagtcttacaattgattagtgatatttctttaaaaagtattatattaaattatatgagacccgatacttagttagattaatagtgatattaacacataagaagatactagacaccactgatacatatagtcatacacgttactcttttgagataaatatttatgttgacttatcccaattattttatttttttattattattattctctcttttgaaaaggacaattattgtgattattaatttgcattcacattatctt

SEQ ID NO: 132210 - DNA, 736 bp, Cannabis sativa
  modified_base (672)..(708): a, c, t, g, unknown or other
tcacctgctcttcctcaacctcatcttcaggattcaaaggctcatgagcatactgtttgccccttgcacctcctttcaacttagcttcacacttaggttggatgagttcattctccttatgagctccctcagcccggccagcacaagatttcctcttcctctccttcataggcttaggaataaaatcctttggatagagcccgtacctcacaaatttgtcctcggtggtcaacaaaatgatatttcagtcattccccagaagctgaggaggcctttgagctttatctctaagagcaagtgtgaaaggagggcggtcatatgtggggatctgttggaactgagtatgggtagtgcccatgccttccaccatgaagtactcatcaacaaaatgcccaattttgctaacggccttgtctccggtgcccatcaaccacttgaagtctgcatgagagaaatagaagtaccccgatctgccttgcttaggggtggactttaaatcaaaaaacctgctaacctcatggggagagggcatatcccacctctgggaggcatagagaacgaagagggtggacaaatacttaatgcccctgggagtgaattgtaggaaatattttaccaggatctagatatacgcccaagtatgttttgttaacatcctaatatgaattctannnnnnnnnnnnnnnnnnnnnnnnnnnnnnnnnnnnnttacattgggtgcagccgaatataatga

SEQ ID NO: 132211 - DNA, 966 bp, Cannabis sativa
aaaattagacaattttttttagaagttttaacattaaagaaagcggttgagaaatatttagcgaataaggagttacattaaaaaaaaaatattgagtatagagtattataatatatgaaatgaaaaattttatagtgcaccccttaaaatggatgtagtgatgcattctctatctatttcgacatctagaagaattttttagtctaatattttttcatgatcgtgtacattgtagttatttaagacattccacaaaatttgaagaaattcaaaaaaatttaatatgctaaaatggttcaaagttcacacagtctattgcatacgtgactattttattttatacacatgtaaaatagactgtttgaacactactttatgtactgtaaattattcagaattttttaaaaattttacagaatgtcataaataacttttttttttgaatgcatgtcataaataactttaagtaatatacttttggctatgaaaaaaaattagattacattctttttttgtaataccaaaacaacaagggatgtatcaatcacagtggcagtcaactgtttattttagaggggcaaaaaaatttatctataaatagaatattaataaaaatatcaattttgttagagaaatttatttaaaaattttataagaataaaaataaaaataaatataaattttacgaggataaacatacaaatattagaaataaaaaaataaataaattttataagaataaaactagtaaaacttaattttgttgatacaaaattaaaattatttaaaatcttttacatcaaaatgtaatttttgtaatttgatagtgcggtcatgtaggggcacatgaccttttgtggctcagtacatttttttagggtgttcattctaggcctgcacatgggttgggttgggcggtttttgggcggtttggcagtttttttatttggcggttttttaaaatca

SEQ ID NO: 132212 - DNA, 656 bp, Cannabis sativa
aaagaaactaatctcactcatctttgacatcaaaggcttggccacattagtgaaaggggaattgcaaaattggtgaaacagggggttctcaatggcaaactcagtggcaagttagatttttgtgaagaatattgcaagtatgggaagcattgcaggctaaaatctggcaaatcaaggcacacatacaacaacatccccactggcctacactcactctgatttgtggggagtagctaaggttccatccttgggtggagcaaattatttcatgagcattgttgatgattactcaagaaaagtttgggtaatgctcttgaaatcttaggatcaagccctagagagtttcattaattggaaaactctcactaaaaaccaaattggtttgaaggtcatgaagctgaggactgacaatgggcttgaattttgctccaaagaatttgacgggtagtgtagcaatgttagaattgccaaacacaacactgtgagaaatacccctcagcaaaatggagttgttgagaggatgaacagaactctcctcgaaagagtgaggtgcatgctatttttagcctaagtttcaggtcacattttatagttgtttttcttctttattattatttttggaatagaattagacttgttttctttggtttcaggtt

SEQ ID NO: 132213 - DNA, 526 bp, Cannabis sativa
agagagagagattagggtttcaaacttcgagtgatttagaggctagacttcaacttaagttttctaggttagagttaaggcctttatataggaaagcctaaactctaatttacatttgaaaccttagattaaattgccaattgaaagtacaaattttctatccagtttgttgggctattaaaggcctaattcccaggtagcttgcagctcacgtatcaggttgtacatggagtcttgccatgttaatcttggctgaccatacactacaggatatggtctggtcggccatgcatgttctgcaggttgaggtctggcaggccttgctctttccaggacctagcaagtcatgttaggagtgagcatcggtcggtttggtcgtttttttctatataaaaatctaaaatttggtttccggtctagattggtgcaatccgaaaactgaccggccaatcaaaaacctatcttaaaaccaactattttggacctcagtttggtcggtttaaactgcccaaaccgaacttttttt

SEQ ID NO: 132214 - DNA, 698 bp, Cannabis sativa
aaaaaaaaaaaaaaagcaaagaagaggagttgatgagccacccctccaaatttcacaaagacaagaaggattggtgcatttatgcattgtagcaagaaacctggacacagtaagaggacttgcaagaataatgcagcacttgctcctactcttgctccagcacaagtaacacatttttagctacaatctggcatatatatatgacttagctactgtatgtacattacttatgtcaataaaataatacgcattgcttttgtttagggcctaaaaaataaaggaggcaggccaccaatccaaaatccaaacaaggaaacactcaagagaaagagaagaagggaaaataaaaaagctaggaaggccaggttgactagagaaggtggtggagctggaacaactcaagctggagggtctaatacatagtatgaagcagtgtttagagcagtattttgatgtagtattttcatatagtacttaggaggaatactgtgatgtagtgcacatactattgtattttgaattagtgcacatgatgcttacttttgacacaaacactttagtatttagagcttctaatatatattttttgttattgctatattggtacacattttgatgtatcaaaactcaaagcaaagattggaaaagcttattcaaaactttttactaattagaagtagattatatttcattgatca

SEQ ID NO: 132215 - DNA, 857 bp, Cannabis sativa
tttaaatatctataaataagtttccataattaatcataactaactgctaatttctaaattgaactaagcgatctttacaaaagttgtactgaattttagtttggtacccatagcatgctgatgactctgtcagaatttcaaagtaaacttcggatctctatcaaatatgatggactttggagcaccatgtaaccttactatctctttcacgtacaaatttgcatactgatccactataaaggttgtcttaaccggtagaaaacatgcaaactttgttaatcggtctaccataatccaagtcgaatcgtacattcccgcggttctaggtaatccaaccacaaagtctatagtaacatcctcccacttccagtcaggaagtgacagtgatttcaataatctggcggtctctaatgctcagccttgatctgctgacaagttaagcaccgagatacaaattctaccacatctttcttcatcccgcaccaccaatagtagggcctaagatcttgatacatcttggtagtaccaagatgcattgaatatggagtagtatgagcttcctcgagaatctcacttctaagttctgcacaacttggaacacaaaccctggtcttatacaacaacattccgttatttgacaccgtaaaatctttaggttgattagctaaaatcctcttcttggatcttcactaattctggatcagttaactgagcagctttaattcgttctaacagatcagattgcaacatcaaattgtgaagtttacctacaacaaactcaatgcctgatttgaaaatgtcttccgctagctgaggtaaaatctgttgggatttgtgccctaaataaaacccattac

SEQ ID NO: 132216 - DNA, 873 bp, Cannabis sativa
  modified_base (833)..(837): a, c, t, g, unknown or other
aaaggtatatactatacatttattttttcaaatcaattatttgaacaccaaaaactaacaataataaaaaaaaataaaaaataaagatcgtttaaatgggttaaaccgatcaaaccgacaaaaattaatgggcgggttacacttttttttattagacgtgttacaattagatatttgcaacccgacatttatattgggttggtaaaaatatactataacctgaccaaatctaccgatgtacacccctagaattatagaatgggataaaacccagtttaaaatatttttcatatttgtggttgtcctactcatgttgttaaattgaagattgagaaacttgctcctaggtctgaagtgtgtttgcttgtagtatactcagatgaaactcgaggtgcctaattctatagtcatcaagacaataaagtatatgtatcgacatatgttacttttttttaaacatgactatatgaaaagtcacaagccacacagtcaagtggttatcaagaatatcagaaataatcataattcttatccaacgattttagcatcattaattgaacgacccacaacaattaccacagttcttaataggaaaccccattacatcatcgtagtgggaggattttgagacaacctatctgctataaacatgaagaacatgttattatctctgacacagacaaggaggatctattaacttacaaagaagcgatggaagaccctgactcagacaagtgaacaatgccatggatcaagaagtaaagtccatgcgccccaacaaagtctgagagtatgaaactcctgttggataccaggatcttagatctactcannnnnatgttgtttaaacatcctaaataagaactttctaaa

SEQ ID NO: 132217 - DNA, 560 bp, Cannabis sativa
cccaagggtgagataggtaactactcccaaagtgggttaaacagtcaccacccaccgagggtaggtcatctacctaagggcggtaacttaatctatggggttaacacttaccccctacagtcttatggtcctgaaatcacactctacctacatatggacttggatagtgcaatacttgccctaagtatcaagaccacatactactaaacactaaaaacaacatgaggagtaagggagagatgtctcaggggtaccacctcgaggtgagtactacccactatagggtcggtcgatcaggctgctccctaggggtacccccacatggtttgacacatccaacactctcccaacatcatccaatcccacatgaagctcaaaagtggttacaaactcacaaaaatagttgaatattatcgcaagaatcggacctcaacgaaatcaagggaatgattaagatattttagcaccaaggtcatctctcctgaactgagatacaccaaaccttcccctatataaggggtcacacctgacctggaaaggggatccaaaaattatcactc

SEQ ID NO: 132218 - DNA, 1738 bp, Cannabis sativa
ggtaaaataatttccaacagcctcgaccctagttccctcggaacctcttgttctgacctgagccaccaggtgcaaatggtgtctttcatttctcattggtggtcgagccactaccaccccttccataaccaggggtaggaggagtaggggctcaaccaacaacctgagtccctcgggactcctgagtgcactcaactgcgctctcagctcggagtgctttccccaccatgtaagcataggtggtgttgtcatcagtggtaatcataaggtcatgttttatttttaggtttaatccatccatgtacttttctttcttgctgaaattggtgggcacaattctcgaggccaacctagccaatcaatcaaactacgttgtgtattcagtaacactcatattctccttttggatcagttgggtaaattcttttctttttgcacttctgaccgccttgttgtcgtactttgcgttaaagaactcctaaaactcttcccaagtagcagtagtaacatcacgagtcagggacaccatgtcccactaaaccagcatcttcttggaactggaatgtggcacaagccactctgtcattatcggtgacacccagaaagtttagaattcttgtaataacagtcatccactgctcggctttcattacattgagacctcctagaaagactggaggtgcctacttacggaacctttcatacaatggttccattcgatttaccgtagcaactggccttgcctgcagaatgggggcaggagccacttgtatttctagagtaggcattgtaggagcaccctgctgcctcaaacgtctgatttcttcttcttgttcgttaattttagcttgcattgctacaaacctattttcccattcctgggcaacctgcgacgggttgacatctccccgaccacgtgccctgcctctagggcctctgcctcggccacgaacattttggggaatctgagctacttaaccgccactagatccgaccgagttaccctgactcttagtgtttcgcctagcgtccattctattaaaacagccaacgaaaccaagagctagcctgatcagatcgcgatcaagaataacttactaattaccgcttattttttaaatttaaaatatgcgcctattcaactatcaggctacaaacatgcttcctatcaagcttttcttaaaccatactattaaaataaactactaaagcaataaaggcttactaaaccatgagtcgagttgatcactaaagatgattgtacatgtcgtgacgatcttcgaaagacaacctggaagctttgatacataattgtaacaccctactagtttaggcgtgttaacgtgatttttaacttaattgtgcatcttgttgctaatcaacgagtttattaaaaatcgtgaatatttaaaaatttcatttaactatcaaaataacattaaaccaggatctcgttttacaaactacttactaaattttcatagttcatagtacgaaagttgtcgactagcgactaaataaattaacacccagctgtcccaaagaccgtacgctctaggcctaaccgccccggcatgtacaatcttcatatgctcgctctcatagctgctcaaccttagccttgcccttacctacacacgaaaacaatatttgtgagtcgacatacttaataagaaaagcataatcaataacatagtaataacccggattatagccaggcgcccatacacccaaccat

SEQ ID NO: 132219 - DNA, 671 bp, Cannabis sativa
gtccccgaaccactccaattcgcatggttagcttgtcttttgttgtgtcaaggtttgaaggaaagttaaaatatcgaaagtatttgggatgatttggatctttaaacggatcaatggaaataatcctctgaacacgtgtagtgagcaagtcactcttcagttggatagatctttgcgaatcgggtttagatcatgctgtttactattagtccactttcatgcacaataagttttacttatgtatttcttaccaaaaatcataatgcacaaatgaattgataatttgagaaatgattttttttttttttgaagtagactaagaaatgaatttggaatgaaaatgaatagttaagaaatgggaatgaaatatttggaatgagaataaaaaaaaagtataagaatcaatcgttattagtttaatttttaattatttaaataaatttaaagtacaacgagtcactattaggttgtctttttaaaagtttgaaaaagtaagttaaatctgatcaacaattctcaattattagattttgatgaaaggattataaataaaagttctatggctaaatttgttgggttccaataaaatatatatatatatatattgttagacaatttatatgtataaactgaaacatatgtatgtgtatatgaaatgcggaattaaacaa

SEQ ID NO: 132220 - DNA, 1106 bp, Cannabis sativa
atgtaggtgatttttatgtggttcaaacattaatgagccatagtccatgagtctttgttattaatgaaagttcttatacaaagaatgttcttggtgagtttttttctctctcttgttttcttttttcattgatcgatcccccttcccatttttttcaggggtatttatagagattggtaaggatagttcaaaagggatcacttgtctttgagtgccagtaatgtatgagcacaagttcccaagagatacaaaataggacatgcataacctacgtcgtaggtatcgtagggattaggtgagattaatctttatctttcattgattgatgtgattcttcataatgaagccatcactagcccctttgattatcgtgtaatcgctgtaaacaaggcttacgttgtctgacacgtcctcttatggatgttcttagacgctttccccatgctgcattaaatgtgaggtgactgttcgaatatgttttcctcctcctggagatgcttttattatatttctagctcccggagaggaaggacatgctttatgtacttctctgggggctcacccccgaactacacttgtctgtctgtatgactcagctaattctcgggtgaggtgtccttctggtccacgtggcatacgtaaccggccatgtattttgagaaaaatctgaggcaatacttttatagttaattaaaaaaatataacaattagttatatataaaattattatttttaatattgattaataaattaaaattagtgttaacattataataatatatacgtacaatttcataattagtattagattagataaataataaaattgtaaactaataacaacaaacaaaataaatttaaaaaagtaataggtatcaagtaataatgattcgtgcacatatctttttaaactaaattttacgaaatttgagcaaggttattaatttttttaaagcaaatttaagcaaaattattatctacaaagaaaacacaaaacgagttcaaaaatacatagtaagcttagtgatttattcaaaataataaactttaaaaaaatgagagatattttatattacctattaaaattaaaaacttattaattcttt

SEQ ID NO: 132221 - DNA, 816 bp, Cannabis sativa
aaacctagcgatctaagctccggtagtagcgggatagcgattttaaagcttaggtctgagttttaatagtgttttccatttaagggctcgattttaatttttgttacataaggattgttgtataatggtatatatgtaccctgtgaaatttggaatgatttggacaggttttgggggtgtttcggtgagtgcaaaatttgagattttcgtgcccaaaaatggtttgccatttttgtcaaaacggcctgtcgtttttggaaattccactgagatttagaatcatatttttgtcataacttttcacttccgtgtccattttggatgttctataaaccattttgaagcttggaacaatctctaccatatgttgtatgttttagagccaaaatataagttttattttagtatatttatatcgcgggatttggtaggaaatcctagattgtcttatgtgaatattaagcagtgttttaggataaacacttattggtttaccgttgttgtgacaaagggttgagatcattggcgatagttctccacttaggttggccgatatgcatgaacctggattaaatgtaagaaaagtatattgtactacatagtacattgcattgtaatacaaataatattgttatataatgaaaagattgattggttaaggaataataatgtgatgatactatgtatataatatatgggctcacctgattaagtgatgcgatatacctggtaacgtatcgggcgttggtacgaacgtcagtgacatatgatgagtatcgagcgtaggtacaggctcacttgattaggtgatacaat

SEQ ID NO: 132222 - DNA, 960 bp, Cannabis sativa
  modified_base (367)..(370): a, c, t, g, unknown or other
tatgtagtctcatacctacacagtctcagaatcatcacacttgaccttccttaggcgatgtggaattgtacaactcctaatctttccccttcggatcacggggctttgactgtcacaatcccatttgggggtatgacgtcctcgtcgatcatacttttggctgggtcaaaactttgataccatttgtaacgtccctttttgaagcctttattgggcccttacacccactgaatgatgttacttatacacgagtacgtcactctggctgcttcttggaatgacgattgaccctataaaccaacacgagtatttccagcatactttgtcctcattcacacactttttgggaaaacttcccaggaggtcnnnnatcctaaaattaccccaagtcaagcacgcttaaccatagaattctttcatgatgggctaccgaaaaataagatgcaccatgttgatataaatagtactaatcaatccatttaaaccctctcaactgtgtagtctcatacctacacagtctcagaatcatcacacatgaccttccccaggcaatgtgagattttacagctcccgatcttttcccttcagatcaggggcctgactatcacacagatataccgaatcagccaattactgataacatccagacaagaaggcccccgagtgaatcagtctttaactgattaggcaccgtacacgacttaagagatgatctaaaaaaaacagcacttagcaaggaatgagttggtgcaactaatttttccgtaaaatgacattattttgatgatcaattgtatataatttctaaacaaagtatttgagagtttaatttagataatgtaacaagtgcagaaagatattgagtaaaataataataataaaagtgtattaagatattgtgacatttgataagtagtaattaattttttttttttgaataaaataaataaattttattaa

SEQ ID NO: 132223 - DNA, 596 bp, Cannabis sativa
ggagccgactccgtcaccctcccctgcctatcatctgtaaccacattcttgtcacccagcaacagaggctcttgacacccgattccagacccaaaagatccctccaccgatctcaaattgcccatgtcaatgcgatgtctttcaccagactcctcaccctcttcccctcttgaggtattatcattttgattgactccactagcttcaccaaaggcattcggaacccctgttttatccacaacaaggatacaagtttgtcctcgactttctccaacaaagtcattctttcgggttgccttcccattaccatccttcctcttggagccactcaacttgtcgaaactccgaccgaataccggcgcccgaggcagtcctttaggaccaaccatcttgggtttactaagggcatgagcacctcccaacttggccatcgcagtaccatccccacggtctgccccaaatctaaccgtacccaacttttctttgaatatattagccacatgcaccacgtgaggggtttggaatttagacacatctgttgggttttgtgccctaaataaaattcatttcattataataagatttacttattaata

SEQ ID NO: 132224 - DNA, 742 bp, Cannabis sativa
  modified_base (27)..(33): a, c, t, g, unknown or other
  modified_base (59)..(65): a, c, t, g, unknown or other
  modified_base (538)..(543): a, c, t, g, unknown or other
  modified_base (638)..(644): a, c, t, g, unknown or other
ttagtcataatttttttacttttagtnnnnnnnataatttttttacttttagtcacaannnnnnntgtgactaaaagtaaaaaaatttatagtggaaacttacaaatctcgagggcagaccaacttaatcatactattcggataaaaagttttcatctaacattataattttataaattttattggattatattggttaggtagaataaaattcactccaccgtatgtgttcattatttggtttagatttttgttgagttattatagttgcatttttgttagttttgtcatattggttaggacgatttgcaaaacttttttaacactcccaagtgaataagaatttgttaccatgttttatcaaaataaagacttggtgcatatttttttaatagtggtattttttttttttaagaaaaagataaataatactcattcttataattgaagggtacttttatgtaggggtgttcgcggtgtaggtagtgttgtttttgactattttttcaaattaacccgcacatgtagttttttcaannnnnnaaaccgcacccgcactgcgaaactaaaaaatcgcaaaaatcacaccgcaaaaatggtgcggtgcagtacgttttatgcggtttggactatcactnnnnnnntaaactatcacaaatacaacaaaatttgagcaacacttatcaaaaataccataaggcttgaaaataaatatgaaaaaaaagtttcaagtttaacaata

SEQ ID NO: 132225 - DNA, 595 bp, Cannabis sativa
agtcccatacctacacagtcttagactcatcccacttgaccttccccagatggggtgggattgcacagcttacctgatatttttcctaacaaatcacgaaactattgactgtcacattcaatgacaaagacaattgttggatctttggctcaatacaactcctcctttgatgcttggcgtgccctggaacaaaattttccagtcaatcgaaggcaagactactttagatcaaatctcagatctcgaccattaggaaaggtaatctttcaatcactgaatactttgacaaagtgaaactttttattgattctttgtccacagctgatcatcctcttgatgacagtgatctaatcatgcacatgctcaatggctttggacttgagtatgatcatgtggttgttcatgtcacgagtcttttggataatctttctgtagagtctattcaatctttactactaacccatgagagcaggcttgaaagacattgctctattggagactcttcttccaacatttcagcaaatctcagcatccataatacctgctccaactctggtaatggctatcgtgttgggttttgtgccctaaataaaac

SEQ ID NO: 132226 - DNA, 741 bp, Cannabis sativa
ggtatcactacaataattttggatattaggggtgactaatttaggagcgacacattgtcgcctctaaataatatgggtattaggggcgactttgatgtgcttatcctttgaaaatctaatatatttttgtttatttcgtacaactttaagggtgacaaattttgccactaaaacttttaggggcgataaattaagtattaggggcggcttttatcgcccctaatacttatcgccttgaaatcccaagctcgacccattctccttcattttaccctaaaaattttcagaaaaaagaaaaatattgctctccccttttgaaattttaagcgctactttcccccgactaatatttatgaccccgatcgcgtctcattctctcctttttctttcatcgcgcaaaatcttcacccatctttttgtgttggactgtttcatgtatgacatcgtcgcttgtctgatgtcatcatccctgacaccatcgtccaagctttggttgccctcctccataggtatgtggttttcttgtaaattctaatttaaaaatgtgtgtaaatgtttattttttgtatatttatttttgttagtttttgtatgctacgagagtttttgtgtacaaatattaaattttgggatggtaacatcatgttaatacttttaattttcttctaaaaaaattgatttaatgttgtgaaaaattatgaataatgtgattctttatatatgtttgttctagtttttttt

SEQ ID NO: 132227 - DNA, 626 bp, Cannabis sativa
  modified_base (30)..(50): a, c, t, g, unknown or other
tgatctatattaataagcaaatctgattannnnnnnnnnnnnnnnnnnnngggcataaaacccaacagttcagcccctctcaatgtattggagcacaccagttattcatcacattatctttaaaattcacatggctggtccatcaattaaagaatctaaaaggctctctcccaagatcccccaattgatggtccttcacaacacaataataatgattcgaacaaacttcccatagaaactcagttgtcaaattaggaaagaggtcaagccaatcctcattcttcaatacacgatcaattctagagtaaactctatctcctccttcttgattattcttccaagagaacttagaaacagagctttatgagaaatatgattttgctatcaaaaaagttattttatgggaaaaatattatgacactacaagaatgtccacttttgagcaattgcgccgacaaatgtcaaccaatatcagcgcaagtcaacaaatgcatcgacaaaggaagtcaacaaaatttgttcaccccaccttttaccggcgcataatatcgtcagcaatagcaaatattacttgcgaagtaaaataatttcgccggtaaaagttggcagccaatcgccaaaggtgg

SEQ ID NO: 132228 - DNA, 736 bp, Cannabis sativa
ttgataactaatcagagtgtaaagagttttatttagggcataaaacccaacagtttcgtgtattttcagcttccaggcatttgatttggattcttcatgtctttcatggtgcagaatatgaaaagaaaatgagttcaaaattacttagtgggatccaaacacccattttggagtttttggagtcaacctgggcgcaagtctagggaaccctccaagttgactgccatgactcgagactactcaactctgagaagtttttcttttaccacgtgtcaaacattgatgtccacatcaccaggatcacattctgggtaaataggtgacttctctttaaaattggttgttggactctcaacaaatcatagttctttgaagataaagacttaaaggcaatttggaaaagtgtgctccataactgattgaaatttttcgtttggaagcttgtcaagaatgctcttccaattggttcaagactctttgttgtgtttgttaatccccctggttcatgtgctttatgtggtgaaaaggagggagatactttcaaacacgtgtttctagagtgtcctatctctgctcagtttggcttgcaagcaagtgggaagttaggatggaaaaattggtgatctctaatggaagggagttaatctcttagttcctcttgttagaatttaggataagatgagtgtggttccatctcaaaactaattggcaatgggaggagtagcccattcatctt

SEQ ID NO: 132229 - DNA, 660 bp, Cannabis sativa
taaatagtaaaggtatatcctagacagcaaattagctaggtagctgctgatataatggctgtgaatgagccaaatgctcacgaatgaaccaaatgatcacataattctcttttatactcttacttccatttttaagtaggctctgttgataatttttttttcattttcatacaaaatatttacagagtagtcccaagtaattattcagaataaattgatacttaggtggttttgaggtaaaattggagaacaagtttgttggattgaataaagtatttgtatatatatatgtgtgagccatattacataattaagttttttttatgtatttaacatatgatttttttgtgtttgagactaattgtgttttgaacttttataattgttaaaacttttgtattgcaggtgggtgtgggatttcttacttgaggatgtagagtgttcttgtataaacttttgtataacttgccatttgggctgccatagtaatttgtccatatggatgagtcgattgaagatggaaaatctgcgatcagtagtagagtcgatttgggcatttggaagctttgtaaaaaaatttcatatacaatctcttctccatatatgattgagaagtatggttagtgagaaatcttcgttgatgttttttaatcgaattgg

SEQ ID NO: 132230 - DNA, 2206 bp, Cannabis sativa
ctgccataatgaagccaaaatattttgcatcttctcaaaatcaatcacctattagacaagaatcttccaactaaacaccatctatcattaattccatcatcacatccccctgtgataactgcaacttcttcaagatcctcctcctcaatttgaaactgcaatatttcatcctcagtatcccaattgtgccaacttgtcgatgccataactatcaaaaaagaaactcgaaccacaacagcccccacaacgccaaaaacacaaagaaccaacaaccacaaaacccgacaactaagaacccgtcaaccaagaaacccgacaatcaagaacccgtcaaccaagcaacctgtcaaccaagaaacccggtaacaaagacacccgacaaccaataaacctccgaactatcaccacacaaccttaacacttgaacattaacaaaacaacatagaaccaaagaaacaaagaaaccatgtcatacgacaagacctaacctgcgatacaactgtccaaccgctaaaaactctaccaacgtcctctggttttggatagcatgaagaccacttgaatccgccaactattgtgacgttcaggcgaccagagacaccggcgactgctactggaggagcaccatgcgactgcctactggagaagcatgaagaaacgcgcggctactggaggagcaccgtgcgactgcacctgcaacaagccctgaacaaaccgatcaacctactctggtgacgcagaaacggcggttctgatacggcggcgctggtgaagctttgtcctctattacggcgtcgttagtgttctgttacggcagtagggttctaacagtgttatataatttaactattctttaaccaaaaaataaataaataaaaaacaacccttctaaatctatttaactatttctcccaaatttttcttctattttctaaaattttttaaaatatctaattttcctaaacaatatttataataaaataatattaatattaattaaataatattttcaaactctacccattctatttgttagttatatatatacagggcaagaccatggtaggactcaacaaaagttctctaccgatagggtacttttttcaaccatcgattttaaattgtgtggttattatagtttaagatatatattcttatcatataattaatgtatacaataaaaaattttatactttttataataacatttatttttaaaaataaaaaatattaatacttaaaaacaaatcaaacttcattttctcactgtccattacaacattcttccagttcttccaaacccacgtagcaaaccttctctgcagccagcccagacgacctcacggcgacccctcgacgacggcttactaaaaattcgaatccctaaatctatggtctttcaatcgagacacctttctgttaattggaagttctccaatttatcttcaatctaagaatagccaagatgagttaagaaaggttagggctctctctgtaaacaacatgaaagcttgagagtgggggtcctttcttcaatcattttagaaaaaacaaaatataattacatattaaataatctgatatatttgtcaactataggctacatgcatttagtcctttttaaagttttgattggttaaaaaaagtaccctatgctatatgttaatttcacttggtcctaccgtagcaattccctatatatataaattaattaaaactcaaaatcgtaaagtacttctcccagattttattcattttctaaaattatttttttttttaaaatatatatatatttaaaactaaaatggttaaacctgtattataataacaacctaatatatatataataataatatctaataataaattaaagagtaggtaaatactatttaggaccctttattttataaaagttactaattggaccatctatttgttaaatgacaaaatagactatattttctaaaatggtaaaaatagtactctgagctcaatttttcaataattttatgaaaacatagaacttcagctggatttatcatacgaagatcaaccagttcagattttagacataaaagataaaatctttcgaaacaagaccatggcgttggtcaatgtgctttggagaaacagtaaggtggaagaagccacctgggagttggagtctgatatgagggctcaatatccatagttgttcaggttagat

SEQ ID NO: 132231 - DNA, 970 bp, Cannabis sativa
gccgcagccagggaaactcaagaaaatgctgcacaaaaccaacctgatcttggtgtaagaagaccacgaggtagacctcggggctcaagaaccagaaggcaggagacagctcaagaaaatccctagaacactcaggaggagaaacatggggaaactgaggatgttcctaaagacgaacaacctaacaatcaggcacctcgacaagaggtacctcgtagaccctacagattcacaacccaagggaatgaaaacaatgacatacctgaatcatctcttaaaaatgagaacttaaggcagcccagaactagggaataggttatccctcgtaataatgagagaaatcctgggacacaacctaggacaagtgggttaccaccgaggcatcctcagcgtccttctcgcactaagaatgaggagacatacacgcaccctagcagagggtgagcatttaacctcccccgaaggagaagaactgtgccggatgaggcgagtgctagcttgggacgttcaagatcccgagatcacagtcgatctacgtgaggaggggatagatctcgacgtagtaataatcgagaaagtatgagtcatacaaggagtagtcaatttgagagttactcagatacgaggtccatgagcaaccatgaacgaagaaaaccagatccgtgaacatttaaatcggagacaacctgatttgtgcgagcgcttaaataagaatgcacttgatttacgccaacaactcaatgaaaattgaaagcaagaggatccaatctaattatgaattggtgagctggaaaataaatttaagaaatatataaatggggaatatgggaaatagcctggttacgactcagatgaagaactcgaacctttgcatccaatcattatgaactctgaatttccccaaggatttaaaaatcatcacgtctcgccatacgatgggactacagatctggtcgctcacctcaacaat

SEQ ID NO: 132232 - DNA, 529 bp, Cannabis sativa
agagctgcacgagagagagagagaagaagttttctattattattattgagttattctatttttaaatataattactgtttcatgcattgatccctactccttccaatctgacacatgtcctccaatgaaatagtagctgaatttcgggtataacaattgccccttaaaaagtttttgttaataaaaaagtactttttaaatgcttacagtgggtatattcgtcacaacccatttcttcaagaccacgcatgacctcaattttaacgactccacggtttcgagggatattattagcattaatgaatagccttttcatcttcttcctcatttccaaccgttagattttccaatctttagccttatcgttactgagttctaagtataaaatggtggctcagcctaccgatattccataaactcctggtttttggtaaatttcatccaggaattggattgtcactctcctgtggagatgtcccatccaggttcagaaatatatccttcaaaacttgtaacgctggaatatacc

SEQ ID NO: 132233 - DNA, 556 bp, Cannabis sativa
  modified_base (225)..(226): a, c, t, g, unknown or other
  modified_base (368)..(370): a, c, t, g, unknown or other
aaaaaaaaaaaaaaaagaactagtgtatgagtatttaaagttattatagttagttacaattaacttattaagttaattaaatagaactctcatactctaattatacatcttgcttgtactatatcaataaaatatctcaaaatataacttgagggagaaattcccataactattctcaaatttttttcataatttggagaatattattttttacaaaaaaaaaannaataataaaataaaaaaaaaatcaagagaacaaaattctacaaatataatagtagagggcaaatattatctattatttttttgaggggaaaatgttatctaatattacttcatataaagaaaagtattattattattattannnttattattattatttttgtaaagatacgttcgttaatgataaattagacttttccggtcgttacagaaaatgtttatagaaatagtagcaacattaagatacccaaagtggttatgagtaaaaacttatctaacgacattatgagccataaagttacaagttctagcagtaatacaaaataaacaa

SEQ ID NO: 132234 - DNA, 653 bp, Cannabis sativa
aaatgataataataaaataatgtaatgtatgtaatttaaaatgaaaataaatagtttttcaattttaaataaatattatgtctaaccgatattatttatatttcatattttataaattgtcaaaaacaaataaatcagaaacataactaaccacatatattgatgctaagtttgtaaagtaataagttaataacaacttaaaagaagatatgaaaaattaaaattgatatgtaaaacacaatattaaaaagtatttattataataataataagaaagatcaataatcaacattgtagtcaataactttaatataactttaatatgaaaactatatattgggatcagatatgggataagtagtgttaatgccctgacttgctccgaacctgttttgggtatacaaaattgtctcccaccccgtcccataacctatcaaagcggatatttcccgtctcattcaggatgggtatccatgggtacccaaccgcatgggtcaaatttctatcactagccaagggtagtagtattagtatagttgtattagaggtggttttcttttaattaagtaatgttttaaaactattatggggtaactttagtacaaaaagtggattgctttggctgctatatgacaaaagctaataactatttt

SEQ ID NO: 132235 - DNA, 538 bp, Cannabis sativa
  modified_base (499)..(512): a, c, t, g, unknown or other
aaaaatgggcagatatatgcttagaagatgaagaagaacatgaggttttgctggctgatgattgtgaaggagaggaggaattgagttttgacgatagatgctgtcttgtaggtcaattattgtcagggaaggttttcgattttcagatatttcaaaacatcattgatatttatggaagcctggcaaaggtatttttatcaagattcttgagcagaatagattttcaaagggtgattgatggaagcccttggacgtatgatcgcaaacaactccttattgaaagactcaaaccaggggagaaccctaggctggttacaatgaacacgttagatgtgtgggttcaagttcatgagttacaatcaggtttcaaaacagaatggactatccgagaagtggctcgttatattggggaatatgtcaattctggcccaaataattttcaaagagtatggtgtgattatctcatggttcgggtaaggtgttggaaatattttaccannnnnnnnnnnnnntaccatgtatgtttcattaacatcct

SEQ ID NO: 132236 - DNA, 1461 bp, Cannabis sativa
tatacatgtccacctagattagattctgttaagtatgatgaggatggttcagcttaagcggaaatgttcctttgaatattgtgttggatttcttcttcccttgatccaacaatcttgtccactactgtccaattctcagcaaccgactacatacatgaaacaaaaccattaattcataaaaagagaaaaaaaaaaacttgattataatttattgcaaaaccaacataaataaagaagatagggacaaaataaaattaaaaattttggttttttttttgcgacactaaaagcatatcatgtggtgcagattcgacccaccctttcaacatttgtgcatggcccaaacctaaggtccgctaagtatagcctgataaagggtatcgttgttttggttatgtaaaaaattgtcatcaattgttttttttatacggtagaatatattatagttatataataagtgtttatcgagctttttagaaactaattaataaaaaattaagcttaaagaagaataaattaaagataatgcaacaaggatttttacatggttggacgttaatgagtcttagtccatgttgactcagaaatctggacagagattcttaagtcacacccgccaactagattggcgagaataaaatatttgttaagtaattataagagagacacatcaatttatagtagtccactctttgtatcgcgacggtaattgatctatgagatgttaagtacagaaaaaggctaagtatttcaactctggtttctggagagagaaactataaagagatgttcacaccttgtgggtaattttttgaatatacctaataattatttaattattattgttgattacgcccaaacttatcttcacaaagtaattgttgtagtgtagtatgggcagtcatattcatagagagatatcttatcaaaaaattattagtagagctttaagcgcaaaaagaaactaaatcattggtagtttttgaaaaaaatattaaaaataaaattaaagcaaataaaattagtagaaaacttcaataaaaaaagtgataaggtttcaagaatcacttatatatttggctcatttatttaaattttaattcacacatataataaaattaaatcgttcacttcttaacatgaagaatatatgtaataaaatatattcaagtaataacaattctcccgttagaaacttagaaaataattttatgaaaaatttaagaatgaaaatatatcttattggcaataacataatgaaagactaataatcataaaattgcaatatcaatatatttgtactaattatatagaaaaagtacataactattttatataatagtaaataaataaaaatattaatatagaaatagagaaaaatacaaaaaaaaaaaaaggggtcttttcaatattatacctaaaattgattttatttataaaaatacctttaagaaaattatt

SEQ ID NO: 132237 - DNA, 548 bp, Cannabis sativa
agaatgaatagttaggaaaatagcgagccttatatatccgacccacaagagagtcctggtacagaagtaaccgactcacaacagttttgttaaaatagagaaattttaaaaaattaaaaaaaaaaaccatactaaaatacgatataggatattctaaacacttttttcattttaaaatttcattacaatttactattcatgttctatatttgtagataactatttattgctctaaacatattttattaattattttgagtttatatgacaatatatgtatacattaatattataggaaaatgctacaatgcaccctcttaagaggggtgcactgatgtatttctatctggtgcgacatctaagagacttttttaggctaatttttttttttttatgattgtatacattatagttatttaagatatctagcaaaattttgagaaatttgaaaaaaaattaacacccaaaaacagggttcgtactatttattgtacgcgtgactcttttattttatacacatgtgaaatagactgttcgaacattgtttt

SEQ ID NO: 132238 - DNA, 530 bp, Cannabis sativa
aactttctaattatattttgagtttaattttatttttattcttacacttaataattttatagcttataatatcccgatataagtgtatgcccaaaatataactggtacagttttgaagtattatttgtaatgactaaaaagtttaactatctgttttttattaatgaaagctaattttaaaaaataagtactactccatacatatattcttcgtcattatatgactcttatttaataggttattgaagtgaagatcttatcatatgtaactttgtacactcatagattgattattcatacgcaaatttaacatcaaactttttctttgtcaattcgagtcttccacaatcttaccataaaaggtggacagtttttacttgattattttaggagtttagaatttgacaaaacatatttttcgtttagatgataacttattttggttcgaagagaatctttcaccatttgcaaatatctaattcataaataattataatcagcatgtcaaaaaagtatatatatatatatat

SEQ ID NO: 132239 - DNA, 532 bp, Cannabis sativa
gcaagttgaggtgatttttggctaaagggagtgttgtgggcttggatccaaaatgaaacaaaacgaaaatggtcaagcaagagagtgtcaagaccctcagggctggcaaagatcataaggcatttgtcgaaatgccatgattagtcttcaaggacacgtcgacggtcaccttcacattgaaaggtagctaagaacacgtcagagtgtagtctgatatcttaacaggaaaacggagggtccggataaatgaagttaattttaaagtgtgacactatattaaaagttttccaaaagaaacaaaaaagtgataaaaaaaaatacaagaaagagcatgagtgaatgttagtagggctgaacatttgggcccgaaaattttggaaatttgaaaaggaaaatttacagttaaacacgtttttgtccatttaataccaataataacgtggatattttaattattgagagcactgttattttgtaccgttttttattttaaacaatttcaaaaagtttgttggagcatgctaaagtgatt

SEQ ID NO: 132240 - DNA, 1120 bp, Cannabis sativa
  modified_base (750)..(751): a, c, t, g, unknown or other
ttagaattctcttcttgtataataaatttttattaattaattttaaatgatattaaattattttttacaactagaagaattaagtatggggcctcaagctaaagcctaagttgtatatattcaaaaatcctgaccaaataggtgggattaattgatacgataatcataatataaatcttgaatcaaataaataggtacaccagaaataatcataataataaaaatattaattgtaacaaatcaataaaaatcaacaaatcccgtaaaaacaaaataataaaaactcaattcagctctttacatgatgaaaatcgaggccacagtgagaatggccatagatccacaacagtgaacgaagtcgaagtagcaccgttttgagctggtgaaggagcatcatcaagagaatcagagatcactgaaggagagccgtaaggagaatcaaagatcgatgatggagatgtagcatcggtggatggagtgggagcagtcgccggtgttgtggcggtcaccgctcgagcaggagaaatctttctcggagtcatttttagagaggaaaaactgaaaaatcttttgggtactgattggataggatagttttgattttataggtgggattaattgggattttcatattttctcctaaaattgtgttgtggtattctttaacatgcaagtgtacgtatcgtaaacaagtaatagactcacaaagagtgaggtcgatcccacaagaattgtagttaagtactttannattaaatctttacttctatttggtgaaattcaaaattaagagaaaattaaatttaagaacactaaagagaaagtgaaattaaaaagcaagtaattcaaaagagaaattaacaatgattaaagttaaggctttcgattttaattgtatctattgtctatggcctaatatgattatcttcatactactaatttttatgtaatagccgatttactaaggtaatttatagtcttctcagatatataaatctcaattacatgcaaattttctactctcgtgataaattaaatatgcaacagacattaaatacagaaatcctatgtaacaccctaactagcttaggcgtgtttacgtgatttttaaacatgttgt

SEQ ID NO: 132241 - DNA, 1939 bp, Cannabis sativa
  modified_base (32)..(32): a, c, t, g, unknown or other
tgattaacataaataactgctaatttccaaantaactaagcgggctttacaccatgtctgttacagaaatcagtgaacatgtcactgtcaaattacttgtcgttgtctgacacaatcttctaaggaaggccaaactggcatataatgttcttgacaacaaagtcaaggaccttcttggaggtgattgttgccagggattcagcttctgtccatttggtgaagtagtctactgcgatgaaaacaaattgtacccctccttttccctttgggagctgactaattacgtctatcccccacactttgaaggccaaggagactgcatcatcgtgagctcattgggtggagctcttggtatttttgaaaatctctggcacttatcacaatttctaacatagtccatcgagtcttcaatcattgttggccataagtactcccgtcagagtatcttcttggataggctttgctcctagcatgattgtcgcataagccttcatgcacttctatcatcagtcgttcagctttggctgtggtgacacaactcaagagaggcatggaaaaactccatctgtacattatcacgtctaggatcaagtacctagcaacttttcttctcagtttgcttgtttcatttttgtcttcttgcaaggctccaatttgggtgtaagctgcaataggcatcatccatgttggagtattattcaacatgtcgacttcttctgggataacaatgctaggttcctctaggaactgtatgggcaccaaattttctttatcagcaatggtgttgcttgcgagaagggcaagtgcatctgctgtggcgttctgttctctagggatcgtgtagcctttaagctgacttagcaagtctttaattttgctcaagtaggcaaccatcttttcatcttgagttgtatattcacctaggacttgattcacaactagttgagaatcgctgaatatgtctaggtggttagcccatacttcatgggccagcttgaggccagctatgaaggctttatattcagcctcattattcgaggctttaaagatgatttgattgctccgtgtagtttctaccccttaggtgttgtaagggcaatgcctacaccgaacaatttacaacttctgtcaacatggagtttccatgttagtactttgggattttgttgttgctcttacgctcgctttttctctagctcttgcttttctcccaagtcttgagagatctcaagagttgagttagtgcactgagccattagtctgcaagggcttgaccctttatggttgttcttagttgttatgtaatctcgaactggccaagcttaaaggcccatttgagtagtcggcgtgatgcttcaggtttctacgaaacttgccacatgggttaattggtgtacactttcatggggtgtgcttggaagtagggctttagctttctggaagccaagagcaagctataagtcagcttctccatgagtgggtatcgactttcggcattgattagccttttgctaatgtagtatacatggtgttatacactgtcttcttctcttgtgaggataacacttacagcatgctctgtgactgctacgtacacgcctaactcctctttttccaggggtttagacaacagcggtggttgagtcaaatgttctttcaactcttggagtgcgttttcacattcctttgtccacttaaattttttgtttccctgagaatggttaagaagggtacacatttgtctgtagacttggacacaaatttgcttaatgcagcgatgcgtcctgttaggctttgtacttccttgataattgtgggaaaatcatgtccaaaagggcttgcatcttatctgggtttgcttctattcccctggcgttgactatgaagccaaataattttcttaagcctacgccagaagtgttaggttttgtgccctaaa

SEQ ID NO: 132242 - DNA, 946 bp, Cannabis sativa
  modified_base (36)..(44): a, c, t, g, unknown or other
  modified_base (473)..(475): a, c, t, g, unknown or other
tttttaattaatgtgcatttttattgagcatttaannnnnnnnntattacattgattttgtgcctctaattactcttttcttctaagaaattatttcttctcagctagtctcttttggtttaggaaacttcttgtaagagaaggaattctcttatggaaagttgtcaactttaggaaacttgacttttcttttttctaattgatgatgtcatttttatcttgattagagcagatcaaataaactttatttggcaggtttgaagtataaattcatgatcttggtccatttaaaaagtttcctttcttgttctgatttgctgctgtagagctcgattctaatgctgcaaatcaagaaattttttaagaaagttttgtatagctgagaaatcatttttgtggctgtctctagggttgttatgttctataaataggacctagagagtagccaaacgtttttatctcttctagtctcnnnttttcatatctttctttgtgagaagagtgtttcatttgtaaaaacatagagtgttcaattaggttttagttttcttattatgatctcatattattcataaaataggttgaagagaagctttgaacaagtgtgggtcttcgggagaagacttttccaactctcattttgggagaaaatgggcatatatcttcagaatgatttgttttaagccttatttcgggaggaagtaagcatcaatagttgaagggagttcactacttggtgtgttttaaataacagattagcaaggttgattacaaaggattgtggccaatcattagagggagtataagtttgcttaagtcaattacttttgtaatctttgatactttattaattgattttattttctgggcgtgaccccatggactagcagtgtttgaaaaaatattaataccacgtacaaatctcttgtgtcaagttttaaattct

SEQ ID NO: 132243 - DNA, 717 bp, Cannabis sativa
gcggcaaaacccctaaaattacaatactgttagcaaattacaactttaatccaaatttagctgttaacttccatgtcggattgtccacgtagatacagtgtacaagtggcacaattttattgtcccacgtaattatattattaaaaaaataaaataaaataaaaagatatatattttttttcaaccataacatattacatatttttcttaaaaaaaatattttttttctctaatatttttcttttatgatcttcttcttcagtctaaacactgttaccaccaccaccatccatagataccgtaaacaccaccaccaccactactgaaacaaccatcatccgtagccgccgtaaacaccaccacccaccactaccgaaaccaccaccattatcaccaccttaacaccaccacccaccacaacctatttttcaaattcatatcacacaaaaaaaaaaaaaaaattaaacaaaactcaaaccaaatttaaacaaatccaaatccaacaaacaaataaacacacaaaaatatatacacaaaatcttagttccaaaactcaaatctgaaaaccctaaatttgtttcccccacaagtattatcttttctcatatttgaaaaacaaagaatacaataatacccacataggaatatctctacacagatatatcaagaagatttgaaaaaaaaaattatggaaaaccctagatctaaagagagaga

SEQ ID NO: 132244 - DNA, 1138 bp, Cannabis sativa
ctcctctagacgctcctacttccaccaactgttttctggatagagtgtcacataggtcctttagtcttccaagtcgatcgtgcactttagtcgacttaggtctaattgttttctcctaaccacataatcgtgaaggcaacactggtgatgtttctgaaatgatttttagaacgtcttgggttaatacgttgtgggaatggtcattcaaagtattgtagtggctacttacatcaaagtagtcttcaactggatcacaagtatggagagaaatgagatggttgctcaagttcaactcctttccatgtactcgtgggaagtactcatattgttggccattggggccacaagcaatgtaatggcacaactcacctctttcatctcggaaatacttttgagtatgaagcagctcattggtccttactcgtcagatctcataacctctgaatttaaaatagagtcttcaattttttccttcgatatgagtagtaggtctctttccctctgtagggtctcgagacttggtgtcattaaagcaacaggaagaacctggtggaatagtcctgttggttctctcagtggttcatggttgcttcatatcaggtggaggatccatttattgattccctcgagcttgagccctttcagattcttgccgaggtttgcttctctctgggagtcccaacacctattttttgcttagtgcttgcacgattacaggtgtggtagtagtgtttcgtgcattaagagtttttccttgagaactagtccccacgtggccagttggccgatgggcaatctctcttacctactcagaaagaccactatgggggtagttctgtgaccaaagtgataggcttctctgattcgttgagacatgttggctctttactattcccgttcaacttgttggctctcaatgttctgcagttctcatggaaccagtttggaactgctcatgttgattgtcaagagaatattgaagttgttgttgtaggtcaaccacagtttggctaagttgttcaacctggggatcaaccttgtaatatccagtttaaaatagtatttaatttttcgtttggatattaattgtgcgaggataattaattcatttatttgtgttgttagtgagttgatatta

SEQ ID NO: 132245 - DNA, 741 bp, Cannabis sativa
ctctctctctctaattatatatatctaatttcttgaaatagaaaaaaaaaatgctaaaatgcacacttaacatttaatattagtgagaagctaattataactttgtattacaattttttaatcaatttacacgcttgaaatcacatgttagaatatatttttttcaaatttttttagaacggtatttgttatagttacagtattatctctgtaaaatttttaaaaattctaaataatttacaataccgaaaatagagttcctgatatttcagtttacgtatcacacacattcaaaaaacttcaaatgtatctttggcactgtaaactatttaaaaatttacaagaatagtgttataaatattaatataagaataccaccatgaaaactttaaaatgattcactaccaaaattgactaaaaaattataataaaagattatttataacactctttaatattatttaatttaataacaattataaaatataataatttcacctaataacaatatctagacaaaattaatagtaataccatttcaacaaaaaaaaaaatcaaaaacaaaatctctaaatgtatgtttttttttttttgttttttatttatttatatatatttattgatattgcttctaaatagagcattactaaatggcattgtatggtgtcccactggccaacagtatcagctctcacatattctttttttttttttggctaattaggatttttatcccttgaa

SEQ ID NO: 132246 - DNA, 1126 bp, Cannabis sativa
ctctggtgttaatggagttcaagctactcaacctcgatctcaagagcctgtttacttcaaccatagcatttcaattcgtttgaatgatcacaattttccttttgtggaagcaaacaggtccttccctgcgatcaaaggtaatcggttactgaagtttatcaaagatccacctccagctgaatttctcactccagaagatcgaatacaaggcagagtcaatcaagattacaccagctgggaagttcaagaccaacttttagtctcatggctactgtcatcgatggcagaaggtcttctaacacgaatggtagggtgcgattcatcacaacagatctggtcgactctcgagaagcattttactctgcaagtatcctcaaaaattctggagttcagaactaaattgcagaatctaaagaaaggaaatctcagcctcaatgactatctcttaaaggtgaagcagactgttgatcttcttgcctctgtaggagaagttctgagcgatcatgatcatgtggcagcgatttttaaggggcttcctagtgaatatgatacatttgtcatatccactaatactcgaactgagcaatacacagtcggagaaatcgaggctcttcttcttgcctcagaatcaagaatcgaaaagtcgggaaaggaaatcgatctcagtgcgaatcttgtttcgaatgatcaagatcttgctatggatcctctgatcgaagctaatcttgcctggagaagattttgacagcagtatggaagaggaaacgcacaatcaaatatcaacacaggtctgttcaatccagtaccaggtagaaatttcaatcgagctgagaacgttggtggcaaaggtaatatctctttcaatcaaactaatagatctgctatgagtttgaacagtaaggtgcaatgtcaattgtgcctgcgttttggtcacactgcacacaactgttattaccgttttgacaagtccttctcaagatcacaaccaggaaccagtactcaaagtggtggatcacagaaacctcaagctaatctcaccaccaacaatacttcgagtgatcctaactggtatccagattcgggagccactaatcactgtacacctcaagctcaaaatctagcaaat

SEQ ID NO: 132247 - DNA, 708 bp, Cannabis sativa
  modified_base (667)..(677): a, c, t, g, unknown or other
tgagacactatagactctcatcaaaataggataagttttagagttccattggaatattttatatgaaaaaatacactatatatgagtttttagtgtgccattgaagatgaccttagtgcgattaaaaaacaaaatactataatttaactttgtattttgtaaaatactacaaaataatactcaaatttaatttttgtcattttttttatataattcctctttttcagatttaatagttgatgttattagtcttttatcattttttcctaatgtaaatattttacatgtcaaacgttctgcagatgaagcggcccatgaccttgctaagtttgcattaagagtagatgagacttgttcatagtaaattatccctccgcctatatactttactattgtaaacgaaacattgtttcttaataatatatgataagtaattttccctttaaaaaaatataactaatctagtcataaatttttcatgttagattattatttaatttcattttaattaaattgagggtactatttagtatcattttagataagacaatatctaatttatcatttaaaaagaattaatttaaaaaaagaataaataataataataaaaaaattgatgaggtatcttaaaagattggctaattaagatttttgccccctgaacttnnnnnnnnnnnaaatcatgcccctaaacttttaaggtcgtta

SEQ ID NO: 132248 - DNA, 1020 bp, Cannabis sativa
gaagatgaaaaataaagtgtattttctacaaaagtaacataaataaaaacaagatatttgttgagatcaggataataacacctataccctttctgaagacgagaataatcaagaaagaccactttaatgacttaggatctaatttggtaacatggggacgaacatctcgagcaaaaaaaatattaccaaatattcgaggagcaactagaacaaatgacttaccaagaaaaagaattataaatgggatctcacatttaagtatagaggatagcatgcgattgatgagaaagcatgttgtggaaactacatcggcccaaaaaagtgtaagaacttgcatttgaaacaagagggcacgagcagttttaagatgtctgtttttacgttctgctacaccattttggggtggagtatcaatgcaagaagtttcatgaagcatgtcattagatgtcatataaggttgaaattgagcagatgtatattctttggcattgccacttcgcaaagtacgaacagacacattaaattgattttgaatctcctcccaaaaagcacaaaacatgaaaacaactcaaaacgatttttgattaaatattaccaagtaacacaagaataatcatctacaaaagtaacaaaatacctgaattcaggtttagacaaaataagaggaagaccccaaaaattgaatgaactaactcaaaaggaacactagcacgtttattgactcgaggactcaaactaacacaatgatgtttgacaaactgacatgactcacaatctaatgaagacaacttactatattggggacaaagtttcttgaacaaaggaagggatggatgacccaaacgacattgagtttcaaaagtggaagcaacactcggacaagtaatagaggttggtggaattggatcaagaacatacaagccacctgattcatgtcttttaccaataatttcttcatcataagatcttgaataaataatgatcaggaaagaatgagatgcaacagtttagattacgagt

SEQ ID NO: 132249 - DNA, 508 bp, Cannabis sativa
tttatttaattattaaaattaaaaaattcttgaattattattaattttatttagttattaaaataaaaaaattattgactaattattatttaaatttttatatatagtaatatatatttaaattatttattattatatttttaatataaaataaatatacaagtccaacaaagttggactagaaatctaatatttttgtatgtcttattttcatgtctagtaatgttggactagaaatttttttctagtccaatattgttggacatgaaaaatacactttttatgtccctggatattatgtccaacacaaaaagagactagaaaaacttatctagtctaactttaatgtacataaaatgggttttttgtagtactgtgtactcaccgaattttgtgtataacacttacattggttgtagaggaacattatgactccttccgctcagatctccaactcttgttccttttggtcacagagtattatcaagatttgagcctggatctcttt

SEQ ID NO: 132250 - DNA, 904 bp, Cannabis sativa
gtcatatatagcccatatactccagctaagcttagcattgtgagttaagcccaattgttagataaaggtataattacacaatacacaatttttttttttttttaaaaaaattaaataattacgtttaaagaatttttttttctttttttttttttacatttttacgatttttcataaaaacaacacgaaaacaacaaaaaactacataaaaataatagaaaaataacatccaaagaacatcaaaacaacaacaaaaaaataacgtacatataacaaaaaatcaacaataaattaacaagaatacaatataaaaagaccgtattttttgtaaataaaatcaaaaaaactgtaaaaatgtttaaaattctgtgacatagtatttttgtaattttttttattttttatttttatgtatttgtgaaataatcccgtagatgaaacaattatcatattactcgttgaatatgtacatttataatttgtcaaaataattaccatgatacatattgtttttctttttcaactacaggaaaatacatcagattaaatttgatggtaatgctaaaaggtattcacggtgcctagcaatcctgtgagatgtactatcgttattgatgcaacttatattactttattaaataacatcgagaactgctaactaattatagggcgtcatctcatagtggtgcctcactattaaaaaaaaggacctttagacgcaattagcaaaatttgcaaccgtaagtgttacaggggttgcttaaggggtcaaacaaaaccatctctcactaccaaaaaaaaaagtattatctttaatgacaacattttagtcaaaacataaatttatgtgactttagtcacagcaaaaaattatttgtgattaaaacataatatttagatacaa

SEQ ID NO: 132251 - DNA, 1667 bp, Cannabis sativa
caacttactacatcagtactgcgtatataatttaaaattaaaaaaatttatatatttttaaaaaatcattaaattaaaatcaactaatgattaagaaaattacgtaaaattatatttaaaaaataaattatttttttaagacattgatatgatactaatgtgtcaactaattaagtattcatgtattattttatttgttaggtgtgacaaaacttgacagaaaatctatttataatattgaatacttcaagaactttttttataaaaaaatttagaggctacaataatacataaggcactagttaagtatccatgtattattttgtttgttaagtgtgacaaaacttaacataaaacctatttataatactgaatacttcaaaacattttcttgttttatttgttattgaatttaaaattgaaagagataatatttaattaattttggtgaagtaaaaaaatattataaataattattatgtaatttaatatttaaaaaaataatcaacttaaaataactgatttaatcaacatttaatacaaatagatatatattatgaataaaaaaaatagattaaattatatcaatactattataaatattccaaaagagcgtgacatcaccgattcttcttaagatccactatattgtaaaaaaaatattaagagcatctctaatggtaatattttagaaaatacttaatgaagtgaaaaatttaagtgataataaaagaaggttattcttaaaatttacattgatgtcacacaattgacattgatgttatgttttttttacaataaaaaattaaaagtgcaatatattaaaaaatatatataataatgtgtgagatcataattatatcatttttaaaaagtattatactattagaatatttttagaaataattgtgctaaaaatgatgtggaaatatataacacttttaaagaatgctactattgaaaacactcttatatatcctgataaaaacacacattccaatccacttggtaactttagattggtttagaaagctacaagatgctacaacttagcaacaacttgtagtcctccagatcgatttgaagttactagggcataaatcagtgtttccatggggatattttttgtagtgtacaatatataaaatgacaatcactactacttaaaaaaaaacttttataggtattttttttttcagtcactaaaaagaaaacgttgccataaggtcccttacagggttttttttcaatccatttagcgattcttagaatgccaacggttataagtttcgctaaaaacatctcaaaagaccatttttatagtagttagcagggttgatcttaagctaaggtgggtaggcccgcgcctagaactcactcctattaggggctcaaatgatttttttttttaataaatatgtattttttataaataatattatttattttttaaaaaagggtctaattttttttctagggtcgaattttactcagggccgaccctgatagtagtcattctcggaaggttagcatgaatgagctatccttttgttttgtattgtactctacctttgattattatttatttggtgtggatttttcacacacttagctagtagtagctctcctcatttgtcaattttcactagactttttattgggtcatc

SEQ ID NO: 132252 - DNA, 831 bp, Cannabis sativa
taaattacattacagcatgctatgggtcgaaaatcacttacagtatttggacacatgattttgggacaagtgtaagtattgtcgagttgattttttttaacagatttcctaagtgaaggaatgactggattgcttcgcaaagttcgtcacaaattaattcctagttgtcttggaagaaataactactatatccgtcaggtccatatgctttgattccagggatactaaacattgcttgtttaatatcctctttcgagtacttagccagtagccattatgcttgctgtggagataatactggcccctgtttgacaacaaattccaaaacctgcttcttttgtttcatttgagttcccaatagccttttataatactccaagaaagcctctgtaactgcatttggttcttcaatagccttttataatactcattgtcaatttaaagtgatactctactatctttaatttttactcaaaattaacgtgtattaataataatatcacgtcctaattctataagtttcacacctaatgaactaagtctaaatctcatagtaatttataaaagtctaatttatcaaaatgtcataattctcataacagaaaaatactatttattgagaaaatgaaatattctaagcaatccactatcttcatatcgagttagctaaaaagaaataaataaataaataaataaataaataaataatgtaattagataacaataacaatttttttgttattacaatctaccctccttaaaggaatttcttcctcaaaattaacttcaacccagcaaaactcggggtatcatctccttatatccttaccc

SEQ ID NO: 132253 - DNA, 858 bp, Cannabis sativa
  modified_base (759)..(770): a, c, t, g, unknown or other
caaccaaaatgtaaagaattgatttagccctatcattacacatcggacaagtaacagaaacatccacatgcctactctttaactgagacaaggttggtagacacctagaacaagctcttcaacgtaaatcattgacttttggcaagattttgagattccctaaggttctccaaaagccatagttactatcttttaaccatcttccatgaaacaactgaagatacttataagcacttttcacactatatatctcaaaaatttcttgaaatcaataccaatgatttgaaccttgattatcattccaaacaatattcttaatcagataacggtcaactgcattgaataaatcattaagaatttcgtcatcccaccctcttactcttgtcaccataatttgttgaaccttcactccctctaaactcgaatgggaggaagaaaccaacgattgctcctcactaggaaggcacagcggctctcccaaaacatcaatggaggaaccatcaacaacacaccacctacactctgcttttaatagctcctgagcagctagaatacttcgccaaatataacttgggttagacgccaactcagctgtcaacaaagttccatgaggataatatcgtgcctaaaagatgcgactaacaagtgagtccttttgaattaggaggcgccaaccttgtttttcaagcatagtaagattaaaatcacgaattttgaaactccattcccccattatccttgtgacagtcagtagtcccnnnnnnnnnnnngggaaataccgggtaagctgtacaatctcacaccgcctggggaaggtcaagtgggatgattctaagactatgtaggtatgggactaca

SEQ ID NO: 132254 - DNA, 610 bp, Cannabis sativa
ataggggttgcggcactacattgtagtgccagtctcctcctttttgccatttgtcttctttgcccaaaaataccaatttagcgtcttaacatagaatttgtagccttgacactcctaaaattatattttttgactaattttcacgattttcacgatttatattttttttcaaaatagaaataaaactaaacaaaatgaaaataaatattgtaggaaatttaaatttccttttacaattttgccctataccaacaccaaataatcagttttaaatttaaggtcaatttcgacatttccctgttccctaacttttcaaagtcagcagaccaaaacgacttcgttttggctttgaacaaaacccaaaagatcgagacacttcttgatcactttctctttcactaggtttagatttgaaaccctaacagagagtttctctctgagaaactcgaacccaaaccctagcaaacccagaaatcccaacacaaacacaaagccaagatcagatctatcaagatctaatctaatcacacatacacaaacaaacagaaatagattagggttagaaaacaccaaatttttgccgaagttcaccaataaattggctacgtct

SEQ ID NO: 132255 - DNA, 987 bp, Cannabis sativa
  modified_base (951)..(961): a, c, t, g, unknown or other
tccgcactttgcggattgaattgaattggatcgtacggattagattggatcggctattttatgaacacccttaactgacatatctaaaaattataattttattttagccaaacgagaaagggatacatctcttttttttaagattgtataatcttggtatttaattattaccttgtaaccactttgccaaaaaataaagggatatattaccttgtaaccatggtcaagagcaatctcaattatgcttcttctagtaactcctgaaagtatggtcccctttatggctgggggtgaaataagatctcccttaacacagaacaaaattataataaatatatcattgacttttgacaatataagttggatctctttgagaatacatagcaaagattaaaaagcacccaacacatcaaattaattaatgttttattttttaccttgacgatgaaaatattagaagaagacgcctcctctatatgtctcttattaatcgaatccagatacaacacatctgaaaatccattcttctttgctctgtctaatgcttttagaacctggttaacacaaagttaggtacgtagtgcaaaacaactatactcgagtcgatcgaattttgatcaatgaataattaaattaaaaatttaaatttttatccttaatttaactatttaattaaaaaaatatttctttttacactatatcaaaaatatattcatacaaaaatatttaactcaaactcaattttttctttttttatttttcttactaaaaaaacttttttttttaatttttttttaccgatggaacaatctcagcccatacgatataaaaatgagagattttttttaattaaatagaaaaattaaatataaaaactcaaaattttctaattttagtcattcatgggtaatacccatttaaagttcaccccatatatatatatatatatannnnnnnnnnnggtttcaatggttacatttttattgt

SEQ ID NO: 132256 - DNA, 840 bp, Cannabis sativa
aataaaaataattatatattaacaaaataaataataattttacaaaattattttaatatatatgatattgcgtatttaaatgagtactttttttatgatgcattatttttatattccgatcatcgttcacataattatattttacttgttattaccgtatctcactcaagcaatcatttaacaatgtatttttatacataatttgttcaattatttaattgtaaaaaaagtaataaatcttaagaaaactaatctaaacaaatttttactatacaatatcaaattcaaaaattaatttaaaatacaatatacaatatctgtaataaaaaaaaatatatgtacttactacttaatttattttgactcttgattatctaagaaaataaaaagaaaaatatagcttacaactattagagagaaaacatatgagagaatataatcattataaggatatatattataaggaaaatttacaaaaatgctgacttttagcctagtctttacgaaaatactgccatacggcagaaattacttttatattgtcttggccaatttttttcttttatactgtaaacaccaaaaaaaaaggaggcctccatcttccacactcacggacagaaccaccacaggaacaccagaacaatcagaaaacaaccattaattctggtgagaaccacccaatgcagtaacagttatatttgcaagcctaatcttaaaaaatcaaaacaaaaaaaactactaaacactgttggacatttatatgtataaactgaaatatatatgtttatgtataaaatgcggaattaagtcaaacatatatacactatgaataaggatcga

SEQ ID NO: 132257 - DNA, 839 bp, Cannabis sativa
gaagatgaaaaagcatacaatattattgtttctgcgtttacatttttattctttactagttttttattttacagttacagaatcgtgtatgtagttgcagaatatctatttcattaccaatgttattattcaacatttaaataataagttaattaattagtaattatgaaatagacgatttcattttgaaatacatttattagtgtcaaattgaacatttcgttttatatcaattatttttgtgtggttcataagaaagagagtgggaaaggtgatcaaaataatgatgcggatacctctcaccttaacaaaacttgacttgtattttgagaatttcaaaaactatttttattcttattttttaaaatatttttttagaaaataaaacacatttgtcaaacatatttttacattgtcgtttttagttcttgtatttagttcaactaagggtcagtttgacacagtttttgaaaaagtttaaaattattttttgaaaaaactgtaataaaaacgtgtttgataaacagtcaaaaaataactttttaaagaatttatgaaaaaattacagctaaaagctgaagctgatacaactcaacttgtagaaaaaaattgttttgattaaaagactttaatacatttatttgtactaaactatatttacttatattatatattaaaaaaacaatatttaaaatacataaattataataaaataaataataacaaaaattaaatcttttttgaataaaaatattttatatattttattttaatattaacaaatcacatcaacctaaaaattttcttacatatttgagtttctctctctctctctctct

SEQ ID NO: 132258 - DNA, 781 bp, Cannabis sativa
tcgattttattcagatgtgtgttaatctttttgtgcatggtatgaggaatgagttgaatgaatatgaatataaatcaaagtttcttggaaagatgtccaaagctggaggtggagctttaaggattagatgattagtttacagtcacccaattcgtagtttggaaaactttgtttgttatctaatgttgttattagcaaatgcagtattttggaaccttaaacatgtaacttttggttttatgtttgctgagctattagacatatgtatctatttttatttgtaaggtttcctggaaacttttatgtttggaacattattcaggtcaatagaacttatatacttaaaagtttatcatctactgatttaaacaactaattagtttatttgtctaaacaatgatcaatctaattaaaatagatttttttttttaatttcaggtagtaattcaaaatcatatagaaacggataggagaaggtaaaatgtacattttttgttcaattattgtaagtgttctaatggttctagtcataaaccataaattatatatattttttatttgtgtatagaatataggatttttttgtctgatcatcatcttttttatttaaaattgatgattttattaaaagtaaccaattagtatcttatctaaatcataaataattggtcttaaaaaaatatcgtatttgtaatgatttaaatattatttgtaactttattttttatttaactaatcaaaatgtatatattaatttacatttaaaaatatgggtgactta

SEQ ID NO: 132259 - DNA, 871 bp, Cannabis sativa
tgcttctgcagaggcctatctacttagtattcacacaaaaccctatgaaaatggacaaataattggcaaagcaaaaattgctgcctaattaggatttttatctcctaaactttaacatgcaccaaatcatacttctgaacttttctggccgttaaaaattctcttaaaattgttgtcattcaattttactatttcagtacataaataaatcatgaaatagtaaaattgaatgaaattagacaaaaatcgttaaattcattaatctttatagttcaagagatatttttaaccactttaaaagttcaaagaacatgatttggtacatgtcaaagtttgaaggataaaaatcctaattacctaattaatgggcatcccaagtcactatataattaatcgagattattgctcagtagctttttgtaggcactatgccaacgacttacagttaattaatcgagattattattcagtagccttttttgcaggcaccatgccaacgacttaccagatgactcgtgtgaaattttatttgaaaaaattacatggctcttatccaaacccctagcctaactccaactaattatttccttctttaggataggattcatttcacccataaacattaaccttgaaaagcaaacttatttttcggcttggctttagagaaaagtatataaacaatatcaataagttcgttcttactatgaagttcaatacataacttggagaaatgtgaacaaaaaaacgaaaaaaatgaatacacaattttattgagattttttttaatagaacaatcctattattacacctcagtacccatccttatctaacatacgctttgccgcccacaattttttttctttcttttttt

SEQ ID NO: 132260 - DNA, 554 bp, Cannabis sativa
gagatatataatatatagcatgtatatatgtgagatatataatatatagcatgtatatatgagtaatatatattatatttatgtagagcttgtcatataatatatattagtgacattaaatatatatgtagaaatactattttttatgtatttatatgaagcatacatatataatatatattatgtgtatataatatatatcatgcatgaatatcaaagtttatatatatatgttatacatgtgtgagatatataacataatagttgtgtaataatttatattatgtgtatgttacacatgagatgttaatagtaacattcgtaatatattaattagtacaagattataatttcagagttataattttatgtattggagtcatatattaattttattttatattaatatatgagttacataacatgataataatgttaatagtaataaaatagtgtttataattattctgagaattattatcatttattttgtgaataaagaatattttgaattctttttcaatttagtggtgaacatctcactttatgagata

SEQ ID NO: 132261 - DNA, 560 bp, Cannabis sativa
tagattgaatcagttccaaggattctcttcaggaccacctctaggttttccttatccatcctttctaaattcgcaagctctttttacaggttttcacttgttcttttcaaagaaaaacgcttctttcccgtaacagcaatgtcaaaataatattgtttcaaaaacaacgaaaaaacaacactttgtattttgttaaaaaagctgtaaaaatataaaaacaaaacattatatctacattgttctaaaacaacactgttctgaaataacagaaaaacactccacatcaaggatagagttatgcatataccttatgggcgttctgcctccaatatattttttttttacagtttttgtagttataattttgtatttttctttattttttattaaaaatttattttttggcttcctcaaattaccttttttttgcactttacccacttcacaaacattttttttgcctccatttctgtttcctactattataaaaaaaattaaattactttctcgtataacaatatcaaaataacattatttaaaaaacaaaaaaaaaacaaaaa

SEQ ID NO: 132262 - DNA, 729 bp, Cannabis sativa
  modified_base (506)..(508): a, c, t, g, unknown or other
ggggagccattaccggcagctttttccgatgagtaaaagtgtcggtaaagctttgactgcgcgttactcttacttttgccggcgagtttgagcatcggcaaaaggagcttttcttgtagtgagcttcctaatctttaaaattcattgtccaaaatcatcacatatagcccttcttttcaccaccatcatcactagggtttattttctaggttcacgtggatcttcttgagtgagttgggatgacatatgagacaaagatggtttgtaagaatgatgcagctcgtatattatactattatcattgtctctaatattatttttcctttttttagtcaaaaattttgaaattgtgtgtatatatttaattattttcaatttcttataaaaattattttgtttagtttatttttgtgattatattgtcttctgcactacagaacctactacaaaactcaagaggtataacattgtttgttagaattttggaataagatgaatgaggttcnnnctcaaaactaattggcaatgggaaaagtagctcattcatcttatatatgacaatttatttctacacataaataatgtgggactaactctaatacaccttcctcacgtttgggcctggaaagtgtgggtataacgaatgatctttaagagactacaggaccgaatgtgacatttgaaagaatcccacaaggccaaatatcggaaaatttgtgggtgtacacg

SEQ ID NO: 132263 - DNA, 544 bp, Cannabis sativa
  modified_base (477)..(500): a, c, t, g, unknown or other
attggtaaaccagcagccaaaaggtgggaacttttggcgattcaattccacttttgtcgtcaaaactaagtgcaccggcaaaagtgaattaattattggaggtttaatttttctattgctggcaaataaatgcgccaaaaaaaatagtaaaaattttggcagttcatttcccgcacaataaaaacgtgcacgaaaaattaggtaaaaacttttttcggcgaatttaagtgcgccgacaaaagttgaagctgaataaaaggccaacttcaaaccccccctttctttctctttctttttctctttcttcttctctcttctctctacaaattcaccaccatccaccaccattttcaccaccccaccactatgcaccaccatcatctcccacactctctctcacccatttccccaatctctctatccccctctatttttttttgaaaaattaaaaaaaaattcgaaatttaattaaatatnnnnnnnnnnnnnnnnnnnnnnnnttttgaaaaattaggtttcaacaaccctaaatatcatttcaaaa

SEQ ID NO: 132264 - DNA, 880 bp, Cannabis sativa
ggtcagatttaatgcaataagactttttaaactacccacttctcttgggatagaaccgtttaggaaattgtaagaaacatccaacaccattaatcgggagaggttggcaattgaaagaggtaactgacctgttagtctattggaggaaaggtcaaggtgggtgagctttgaaagagtacctatctcagatggaataactccaacaagattgacagaggcaagattcagacggactaagtctggaaagcaagaccagtttgaatttctctaatgaccagattttgtaataatcataaaaagaaagagtaatttgagtaatgtgtccagcggggtcacaagtgataccgtaccatttgcaatattgggttgcattgtagacagtgtcttggtagctgcaccacccatttagcagcaaaggccgcacttcttctggattgtcagtccgtgaagcttgaactaggacgataaggtttccaacattgggtacggagttcaaaacaaagatacgccatagcaataattgtacgggtattgaattggagaatttcatggtttggtctagagagatgagtgacatgcaaaccgtgtctaaacaaaggtagccttatattcaatttcgtataagcctgaagccaatctttacatattcaaaagataactgccactgctactatacctcataaatgaaccaatattttcaaaaagtcatcattttaccattgactacttaaaagttaattacttataaattataatgaaagacctactatcgatccaattatattataccttgtcgatcaatgataagactctcttcaactccaccaacttgtttgaaacgttcatgcagcactatagtattttcagtatagttttgtgg

SEQ ID NO: 132265 - DNA, 1036 bp, Cannabis sativa
  modified_base (75)..(87): a, c, t, g, unknown or other
  modified_base (973)..(985): a, c, t, g, unknown or other
gtgcatgtggtaaaatagtaataagatataaaagatgagtaaaaaagttggtttagccgtgtataagtattaatnnnnnnnnnnnnncattttagatttttagtgtaaaaatttcttcaattaataggataaaatagttagacctcccagttattacaaaacaggttctttgaaaaataggagatcggaaaagattcatatctggtgggtaaacgtctaattagctacattatgagctacatagttacaagttctactaacattcataaaattacaacatataaaagaaggagaagacttaagacaaaaggagacatagttttcaataggccaataagaatccttcccaatgagatcattgatcacttgagactccttcccattgagagcattgatcacttgtctcgagtcactctctacaatgctaagggcacgttaagtggcatttattagaacaatttattattgattctctcgcataatttaatatgaaaaagttactaaacactagtaacagctatatcgatacggtgacaatatattctatggtttcctacaaactaaagtggcgttgaaagtaattgaaaatatagatatgtgaaagagaataaaaatagaaatggaatgaaacaaaatttaaaatgtataaaaaaaaaattgataaaagaattattaattttttttattatatattggaatggtctttcctttcattttaaaatggaataatcattctactaaacttgtgaaaagtctattccattagaatgacatttcaacactttaatatacatccaaataaatgaataaccaaacaaagaaatgaaacgaaaattgtttcatttcctttctattctatttcattacctccaaccaaacgccacttaataattcattttatattttagcacttctcttttagctctcgcggtagtgtagaagtagagatgcttaagttttttttttttttttnnnnnnnnnnnnncgtgcaatatattagcataaatcagttagacctgtcggtcattacagaaaa

SEQ ID NO: 132266 - DNA, 707 bp, Cannabis sativa
  modified_base (672)..(672): a, c, t, g, unknown or other
caaaggtattgtgtgaatcagatttttttcagtcaatctttgtgactatggtggattttgattctttgaataattttgtggattttatttgtgtatttatttattatttttttttctctaagcataggatttggatgttaaatattttttatgccgagattttgatagccacttctgcaattcatctgcatgcttatgttgcttattgtattcatgcattttccaaaagagtgaccaaaactgtttattaatagtcctcttcgagacaggacaaatctcttaaaatacactcttcgagtcagtgccaaactctatttgaaccaaagttctatatactcattccatatctcacaataactacacaattacatatttatactcattcacaaccttttcaaattactaataagcccctacactattttatagtgtaacactttcccacccttcaaaatcaccttgtcctcaaggtggtaaaaataaaaagagactaaaaaacaaacacagcaaaaaaatacaaaatataaaacatctcaagcccacatttatttatttttaaagattagcttcaagcctaggcctaaaattcttagggcagcagcatcttcttctcccgctacaagttacgtccctctttcatcatcttcttctcttctatatatatatatatanatatatatttttttttttttgaatgcttggaagca

SEQ ID NO: 132267 - DNA, 640 bp, Cannabis sativa
  modified_base (57)..(60): a, c, t, g, unknown or other
aacaaaattttaaaaacaaaaaatctacttttatttttctgtttttaaaattaaaannnnaaagtgttaccaaacgccaccatacaaaacgagtaatcaatcaatttaaaactaataggattgtcaccatataacctggaaacaacgattgctttatacagttttatatgagagatttgcctttaaatacaaattaaccaacaactacaataaaatttaactaaaagtctttcaaatgtgaagtttgtctaccatgtgcgtggagttaagtgttggattttaagtagaaaaggaggcgcggtcttgatttagcaagtatgcctttgagatgttggagtatgctttaggtattgacaaaggcggtctacaacaaattaaatttctggtccgaaattagtgtaagtctatgtttgtttagcataaagtgctaaatcaatacaatttgaatatattatcttcacaaaattttattgtactgaacaaacattgcaacaattagagggtgataataatttatttgtgactaatcatactttcttttctaattaacggcattctgtgtcgatcaccaagaaaagtgaattttcaagtattattgacttctaatgcagctagttcaaagtgcatgacttgacttgat

SEQ ID NO: 132268 - DNA, 690 bp, Cannabis sativa
gggctgaggctttgtcatatgcaacccatatcgtcaatagacttcctacgactgcaatagataggaaaacacctaaagaggtatggtctggaaaacgtgtttgttattatgattccttacgaatatttaaatgtcctgcatatttccatgtcaaagaatccaaattgaatcctaaagcaaagaaagttattttcttgggctttaatgaaggagtcaaaggtttttgacattggtgtggtgatcaaagaagatctttttgagcagagatgtcacatttgggcgaatctatcatggtaagacagattactttggagaaagagaatgaaggcccagatactctttctaaggtggagcttgagataaaggaagatcctaaaaaagactacgccatttgacgatcatggttaagatgaaatttataatcaaaaagagatctcagttgaggtggaggttcccttagcatcaccaccagtcaatcaacaatcaaaatctatagccagtattcgaccaagaagggagattaattagcctactacatacacagatatggtacatttgcattcccaataattgatgatgatgtcccatgcacttacagagaagctgtgtagagagttgatggcaagaaattgaagatggcgatggatgaagaaatgaagtctctacaccaaaatcaacacatgggtgttg

SEQ ID NO: 132269 - DNA, 1085 bp, Cannabis sativa
tcaaccactctttctacttcaaagataagcaaaggcaagtcccttctgttcaaagggttatcagactccagctgggaggtgcaaatgttttctgagtttaaatcttttgtcaaaaaatataaaaaggatcaaaagcgccagcttgcctttgaggcctctatgtacaaaatggttcgcataatcaagactactgtgctgcaaaatcattatggggatcctttaactccatcaattgatatctctcttccttagtttcatagagattcatttggcgcatcctcagatgggtctggtagtacctcacatgtgcagggggagtcatctgtttctgcccccaatttcaagtttagtgccacagaatcttcctcctacagtaaccactgcacctaacttggtgtcttctgtgccactttcccatggggagtctgacaaagatgtggagcaatcagctcatgttcaatgaagggggagatgtctacagtctcaagtctttcttttgatgtttttatggtttgttatatttatggttccaaagacattttatagttctatagttttgtgctattggatatcttttgaagtcattgtctttatgttgtttagtaattttttattgaacataatctgtcaaggggaagattgtaaggttcatagttttgacagattatattaatagtaattccagtcttatctgtggattaatctgttataactagatatcagtattctgttaaagtccacgtgagtctgttatgttttaatagttggcttaaattgttcttaggtcggttgaactattgtctataaagagttagtttcattctgtagcctggttagttagctaattcatatttttggttagttcagatttatcgtgttgtattctgtgttgtatcttgtattgtttgttcgtgtttttcagctctgattgtataacttggtgatggatatccatagcaaaaagatcagagcctggatgtgctgagttcagactgaagggagtacgaatcttttggatttagtggatgttattgttgggttttatgccctaaataaaaatctatttcaatgtaatccagattatt

SEQ ID NO: 132270 - DNA, 572 bp, Cannabis sativa
tagtatatcagtgtattagcctcattgtcgttggttcgtccttatcaggaataatttatatttgcttatccataaacgttgtaatggagttttgtctttggttttaactattgaatgaagttttgaactttctttcaaaaaataaataaatagatccacatctctggactcaaatgatagtaaatatttaaattttaataattataattactttttatataattgttgatgaaaaattaacaattcatttttgaccaaattataattaaaaagatatttcttttggccaaatttgttaagtttatatgatacatgtctatttctacatgtcctaaaagatagacaatgaacatttgttattttaacacttttcagttgacccaaacaaagatttaaaaagatatttataaggtgtagaggtagggctccaatctaataccgaataaatatttgtactaataggttaagttgaaaaatgtctcttttattaattaattaatcaaatttatttttaatttttatttaattgagacatatctctttttatatattgtatccaaactacactgaca

SEQ ID NO: 132271 - DNA, 789 bp, Cannabis sativa
aaagtcacacttagtctaacaaataatcctttagacgctgctcattcactttaaattctcttccagattgctcattacaaatatctacaactccatgaggataaactttagttttctcatgagaattatgatttgtcacaatataattatcagaatatagcttataaactaattttaaatgataaatataatgatttgctaagtaatttcacatttggtatttgcttagatttatatttagtaaacaaagacaacaaatttttgctaccaatatttgaggttaaaattaacaactacaatacgaaatcgcagacatacgaagaagacgagagaaaaatatgggagagaaaaaaaaagcttataaaaattttaaaaacatcaaaattttgattttaaattataaaaaaaatagaaaataaaattcagttacctaacatacttttttatataaaaaaaattcaccaaacacactttcaaaagtcattttcataatttgattaaaaaacaaaaattcaattttaaaaatgctaatataactaacagtatatatatttgtatgtacaataatctattttaattatatgcacttccattatttaaccaattaaaatactaaaaaaaatacttttataagtgagagctaaagtaatactctcacctaaggagttccttatatatatatatatatatatatatatttttgacaaagtgattagaatcactcgtgaatttacgacgcccacgtccgccaccggcgctggaacctcctcgaaccgggatagctcatcg

SEQ ID NO: 132272 - DNA, 667 bp, Cannabis sativa
aatctttatttagtctataaaaagtgaaactcaatagttagtgatcaaatcattaatgataaatgcctcaaaaaatcattaatggtaaacttttcattttctatttttttcgtctctcaatcttcggcttttctttgatcttttcttattttggtctattgatctcccctatacatatgaattctataaatagttttgaaagttgaaattatgtaagagattctcattgttctctcctttatggtctcttcaaaattgagcctttgagataaatatgtgtcgtttattttttgactggtaattttttttatttcatctatgtaaagctcatttgtctactgtgtttttttctaaatatatatggactgtgttcacctcatttagtataatacctttttgaaaacttaattttatttagtgaatgattttgtggcaatatatctttattaaaaatttaattttatttagtggatgatttacatgcatgatctactacaaaaaataaggtctataacgaggacaaatgtcctcgttagaagtttagatgtcgtcggcaaaagattatagcgaggacaagtcctcgttagagcatcgtcgtcagaaattggtttctaccgaggacaatagtggtgttctccttaaagggtctaccgaggacattgttgtc

SEQ ID NO: 132273 - DNA, 574 bp, Cannabis sativa
aatcagattgtaaagggttttatttagggcacaaaacccaacagttccttctcgtaatactatacatccttatagcttctgtctttgatttaaacctaataagtttcttcatcatcgtcttctccatcttcctcttcttcaaggatttttctcaacaaactgctcttgttgtgtgttcattttaggcgtccgaccgttagtttcagacacttctccatcactctcaaggcttggctaatcatgttttggaggtggtggattaatgtcatccatggcaaagtcctagccagtagggggaggtttttcgaaaatggttttccttgtagccaccatagttaaagatgataggcagcttagattctttctacaactctcaatgaaagcacaaaaatatttatcgagatttttcagaaataaaattaagtgagagcttaaaaatttaaacaagaaattaaattaatgagatggagatttttatgttgtttgggtattaaaaatccctagtcaacgagtctgtattctaacaccctaactaccttaggcgtattacgtgaatttttaaacgtactgtgca

SEQ ID NO: 132274 - DNA, 536 bp, Cannabis sativa
tgtcttaacaaattttgtttttttcctatttaattaatgtgaaaaatatttatttattacaaaaataaataattattatttttttcaattaaaaattctatttaaataaatcatataaaaaatttatatttaaaatcagattttataaattatatagatatttttaattatagatttattaaaataatttttaaaattatctcttaactagactaatcatggagtggattcctgctaaattattgtgtctaactaattatatttagccaagtcaattaaagacataacagtatcttaactctccgttaaagcatttccagtgagaaacaacatttagaaaattgtacatttatatatctaattattgaattatttacaataaaaacaaaagtaatttgattattcaaaataccgtggaagaataccaagatacaaaattagtacatgtttgacatcataactaaaaaattgctttttgtttttaaaaacagaaaattgttttttgaaaacattttggcttgttaggccttgttttt

SEQ ID NO: 132275 - DNA, 581 bp, Cannabis sativa
tggaatttgggtctctactgggtataagcattgcagcacgtgtttcttattggtcattatgtaggagattcgtatgaccctaaacttatcctacaacctctctcagcctgacaagttcaatatcatcccctaggtccatgtggggttcatcaatgctagggtttccaaccctaggtccagtctctgcagcataaacacaaggtccaacccctatgctaggagcttcagtagttggctagacagtgggtccaacatgaattttttcacctggttggaccttcgtggtagaggttctggtcagttggctgaaatgtgttagccgaccagccatgttcaggttagccacagttggtgacacttgatattaagattcgtggtcatagggtctcgtggtttagttgaatttccacatcttatcacagccatgcagaatggagatcaagaagatgagacctttctaaactagcattctaggctctcaatgaaagcacttaaatgttgaatatggatttagccaatcgacatggagtctgactaggatcgaattttgcttatgactgtcacgtgtggaatgataataa

SEQ ID NO: 132276 - DNA, 1143 bp, Cannabis sativa
aactaataacatgaacaggagttcatgatatatcaagatttaggtcaatctactattgatcattgttatggtatgaattaagtctttatgataaccgacatgttaacaaagataacttcattcatataagtgattgtcatatataatctctattataatcactacatcagtaatccaaacaaagaatacttgcaccgtagaacgaacatcaatgaaccgtgctatcaaccattgattaaagattccgtaactttaatatgttgctgactattttattcatagataagtagtcttagttctctgtatagctacaaaccaccatctcatatatgaatagggaattttctgatatttaatataaatttttcaataataaataaacaatttaacattcatacatatatcaaatgtttgactctttatttaattattagaaaatgtctttacatgctttttaaggcataatccctaacaatttataccctaaaagcaagtaattaatacgattataagataaataatacattaattataatagtataattattaaatatgttaaaattccttattcacatggagaactgataatcttgtaagaacgtacaagagaattaagatttacaagattatatgatacgaataaaataagtcgatagtgtattaaattaatgggaatctttaatatagaactactaagtaccgtttactatacactatacttctagtgtgtgtgattttgattcggataacatatgtggatgacatatagtaaatgtgttgtgtataatttgattatgcatgactaagttgatatgtaataaacatcttttattaacgtattgtttatcatgaatgtaacaaccaatcaatcagggacgccacgtgtgtgtgtgttaggctatttttagcctatattttggatcaactttatgtccgctttttactgttttaggacgaaattacgcttgttttctatattttcaagttcttcggaataatagaggtctccagaattaaaagagcaataaaagatgtccgctttttattgttattttcatgttatttaattaaagttgaaaattatcctaagtttggaaccttatttcagaataacttaagtctgaataattttcaaaatatatt

SEQ ID NO: 132277 - DNA, 588 bp, Cannabis sativa
ttacaccttttgcaaatcattaattttcgtatgttttttttttttgtatttcttcctcttatattttttttcgattgttgaagaaaaaaaggatggaaatgtattgataggaattattaagagaaaataataaattcatgatatttttctaatttaaaaaatattattaaactaaaaacaaggaaaatgagttagttttcagaatgatctattaaatgtataggtgtaattttttttagagagttgatgtggcaaaatattaatatctaggacatggaatgggataggaacttgggattagggctgtacataaatttttgtaaatcactcaaattgaataacttgcgcaaactaaatcaaaataactcaatgaaaaatacaaacaaagaaacctgacaaacatataacccgtccaatatttatattaggctggtttaaaataataccaaccctcccaatcaactcgaactaacccgaccaacttaattaagaaggttatttttatatatatttatatgtttttattatatatatttatatatcatataatttatatgactattcaaaaatataaaattaaaattaata

SEQ ID NO: 132278 - DNA, 580 bp, Cannabis sativa
aaaaaaaaaaaaaaactacaaacacaatacctaaacagtctaaatattaatatttgtcacccatccgactgcaataaatttatcacagaacccacttcactatagatgaatatataagatattcaaactctagtaataggcattttgaggtaaatttatagcttggtatacttgcaaataaagtgtagaacaactttgttctatagtgtatgtgcaagtatactataactttgaatttgttaataatagtattaaaactattttttattaacatattataaaagcataagaaattttttccaggcaacaagtaaagtgacaccgaaaacctgtttaccaaaaaaaaaattaaaatagaaaaataataactacaattctacactaatatacgcatatatacatttacatatacatacacatatatatatttaagtatactaggtgaatgtacgtgccgagccacgtattgctagtttcatttaagattacaaattttaaaaaattaaatatttatatttgaaatattatttaataatgtattaaaaataatattagtgtaattataaaattgtaaataaat

SEQ ID NO: 132279 - DNA, 988 bp, Cannabis sativa
ctaagcggtctttacatattttgtcatttaacaaaatacagggtctagaataatatttacccaaaatacaattgtcatttatagtgatagggatcaattgcatattcacgcgaaatacgggccaaataactatttttccaaaagatatatagttttgttgtataatagttattagggtaaatattaatttggattctatattttgtaaaaattattgattggactctctattttattaaataacaaattagactcaatattttttaaaatagtactaaataatactctgaactaattttttttatcaaaataaaacttaaaaataactcgatctaatggtgttatgacaaaactagttacatcttctacatcttttcatgttagaaattatcttcaagttgtttgattaaaaaaattatcaaaaattaagctcgggatcttatttttacttttatagtaaatatagattttattttgttatttaacaaaacaaagggtccaatcagtaattcttcaaaatatagagtctaaaatagtaaaccctattttcgaatggattcggaatggagatcgcaactctgctatcttccatgcaagcatcaggtagagactaaggcagaattagattctttcaattgtaaaggaagatggaataagagttactgaacctgaacaggtaactgaagcttttattacttattgtaagtctttgcttggatccaaaatgactaacaggaaaagggtgtcaaacaaggtgatattgaggggtcatgttcttaattcttcacaagttgctcttctagtgaaggaatttactaaagaagatgtgaagaaggcactgtttgagattcattgaaataaagcccttgggcctgatgggtattccagtttcttttttcaagataactgggatcttgtgggggaatgatgagtgcacatttgtacactcattctttgtcaattattagatggattagtatttattttt

SEQ ID NO: 132280 - DNA, 968 bp, Cannabis sativa
  modified_base (348)..(351): a, c, t, g, unknown or other
aacaagttaaccataacaatttagatcaaacaataataggttttataaaacaagttttaatgataaacaatatatataaaacacacacatgcaacaaactgaataaatggatatatgatttatttaatttaaattaattaaataattaaattattttcaaaaataaataaataaatatttttgaaaaataaaataataaaattaaattaaataattaattttaaaattaaacctataaattagaaaaattaagtttttaacaaacctaaatatctattcaaaattggcaactaactttttaaaatttatgctatttctaaaagtaaataaaattaaatatctaataannnnaaatgataaataaatatcatttatctcattttataatttaatttaaataaaataacaaaaatttgaaagttaacaaaatatctggttagattttttaaattttctagattattttaaaaatatatcttattttaaatttcaaaaaaagtcattttataaaattaattaaataatgcaaaatataaattatctgaccttatatttaaaaataagataaaataattaaattttaaaaaataagataaccaattaagcaaaaaaattagattttatctatttttcatgttgaaaatatactaatatctaaaattaattaattttattctgataattagatttgagaattgaaaaataaaaatctaaatacaaaattacacaaaaaattcgaaattaattccatgaaaaaatgaaaaaaaaaatggtaaaatttgcatttggtgctcagagatgcatagtcgagaaaactcggctcaagaggctgcttgcagccattccgcgcgcggacacaagttcaaacaaaaaccctattcgagaaatctcggacatccttgtcctaatgtgcgtgacaccccgtgaatcaagggtgttccgcgcgcgtatggggtgtcaccacccct

SEQ ID NO: 132281 - DNA, 520 bp, Cannabis sativa
tataaagtgacgttagtatattttttaccattaaaaggtggaatttggaaaatcatttggaatatttatattcatgcgagattaaaatttctgtggtggcaaatcattatcaacgctcttcctacacgggaaagaattgcaatggccctgaatcttcaatcaaccctctgcccaatttgtaacaaggagagggaatcatccttccatttattttggaactgcgagtatgcttcagctgcttggtttggtaacaattggggcattagaacaaatttatgtccgtctcagaattgggaggaatggatagactggtttggatgcatgaggaatagaccccccaatctcagtttcattgagttcatgacaggggccctatgcatttttgaggtgatttggaagatgcggaacgaagttattcataatggacagctgggaccgattacggtggtaattcgagaggcttgtaggcgactcaatgatcatttggtttgcaaattagatcgccccctaaagcaagcta

SEQ ID NO: 132282 - DNA, 739 bp, Cannabis sativa
tctgtttctttattgatgttgaataaaatagattacattgaaatgaagttttatttagggcataaaacccaacagtcttcatcatctcattagctttagagcagaggaggtcttcgtgatgagtgctaatgatgtgctgtaacagtgagtggttgttcttatgtcaagtgaggattcgaccaactcctaaagtaatatgcccaagatgggggtgatgtcttccccatctcaggtgcacttttgagtgattgtaggtgcggtctccatttcatccctagtcttaaccttagcggtcttaattgtcccttctattgtattcacaatggaataggccttcttcgtctccttagttgtcttgatagcgaaggaggcctcaaggaggtttctcaggcaaatgtcagcgatgtattgtaactttcaaattctactctttggttgccaaagagatgctcgataccagctgctgtccagaactttacaaacatgtggtagataagtgaggtggcaaggaggtcgttgggttttaccttcaaaggagacttggtgtcgatcactatgaagatagtcatagtgatgtttgccatgggacaatttcaactatgagtggtgatatgagtctaccacagggagcaatgtcggctcacccgtaaccatacatgagctacttgcatggctttagatctcttagggagtgacccactctttataggctcttttttgattagaatatttaataatg

SEQ ID NO: 132283 - DNA, 894 bp, Cannabis sativa
tctacaaaaccgacgtataagccgtagacgcaaatagttttttatttgcgtcgtttcaaaagagacgcaaaaaacaattttcgtcatttagaaactgacgcgaaatataaaatgctctttataacattatgcgtcggtttgaaagtgacataaaaagggttgtgccatttcaaaactgacacaaaaaacttatactgtcagttcttaaatgatgcataacatgctgcaaatatttttttttcacctattgtgtcggttataaaatgaagcataagtgcaagtaagggaaaaatgcagatttccatccaatttaccctacctccatttttagattttagaatcattttatataatagtaaatacataatactaaaaaaaagttaaaataacgattataaaacttatataaaatttttataagtagtaatcaattctatgatcaataacgataaaactaactataactaattacataataccaaaattgttaatagaaactaaaatataaataatattactaatgtttttgttgtcctattgaaactaagcacataaatcttgaaatggaataatttgtttgttctcaaggcaagggatgattaaagtttcctagcaactgatcaagccaaaaaaaaaaggttgtagagaacactaaaaagacaaaattatgtgagacactttagattgaataagatgagaatgcttgactagtattgtgttaattatggtagtggatgatgatatatactttcaaagtagcatatcatgaatatgatatatactttcaaagtagcatatcatgaatctattaaaatttttatcaattttccatttttattgttaaaatttttgaatagcagtgagacataccaaatgtaacaccctaactagcat

SEQ ID NO: 132284 - DNA, 539 bp, Cannabis sativa
gtatgctaagccaaattttatttttcaaattaggttagcattcgtttcttttcatcttagagctcctctgttctattcgttcttgtcaattttaataattaattcagccaaactatctaacaaattaaaaaaaataaaaattacccaaaaaatttataaaagcaccctatttaataatttttattatataaaaaagaataattaatacttttttccctctgaattttcggctttacctgattttaccctctaaaatatatgacttgttaaaaatttatcctaaaatataacagttacataattcaaatggatttgtcattctctaaaacacatgattaaaaaactaaagaattattattattcttagtgttgagaaatctggaataatttgatttaaaatgtcccttctattcacaatgagagcatagaataatatgtctgcttaattgttcttgtattgttcttattgctggttcaatctgttgtgaaagataatctcaggaagtggaatcactttctctatccttttcaactgagcc

SEQ ID NO: 132285 - DNA, 521 bp, Cannabis sativa
ctcaatgtcctccccgagattacgctgggtgctggcgaagccgagggaacttctaggggcttggtcccgactgaacttcccaacaccggggggacttctcagtccgagaatctttcaacagctactttgggccagaacctgggcccttcgcctacttctattgctcggacttctctctctcttctaagggctccgtcgtcttctcaacttgcaatttctcctcttttagtgcatccctcaacttttccctctagtcgaggttccccacctttagctacccatcccccacgtgcccagactgagtgggacaaaattcttgcttttagaattcaaaaagatgtcccgtttatggagttggccgaaaactacttcaaatctcttttggatgccatcagaaaacctgatgatgatttctatatttcccaaggacgagattcaattttgaaggacaatgctatctcgggaattaaggtagtttctcaagtgtacattctcctcctcccttttattttttgtccttt

SEQ ID NO: 132286 - DNA, 781 bp, Cannabis sativa
ttttataaggatctcgtctgtcaccgtcttctatggccccaggatccaccgttatcgccgctttgccctcaaccattcctctttcagccatcacacacatattatatcctaagaaataactccatgtcatgtggtcctcactgagaatttgcttctagctctcggtctcatccagttgtgaaaattgagttttgtcaacggaattttgtgccaacaaaagctaactagagtcgccaataaacttttgctggtgaggtaccccatcgaaaaatattgacgacaataaacgatcgagaaaggggtttatgccgacgaatataaatatattttgcctcataaaagcctcaaatacttttttactccgaaggacttaaatatcaggcactgatgatgggtggaattggttaaggaatatgactgggagattaccatcttgggaaatcaaatttggtagcaaatgctctaagtcgaaaaggtctggggcaagtttatgaactgaagaagatctcactagaatttatgactaaagcaagaatcgagtttgtaattgggaaattagccaacattaagttacagtttgatttgctagctagagagaatcaagacgacccaacaaactgatccagtgttacaagagtacaaacagaagtttgaggctggatcagcaaacgatttttcaatctcatcagatgggttattgtggcataaaaataggatttgtgttccaatcaacaatggtatcaaaaaagagattctagatgagtctcatactacaccgtac

SEQ ID NO: 132287 - DNA, 699 bp, Cannabis sativa
tgagttttgagcacattttttatatggtcgcgtacgttgcagctatataggattacctgtgaattttcaaaaaatttaaaataatttacaatatcgaaaataaggttctcttattttgttgcatacatgactgtttttctttatacacctggtaagcaactgttcaaactttattttttgacactgtaagctattcaaatttctttaaaaagttatagatgattctatagataatttctaaaacaaataggagatttatcgaaacaaccttttaaggtggtgtactatagatatttccaataataaatatttaatatcaagatttttgatatttattcactattctttgttttgttatagattgctcttcaatttattacggaaaactatcattaattaattatatatactattactatcttaatattaattcaaatgtatctattattaaaatagagttcaatctaattactttatttgcttaggtagtgtactgtcaggggtagcttggtttaaaatgagagaaaacaatttatttgtgttatgctttgcattgcttatgtaagtgtgatttgtgggtttaattaaattgctaaattttaatgctagctatgataagaattttagcgatttaataaatgttatcttttttttaaaaaaaaaaaaatagggaaaaaaacaaaaaaatacaaaaaagga

SEQ ID NO: 132288 - DNA, 1575 bp, Cannabis sativa
  modified_base (1521)..(1536): a, c, t, g, unknown or other
aataacaaagatacaagtgatctcggggagcaaatgagatcattcaagggctaaaatagggcctcagtgcccaagttgacatgggtgctaggccctgtgcccaagttgacaaaaacctggttcgcattatctactcttcaaacacaaattttgttccgagcattcttcttatgtttgtcaaaaacgaggtaagagacctcgtttgcaatctcaaatgccatagaagaatcaaaacgagccctaaaaagcccctctaggagcacccaacgcccaagttgacatataggctggtgcgttgggttctgcttatccaattctagttctatctcgagtatatgaatatttttttattgtaaatgagatatacaacttgtaacaagtcaaattcacactttgatattttttgagtctacctaattttgcaaaaagcgacatctctgagaactagtgaacgacttcaccagcactaagaaattgactaagtgatgtaaaaatatcacttaggaatcaaaaattacaagtttgatacatttttcaaatcatatagcgtccaggtttacatgaaaatatcaacctaggcgctggatgtcaacctaggcactggttgttgaagctcatttcatcatcatggacggagtaatgtacaaaagaagcttttcaatgctactattgatgtgtgtcacgaaagaagaagccaaactcctcatggtcgaggtacatgagggtttttgtggcaaccatgctgggggcaaagcctctcaaagaagatcttaagacaagggtacttttggccaacaataatagaaaacttgatggactacgtcaaaaggtgtgaaaagtgccaaagattctccaaaatacccaaagctgccccgaacgaattcaagattatgcaaaaacccttgccatttgctgtctggggaatcgacctcataggctcactacctaaggggaaaggcagagttcaatatgcagtagtagcagtagattaattcaccaaatgggccgaggcagagcccttagccactatcacacagtttgacagtgatctctttactaatttttgcatcagacatggaatcattaagagtttttttagtggttgcctatccacaagaaaatggacaagtggaagcagtcaactaaactcttaagaatacgttaaagaaatgcctagagcaagcaaaagggaattggccttaagaactgcctgaagtactatggacctatcacacaatagaaaaaacagcaacaggtcacactttctttgctctaacctacgggtatgaagctatgatatctgtagagcttacacctccatcacatcgaagactaacatacgacttgcaaaccaatcattagctgttggctgattctttagatggaattgaagagatcagagaaaggtttgagcttagaaaggcggcatatcagcaaagggttgcaaaacactacaactccaaggttaaagataggaaattgaagcctacagatatggtgttactgttgggttttgtgccnnnnnnnnnnnnnnnntcaatataatcagattaacttattaataaagatcagaaa

SEQ ID NO: 132289 - DNA, 748 bp, Cannabis sativa
  modified_base (626)..(663): a, c, t, g, unknown or other
gatgcttgtgctgaaaaaatttagcttggggtctgacgggtccgatgggaggattcgatgcatatgcgtgttgggaaaaaaaagttttgtgggtccgacgggtccgatggggaccctgattagggtccgatgcatgtgctgattttttttttttttgggtccgatggatatcttattttagccctggaaagcttgacagtaaagacaagaagagaaagaggagagataatataaataggggtattttaaggatattttaaaaatatcatatcccacaattgagaaaaaaaatgcaccctccacttttatcattgaaaaatatgatttttttttttttgtttattaacattagttgtttatatatgttttctagaatttgaaccgagtaagcaaaaaatcaaaagcataatataatcaaaatacccaattttatactcactattatgaaactcaatgcaagttcatgtacagaaattgagcttacatcgatctgaatggcactccagcgtggcgttgattatgaatacgttgctcatctatgtttactattactttgagaattagagggagaattgagaggcggaggaagaagagggcaacccacattcatatatatatatatatannnnnnnnnnnnnnnnnnnnnnnnnnnnnnnnnnnnnnacgtatactaaattttatgttagtctttttctacgttattaaaaagtgatacaattaaaaattaaaaaaaaatattattagttat

SEQ ID NO: 132290 - DNA, 1395 bp, Cannabis sativa
ccaagcaggcttggagaatttggattgatcttggctctctcctccattctattcttaaagctcgttactttaaaaactctgattttttgcaggcccctaatgggtataattcttctttcacctggaaaagtcttctttgggggcgccaactgctcaaaaaaggtcttgtgtggaagagaggcgctgggattaatattcctttgtctgccccaaactggatccctggtatctctcaccccaccattatgcaacccattgatccctttcatgcttttgtttctttctttatcaaccctgatattacttggaatgtccctaaactcaaacattattttccttcatatcagattgatcttattcttcagatccctctggatcctactatggttgactctctaatatggggctctcatccttctggccttattactgtcaaatctgcttaccatctagcctcttcttctgcctccattgcctcaccttcctcctctaatccgaaccctttttagcagtggtggaaaactctctggacacttcctgttccccctaaaattaaacatttcacttgaaaagctttcaacaatattttaccttgtgccttaaatttgtttcataagaagattctcccacggccatcttgttcaatttgtggcaatattatggaatctgtcacacatgttcttgtggatttccccagagcaaggaaaatttggaagctttcaagattcaaaaatttttattgtgctcaccgcagaacagacatccaggaattttatctccaagcaatgcaactcatctcaaaacgggatttccctctttttgttgctctcatttggcatatttggaatacaagaaactcaatattatttaataactctggtgttcctaacaatgtggaagagtttgtttataattatttacaggattacaatgaagcccaacaaaacaaccttgatgatcattgggtttcagtctctaatcagcgcactcatcattcccaattgtttccaatagacgactttcaagaggactccccgactctttatgttgatgcagctttagaccataatcatgtcttaacggggattggtttcactttcaagattggtcatcatcagattgttgcttcgaaaaatcgtcgcttgcttggtgcttccactcctatttttgccgaaggtcaggctttgttgcagggtttatcttggtgtattgactctcagttgcagccagaattcatcttctccgactatctaaacttagtttcaaatgttaaaggcaattggcaggaccactccgtcctttctggtcttgtttctcagatcaagttgttcttctccaacttccctgaagcctccttgaagtacttacctcgccagttcaacacagccgcccatt

SEQ ID NO: 132291 - DNA, 592 bp, Cannabis sativa
tatttaaaactcatattttaaaaataaaaaaatattaaaaattaataaaaatataaaattattttaaaaaattaaaaaattaaactaaaaaaatttatgtttacgtaagaaaatctagttttctagagtaaaaaatttcaaacttgggcccatgaaattaaacttttacacatgcaagtcatgaatttttactataactttttcatatctaaatgattttaaataaaaaataattattttttttttaaattgcttaagtgattttaaaattttggttttctttcttattttttttttaaatcatttaaaatgatgttttttaagatttgaattaatttttttaaaagaaatatatattgaattttttttttcatttttttttaaaagggagtacgatttgatagtattcaaagtttggagaacaaaaatattaattaacaatgatactttagcatttaaattttaaatgacaaaatgggacaggacttaataaattgactaagtttttgtaaatttaaaagtttgtgggaaaatattaacaagtcatatattttaagaagggaaatttgattttctatacttagaaaatcaa

SEQ ID NO: 132292 - DNA, 699 bp, Cannabis sativa
aaatcgggtgaagatggaaatgttcaagatattcattttgaaaaggggtctggatcgtttcctggaataggaatgcctagtactgaagctataaatgaccgttcattgatgtgtgtgcctattttgaattcatgtggaaaagaagatgtggtctctttagtggaccgggcccaggtggagcccatttctacttgtgggccgaatgtcaatactgaaacaattaatgtgaatctcctaagccaagaacctttgaatgttactaatattggaaatggaaaaagggatgttgggccttttgctattgggccgtgtgtgattaacaatgggttggctgcccataatgtggacaagaatactagcccaattttccttgattctaatttgagtaatattgttagtgggcctcctcccattaacaataatactctctcatgtgggcttactttgatgcaagccaagaagttgtctactccaagccgtgagttaatggggccggctgtcttgggcacttttaataataatagttttgggccaaatactttacctcaagctaatgttgggcacatggaaacttcatccattttgcctaatgcttctcttggtactatggagcaagaaaatgaagaaaaagctttgactcaattttttaatgctcaagaaagtttattgcatgatctcaagcactttgggaacctcgac

SEQ ID NO: 132293 - DNA, 1197 bp, Cannabis sativa
aacaatggtgtatatatatatatatatataaaaagatgatagtggtggctggttgattcggccgaacaaatagaaggagagagagatcaagtagtgtatggtgtaggtgtaattattaataataacttaatacatatgatttcatatatattaactctaagtgagtcacgcgtggaggtgtcaagtggagaaaaatacaactaagccctataattattccattaatattaacccttagcctaactttagaatctcacatagaacaaagccaacttagttaggtgaaagaccattttaccctttgcttagctcttaagtaacttctaaagctatgggtaatttggtcaactctgagtactctaaaatatcccggtaattccaaaatcaacttatcataatattcccattaattttatcaattaagcctattatgacatttctggcccctgatcaagtctccaaggtcgccaaacctgaaaatatttttattccacatatagttcatattacattcacacatgttatataaatctccataatttaaaaattatgctcatttatccacttatataaaatttaaaattttatgttgaactagattagtaggatcataatcgcacttattacctggttcactcataatataaatataaaccctaattattaactattaagcttattgggatattacactccaactcagagttttttcagttagatccggctaaacattgtcgaagttgtctattttcaaactccaccaatggtacatatctagttgggtcataagcatcttcactcctaggcacgaatctggaaaaattattggcatcttcattcattctttcaggaatttgatcaccaccaccatcgttcctcctcgaacgtgatgttttagtggtatggggtctttgagacccatgggttctttccagggcaacgagttgtttcttcagggcgatttccatcattttgattgtcattctccattgaatgtgattagatcaagtttataaggagggatttttttaagttttatcaccaatgctctcaatgaatgcaccaaactattaacgcaaattttagttaactaaaataaaatagccttttcataataaattctctacataaatatatataagtaataaataatcagataacactagatatttttacgtagttttgtagttaaaatct

SEQ ID NO: 132294 - DNA, 1852 bp, Cannabis sativa
  modified_base (52)..(53): a, c, t, g, unknown or other
gatagaaaaattaagtataaaacttaaaattttttaattttacccattcatnngtaatacccattaaaagtgcaccctatatatataaaatacaaataaataattaagtaaccattcaaacaaacaatcctttttctttttggcttcctttgtcttataatatatacatatatttatatagagctcgtttggtacgcgaaattagatgaattgaattagattaggttaagtcatgttttttttgtcaaaatattatttaatttaatttgcatatttaagaaaattaaatattatgtttattgtgtcaatttataatatgtctaatttgtatttatttaatatgttttgcataattgattgatatcttcagctttattatgtacatatcaaattttgtggtatttttatggcatgtattggagctaaaattatagctgtggttatatgtggagagtttgttaattttgttggagcggtcattgcagattacgattttgtcactgcaaattaagatttattttaggaacgtatcttacagttgtaaaaacatattgtgactgtctctaggatttctatattttataaataggacctagagagcagccaaatatttgtagctctttaattcttattattttatattttcatatttatgtgaagagtgtttcttgccagaaaacgtagagtattctactaggttttagcctctgtatttttgttctttcattattcttagaatagggtgaatagtcttcgttgaataagagaagaagtcttcaggagaagacttgtcaaagacttacttagagaagaagtaagcacactcacaacgaagttcactatttgatgtgttcagcagtcagattaataaaaaaaaattacaaaggattgcatcaaagctttagagggagtctaaacttgtcaattgtatttgtaattttttgtgactttactaattgatttcattctctgagcgtggtcctgtggacttgtagtgtttgaaagaatatttataccacatataatctctattgtcaagttttaaattctgcttaatttatttctatttttgttctattacaacaagtctgtgatctacagtaataagttttcaatctgttactgcaagttgttactatatttgtgttttcggaaggaggacatgtgtaattccaagattgtttagttcaaccactacagacccaaacataggcctaaccaagataatggatcagatccattagtgaagtcaagtcatccagatgacggaaagatgactcatctaggcgagataaacatccagcacaccaggccttaggataacatcaggcagtgctttcgaaaaaataattaacgagtcttcggatgttgagcatagcatctcactcatttattattatcttgcacaatatcaggattttatttccaagatcatgtctgagaatcagatattataaataagaaaatgaagtaattatcaatcaagtatttatgtgtctttattgtccataaaagtaggacatgtcttgacaactatcaacatgacgtgacatccacgtcagcagaagatcaatgcctcatgggccgggcttcaccaaatggacatgaattcaataagttatttatatttactattagtgagcaaggtttacaaataagaattctaggtctataaatataagaaaacacattcatgcaaagggttagaatggtgatacttgagagctaaggcaaattctagggttcataaacttggcaaatatttatgtaacttttctagccaaataatattgactcatggactagaggtcgttaatccttgaaccacgtaaaaactcttatctcattcttt

SEQ ID NO: 132295 - DNA, 953 bp, Cannabis sativa
cttccgctattccttaatcctattgtttgattctcatgaattaattagggctaaattaagttttacagtattcataacaatctattctatccattgcatgtatttcatgtatatttattggtttactttgggtttatccaatattttagacatagcatttaaaattttaatgttaagttttatatatatacatatattttactacgtataacaacaaaatatttaattactcattcaaactaaataaaaataataattagtttgattggatgttagatgtattaaacttttgaatacctcatccaacatttaatctgatctgattggatattgaaaaatagtattcaattcgatcccatcacaataatatatctaatatttggcagtcgattgtaattggatcgattggttatcattggattgatttatgcacaccccaaaataaaaaaccatctacatacgaatatactaatttagtgtaaaatcttaaatttttagtgtaacaatatctcactaaataaatatattttgtattttatattatatacatcaaataaccaatataattatatcataactactaaggatttgagatcttaaataatttaataacataaaatacttattaaatcaattaaacgttacacatttaaaaaaaatcttaaataaaatcgcatctaatatttagtaaatcattattttagttagtgttgatttttatttatgctgtttttttttagtttcataacgtagtattatgttgtttatatttaatttaatattaatattttgatattattattttatattttttaatatgttaatattttaaattaattattttattttaatttgaaaactaacgtgtaagattaatttttaaaaaaaattaaaataaaagctataatgaaaaaaaaaaaagggttttacaataaattggtctagactcaaaa

SEQ ID NO: 132296 - DNA, 798 bp, Cannabis sativa
agcgcattaatgtaatgccctggcaaaaatcacttttaccagcattattaggaacgattatatcgggaacaaaattatgtcatgcctaatactaaggatatctggaacgacaatagcatgacgttcctaattgcactagagatctcagttccccaacctctaaaatccttaaatttctctcagatctctctccaacctttctctatatctctctgtgtgactgtgttgaaatgccattgacgatggctaccactcccaaccaatttcctccatactgtttctctctaagaagcatcaaaaatccattatggtcattgcttctcctattaccgcgttgtttcaacctcccaaaaatacaaaaaatgcattggtaaaagtctcattttttgtagtgtcctaaggaacgatccttaactgaggtacttaaaatatgttttttttttaaaagaaataaattatatcaccatcctttgaagtcataacaaatactctttagaatttgtacgtgtcaaaatgaataatatttcaagaaaatcatttttcacaagtataaaataaataaattagcaagcgtacaaacggcttaaaaccctagctaggatgaacacagttaaacggtaagaaaacagaggaaattgaggcagagcaatagcagagcaatagaaagcagcagtatgcgaaatgtatgtttgtatttgatttcttagtaattaattacatgaatacaggggtatatataatacagtaaaaggaatattttccttaacaagaaaatattctcttgatcaatgattggct

SEQ ID NO: 132297 - DNA, 592 bp, Cannabis sativa
  modified_base (535)..(539): a, c, t, g, unknown or other
gagagagagagagaaagagaagatagattggtttcagacttagagtgatttagaggctagaactcaacttaggttttctaggttagagttaaggccttcatataagaaagcctaaatcctaatttacaactgaaaccttagatatttatatatattaaattgattaaatataaaagattaaatttcccattgaaagtagatattttccatccagtttgttgggttgttaagggcccaatttgtatgtagcttgcaactcacatgtcaggccgtacatggagtcttgccatgctaatcttggctgaccatacactacaggatatggtttggtcggccatgcatgttctgcacgttgaggtctggcaggttatgctcctgctaggacatagcaggtcatgtgcgtgccaagatcctacaagtcatgttctgttagcttgacaaagaggaggctagcctttggcaagtggaggacaactttgttcactgtttccttgaagaggttaggttctcttgtgttggaatttattttactagnnnnnagatttactaacatgtatgttttattaacatcctaaatatgaattctctacaa

SEQ ID NO: 132298 - DNA, 829 bp, Cannabis sativa
gtttagcttagaattaaatgagttatgaaagttttaaattgggtttggaccgtccaataggcataatttaagggtccatttttttaaacgacctgtttgttttgagacttttcccaagaccccgacaaattgttttcttgatacttaggttattgccttgatatatattgataaggaaacttttagttttgaatttaagtccccaaaagtgttagggcaatacttattggttttacctagaattgtgacttagggcctccgattatcaatagctatttccactcacattgaccggcacacctaaaatctaaattgaggtaagaatagcataacatacatacatatgtacttgtttatgtttaccagatgtatgccatatcagttagaacgataattagtgtatgtatgattgcatcatgatatcgtgaatatatgtgtttggcaattcagaaagtatgaaccaatgctaccaacactagtacgccagagtactgattgcatgtggtattatggttggttatacttccaaaagtatgaactagtactaccaacattagtacatcagagtactgagtgcatgtggtattatggctacttgtacttatagtatggattaatgctaccaacactagtaagactacaatactaaatgcatgtggtattatggtcaatcatactatggtgaagaacattcgagactcaattatacatgtttgacatggtttatgacttgttgataggtgtattggcacttagccgcaagtcgattatatgttatgttttatgattttcttactgagtcttttgactcacagatgctatgttatgt

SEQ ID NO: 132299 - DNA, 736 bp, Cannabis sativa
atgattctcactgctatatacttacagtcgatcccgaggttaggtgagtgagcgtgcgtctcaagcctcaaaattgtgaaaaaaaaaaattattaatatatagataaaatatttaataataaaaaaatataataaatattttatgatgtagtagttaaaaatcttgcttcaagttaagaggtcaacgaataaattcttaacttctatttctttatattcttttaaaaattatttattgtgtagttataaaaagattgaacatgaactcttacgagttttaaaaagctttactattataaggaattactaaaactattatttttataatttatttatttgtattttatagcactttattgtaatatttacaatctttttttaacatattttatttacttatattttttaagtatggatacggttaatagataaaaatgacagagtcacagataaataaaatgtataatctatttacttgtaactaatacacatgtattgtaactttcatttaaacaattacattttttttgtgatcttattgcaatagagttgtatttgtcttcgtattttttgtttgatatatggaataatattctctaatattattgttttgtttttatttttcaaagggtaaattgtgggatttcaactttatgatttcaggcccgtctcaaggtgttgagaggcctagggcgaaatttgaaacggggctttttttacaaaaaaataaaataaa

SEQ ID NO: 132300 - DNA, 979 bp, Cannabis sativa
taagctagagaagaaaaattcttatacatttcaacatcaatcgtccaagccttcgtgaatcaccgccaacaatcattgtatctactgtcgctctaatgataacaattcagtttttagattgtatgtcttcttttccccaaactataaaaagaaataaaaatttatattagtttatatatatattattatttgttaacataataaatacgataattaataattaaaacttacagctttttgatcgtgtatatagcggttagggtttgcacgtacgacgatgtcagtcatgtatttcaaaacataaaaaccacattcttagtttttaggttgtcttggacaatttgctagtgaaattcctagccatggcctaagatactcatttgatgcccctataaatctcgtatgctctgttttaaaaattatattaacatttcaattcattaatataaatatatataacttagttaattaaaagatgtattgcataaagagtaattaaattattaccttccaacattacattaatttgtggaggaagtttgtggtcatgtatagggtctaaatggataattttccctggtgtaacaacctctaacatctaatgcacactaaaaaattatattgggatgttgtaagatagtgtaaatttaattttacgttataatatagaaaataatgagcaataaaaaatcaaatagtgtttacatgatattctagggaataaagaatatttggtgttggttatttaatccttttgatgcattatcaaagagtcttccttctctaaatcgttgatactgttaacagcgagaagttcttgctcgtaaaacttgaaaatcatcttaaatcatttaagctcttctagatgtgcctgtattagattattaaatatttagtgttttataataattttagtagaatgtgatatataaggataatcagattaaagaagagtatacatcattccaaaaagcattcc

SEQ ID NO: 132301 - DNA, 860 bp, Cannabis sativa
aataataataataataatatcagtattatacggaaataaatatctgatatttttaacacttttggttggtggtgttgtagtatgtcataaacaatgctgtaaatttttttattgggggtgttttttatgggattctcttctttcttttaaatacatattttttttttttttgacggtataaagtgaatttgaggggcagatatttgtgatgaaacgatggtacttgaataaacacatgaagtcacatcaaatctagtcagtgcatttgaattgacaccaaatttgacatatatatatttttcaccctttgacgaagattgaagaatagatcttccatattacacatacccaatataaaactgaaaagagtttttggttgccaaataaaatgtgttgtaaatatgcatcaaaacacgagcttcagtggcaccaatataatttgatacaaaaaaaaaattataatgtttaataataataataataattataatatatattgatttttttagtttaaggtgttattaaggtttttattatttcaattacgctgtttgagggatatatgtaagaaattacagtctgatttgcttattactgaaaattttcatttttctctaaaaacattatgtcaaaaaaatttataacttcataacaaaattcaaagataatactaaataatacaattttataatttaaattgaaatttcgtattttaaaatttttaatttattatttaattaaatatgaaataataaaactggtactgaaatagtttttctgtaactacagacaaggtgactccggaaaagtaaaacaaacagtgtataaaagtaaaaacacacaagatttttgtacgtggt

SEQ ID NO: 132302 - DNA, 546 bp, Cannabis sativa
gatacatcatctttacatccttcgggatcatttaatccatttactttattacttgacgcgtcatcatttatgcatggagcctcacagaaatggatagagttagagctttccactggaggatgttcaccaccaggactggaattttctccactctgcagtctttcagcttcctccaacgtcgatatgtcaatcgaggatttcacagttttatctgaaactgagataagtacatagcagcccaataagatgaattcctgtacatatatatcttcaacaactatcaaaagtagctagtgaaaatgtttgaccaaattcttagtttcccaccaaaactttgcatcagcaatataagaataaagcatctacatgtatctatctagtatcaacaaagagcatttatacaacagagggatcatacatgaagcatctattagcaaaataaaccttagagggtgcaaggaaagaatccagttcaaagtttacctttgtgtccatcgccgtgacttatccataagctcaataggaatggaaggccccataaaacaa

SEQ ID NO: 132303 - DNA, 856 bp, Cannabis sativa
  modified_base (88)..(96): a, c, t, g, unknown or other
ttttacaatgttatatatttatatttgtatgatatatggtacaattttgacaaaaaatcagtttttttgtacaattttagaaaatacnnnnnnnnntttatcatttaacaaaacaaagggtccaattggtaacttttataaaatacaaggtccaaaatggtatttaccttaaataaaatggcgaaattgaaatcctgtagggcccacgctaggctcgagcacttgaggattaataaaaccaattttatcccttttttaattctatttaattctaaacctaaccctagaagcaatcctgcaaatagaataagatacttttgtttctaacctattctgataacataattgtctctctttatgagacaaaaatagaaaatagaaaagagcctaatattggaaatcctcttcttctctcctccatattttcaaaccctataatgaattaaagaatcgcccacacaaaagtcaatactcaaacctttgtggaagattgtgtagaatttaaacaattgaagaagatctaggttcagatcttgatcatacttgtattgaaaggatcaaaggttagagatttatactcagacattttcaaatgcccatccacaggtggaggcattaacttattctgattattgttacgatttttataattactatgcaagtatacgcaatcaagtagtatctcacgcaattgaggtcgaaccacagggaattggattaagtactactaaaatatacttgtgattctatttggtaaaataaatattttgcaattttaacgaaaataactcagaaaacttataagaaaataaacgacgattaatcaagatgagagattagggaggtgaatcctgtt

SEQ ID NO: 132304 - DNA, 1253 bp, Cannabis sativa
acgccataggacccctatggcgtcggttacttcataatactgacgccaaaagggtcctatggcgtcagttgtttttacccctacaacgtcacccggaacagcgtcggtagcgaatttcgccaaaaccgacgctgaaagcccttaaaaactgcctctaaagcccaatttgtagtagggagctttgagaattatcaagccttagagttttctaacaaagtactttttttgatagaaaaactaggtcatcttaatatgagcaccttagacatctttatatagtatttaagatatcactatttaaaattctaaatcataaatttccatggaggttatggactcaataaatgagtataaaactcattctccaataattataactcctataacttttaagaattttaaattaagacgtgtaacatatttttacactcttaatattggtgataatggtagaggttactcatagtacaagtagctgttagggtttatgccttgaaaaaccagtaaatacatttctatttataaatataggttgaacatttttacatgtgcttgaatattaaactattaatatttaatagagttttttacggttaaatcctccaaactatcatttcacttgcatttaaccctccgaactcaaattttaacggtaaaacctgccaaactattaaaccgttaacaaatttaaggtgtcatctatttattactgttaactgctaacatagctacttatgtgcacaattttgagcacgtgtcgtatttatattagtacacctaatttaattatttaagaattataaaaagttattttaaaaactaaagtttgaaaaataaaattatttcttattccctaaaaaaattagattcttattaaacaaatacatattttattttaaaaatcaattaattaataatttaaaaaactaaaaaaaaaaaacttaagttatctctctttctatctcactctcgctgcttgtccttcttcaagaaaccaaccatgctcaaagacagccactcatggaagatggggaggcttaagaagacaattgttggcatgtccccacccttcatctcatcacagaagctatggggcgactaatctagagctgagatgaactaatctaggcaggtgcaacattgtttctttctcttccttgttgtcgtttggagtcttgccaaaatatgcaggttcacgaccgtctcaaatattttggaggccctgttctattttaaaaagtaggcccctaaca

SEQ ID NO: 132305 - DNA, 603 bp, Cannabis sativa
ataccttttatgtgtttattttaatcgttttagaaattcatattatgatgttaaaaacatacttgttagtaaatctggatcctagtaaaatatattcctacaataaattgattatatatatatgttgataaatataaagaaaaagacgccaaaccctcatcacctcttctccttctcttctcttgagcaaaagaaccaagccaagaaagccattttttgacttgttctctgtctaactagctccttagcaccttaagacaccaactaggagttagccacttgaagtggaagccaagttaagggttagttgttttcttccatgggaaaaaacttaagtttttgaaagtgactttgtattctgtagttgttggggagtttgtaggcttatggttttgtttttggggtgttttgggagtggttttaatgctcctttgattgttttaatgttgtagagaggtgagagtcaagcatgagtttttaaactcaaagcttgagctctcatggtaacttttggttaagggcataatttttatttttgtcacatagagattgttatatggatgttgtatgattgttctgtgaagtttggaatcaattggttag

SEQ ID NO: 132306 - DNA, 617 bp, Cannabis sativa
  modified_base (28)..(30): a, c, t, g, unknown or other
atatgatatataatccaattcaatatannncaatacaatacgacctaatatggcgttccaaacgagccctaaataaagtcaatttgcctaaaaaaattataggatgattttacagtgtacttattgtgtctttacattcaaatgattttaattttattttttatattttagctattaaaattattttgtaaaattttaagaaattatgaaattaaaaagaattcatacaataatagaatgtttcacataaaattatgtagaaattatatgggaaaattataagagtttaggcataaataaataaagttaaggcgttatgagtttttatgttttttcacatttatatggatattttatgtcatatttttataaaaaaagatgaaaatttcatatttgtaaacaataataagttttgtcggaaaagtcagttactgaaaaagtcaccagaagtatatgtcacaaatataaataaaaatagaatcggttacaattgaaatataacgggttctgtaacactaaataaaaataaataaaacaaaataactcaaactaattataattaaattataactgattctataacataatgaattaaataaattacacaaaataactca

SEQ ID NO: 132307 - DNA, 2187 bp, Cannabis sativa
ttgataaagcattgaattagcttcgaaattcaagttgaattgagtcaatcgaataaaaattgagtgagttatgtctgttttactgaaggcagttcatgacccagtgtccagattgacatctaacaaccaggttgacatcccaacgcctaagttgacatatgatgtcaacctgtacgctgtgtaagtgtaaaaacatccaaggggtatcctttaagatgcataagtgatattttgacatcacttagtctacttacatgttttggcaaagctggtcactgattctcagagatgttactgttttgcgaaaatgagagactcgaaactcttcatttctggttgagctagaaatgagaaatataaagttgtgaatttaatttttctgacttcatagatccttatcattgtgaaaaactagatacatcgtcgaaacgacatcagattcaaataagcagagtctagtgcactagaccttttgtcaacctgggcattgggtacttactcgcgagctactgagattttgtttttgatacttccaaggcttctaaacttgaggacgaggtctcctacctcgtttttgaccattttgaattcaatggtcgcatcaaatttggtatttgagcaattaaaggcagtgtcctaggttgattgtcaacctgggcgttgggcccagccctaagtcaacctgggcataaggccctatttccaagtattcgagattgtggttttctctctgagtttgcttgaatctttgttatttctgatgacagaaaaaatgcccagaatactttttgttgaacttgatcgtattgtcaacctgggtgcaaggcccagccccaattgtcaacctgggcgttgggtcccccttttcccatttagaaattttgtttggtccccaaaaatagttaaatttcaatattttctaaaaatgaagaagatgctcaaaagaattcttgaaaaacttcattttaaatagttcaggttgacaaaatgttaacattggcccagggctagccccaggtgtcaacctgggcgctaggccatattttttgtgcccaagaactgttattttttctttaaaaggacctatttcccaatttttgatgaagataaaaaagttgaatctctgatttgatacttggaaggcgcctagattgacagattgtcaacctaggcagtgggtgttcggggccccaagtgctcaaaaataaacttggtctgattcttattttgacgccttaaatatgtttgtggtatgtctagttgatgtccaatgcaaggtttgaccattttgcactaagacagtcccaaaaactaaaatcctagttgaggatgtcaacttgggcgccgggtgaaatcctaggttcccaagttagcttccgagttacaagtttaagtaattttagctctcagggctatgattaggttgctccatgtcttcatgatacaaaatactgaaagatagtgggttggactcaagttattgaagtccgaacttccatcccgaagatcttgaagtcaacctgggcgtagggctagggttcctcccaagtcgactgctatgactcgggtctactcaactctataacatcatctttcatgtcacgtgtcaaacattgatgtccatgtcaccggaaaaagttcccgggttaacaggttggtagcctattattttatggttattttaatcacttggagtcagttttagaataacgtccatgaatgtgcatgaatttattgagcacgtttccagctttctttcccaacatttttatcctattaaacacctattaaagtgctggtaacaactatgaggtgaagggaatttgactttgtaaagcgatcctcaaatactaaagtgctcatttcataacaattaattttctatcaacaagcatttgcaaaaaaaaataagacttgatagtttccaaagctatttccatgagagttctcttagtgcttagagatagggacaaataagctttttgacaaaaattatataccttgttcaagtcatgatatctccactaatctacactcaagattgtgagtgagtgtttatatatattcttcttttgttatatatatatatatatataaattataatgcatgttgtattcttcttttatttttcatatatatctattctatataaaatgtgcctatataactgaaattcttggtttatg

SEQ ID NO: 132308 - DNA, 766 bp, Cannabis sativa
ttctagaaacataattatctttattttagtttgagttttatgagacatatctttgggtatgtttgaattttatgagacattttatggttattatttttgtgagacattttatggtatgtttgaaatttatgtgacagtttatttattcttaggtgctctacaagtattgattctattaattttttaggcttacgcctcatacgcctcgaggcttacgccttgccttacaaaaaaaaaaaaaatgcctcaaggctcatttgcgttttttaaacattgaggccacctgagtcagaagtgtgtctactgcacatattagtcatatgattagcttttggttgtggcaatcgaggaattagtataaagttgaaaatgaagataacaatttaacacattattcttgatatgaaaagtgggtttctccacaatgtggtcaatgtagtgtatgttctcccttgagttttagtgtcaaatgttatctggggtttttttttctttgttgtgtttttaacttatcatttatggtaactacttatgatattagagggaaaaaaacaggcttttcaaaatttatgttagaaatatttttcttaaatttagctaaccaaacttccaagacagcaggctcttttactgtaaaaaaaagcttcctttgtttttttagttccatgtgttagactatatatatagtgtatgtaatatagcatatacaaatgatatgaaatgcggaaaataaactgtaatcatatcaataatatatgcaataaaa

SEQ ID NO: 132309 - DNA, 993 bp, Cannabis sativa
  modified_base (28)..(31): a, c, t, g, unknown or other
  modified_base (524)..(527): a, c, t, g, unknown or other
aatgtttcataatttaatgtgatagttnnnnatactaataaaataataaaaattatataaatgtaaatgaaaaagtagtgcatttattgtggtgtaaatttgacataatagcaaacgttgtgccatatttggcacaaaatttgctatgtgccaaatttacatcactttttggcataccattggagcacactttttattaaatgagctatattttaacttttcaccacttatttacacttccattggagatgctctagccaaacttaataattgcaataataatagtcatagtgcatggttcgtacatattatagctacttgaagagagaattaaattaatattgaagaaaatacggtttttgttaatttgttgttgattttttgttatcagtatgttattttttattgttattttaatattatttagatgttatttttatgttacttttatgtaattttcttgttgttttcgtgttgtttttatggaaaatcataaaaatgtaaaaaaaaattctttaaacgtnnnnatataattttttttataaaaaatggtgccttatataattatctcatttatatttgttaaaatacacaatcatcctaaaatattatttttctctcatccacataagatttatcacttttttcttaaaaaaaaaatactccaatggttgacaaatttaaaagttgcacaccattattccacatcacattaagtcaatgattttttaggtaaaaaatatagttacgatcattcaatccaagaactattgctgaaaagttcacaccataatcttccaagttaaccttaatactcaagaatagagtgggctattagattctataggatgagtatctttatgtattacagtgtattatctactcatgagacactataattgagatagggttgatcacaatctcacaccacactatacagtgtgtggcgtgtgagactaggagagagagagagagagagaaagagagggagag

SEQ ID NO: 132310 - DNA, 576 bp, Cannabis sativa
tttggatcttgccaagttgtttccaactatatttcagtattctgcaccataaaaacatggatcatccaaggccaatacccgagagctgaaaaatacacaaaacatcactacaaaaatcagcctgagtgcctagaatttcacacaacgcccatgttgacaacccaggtagggtttcaattattgggaccgttttagtgcaaataggtcagacattgtactgggacatgaattagacacgtcacgaaagaatttgaggcattagaatcaaattcggagcactttcgtttttgatcggagcaccaggtgccctagacacccaacgcttaggttgacatattatcaacttgggccacttccaagcatcaaattgaagatttatcacgtgcattttctttgtcttcatcaaaaatgagaaaaacaagtactttcggagaagaaacatactgatttgtgagccagaaagagggcctaatgcccaggttgacaatgaacatggtgcactggtttcgatcactcaaatgcaaattctgctctgagcattctctttaaaatggtcaaaaatggggtaggagacct

SEQ ID NO: 132311 - DNA, 1269 bp, Cannabis sativa
acatgaataccaggggtggtattttggttgatccacgtatgataactaggaaaagtaatgactataaattggaatcgttgttaggttttgtacttgccggttatctccatagataacgatagtgatatgcatactcgggatggtatttgatttatcctgtgagacaaccgtgaaaagtcataactctaaactgaaactattattaagtttcttacttgttggctatcctgatttggtagcagcagtgacattattatcgacgagcggtatttgggttggctaatttgacaacaatagtaacatttggataccagggattggtatttatgtttcctagctcagtaataattttgatatttagatatcaattttgagtatcatggttgttttattaaacaacgataaagacatcggtatgctagtttaggaattagatttgttttgttaagaaaatagtgtgactggttacgttatgaagtaatagttactttatgaacatacaatcatccattaagcacataaactaacatgaacacatccaaatcatcacaatcatcattttaaatccatatttcatgaaagtaaatcattactatggctctaaggctagtttttggaacttattttactaggatctagatttactaaatgtatgttgattatagtctataatctaataccctaaatatgaattttctaacacgataaaataaatacatataaagtttagaaaccttacattcatggcagtggaataatatgactccttctattcaaatctctagcccttgttcctttttgtcgcagagcattatcaagatctgaacttggatcttctctcctatagtttggttaaccaccgtctttcccacagtgattgagtacttgacttgctatgagtgggtatcgcactctatcaataaatgttcaaatttgatgaagaacaaagaataaaacctaactttttgataggttggatgagaatgagagcatcatgttccctttaatagtatttcaactaggatttatgattttaattatatggattaaaaaagataaaataatagacaagtaattactttagtggctggccacttaatgagtctcactagttacagtttttctactttatttcaactattcatcttttctttcaataatgcgatattttgaaacttcaatcatataaatgtcaaaactatttatttaataattataattaattattaaataaaattgccatttattttatttattaattagacttaa

SEQ ID NO: 132312 - DNA, 671 bp, Cannabis sativa
caaatcaggtattgagtttatgcttggcatacttaacaattttacatttcaatcaaagctgttagaaagaattaagaatgcttagctagtggatgaagaattggtgaaaatttgagaagaagtcttagttggccaagctaaagatttcttagtatcgagtaatggagtgttactttatagatctcgagtttgtgtttctagcagtgctaaacttagaagggatattcttgatgaagctcataccaatccctactcattaaatcccggtatgactaacatgtacaaagatttgaaaccctattactaatggtgttgtatgaagaaggacgtggttgagtgtataatcagatgcttgacttctcaatattttaaggcggaacatcaaagacttgcaaggttgttgcagcctttgacacttttgtagtggaagtgggaggatgtcactatggatttcatggttggattacctggaaccactggtatgttttattccatatgggtatttaaggattggtttacctagttagcatactttcatccagtgaaaatagtatgacttcatggaactctgaagtgttgggctttctgccctaaataaaactctatttcaattaatcttttttattcaattatcaataaagaaacaaatttaatttcattacttgtttaat

SEQ ID NO: 132313 - DNA, 1534 bp, Cannabis sativa
  modified_base (1366)..(1368): a, c, t, g, unknown or other
gggcataaaacccaacaatatatggataccttgtttgtgtcgacaactcaggacgtacgagtccttatcgggtcatcgatcacattaggtcattcggaccagctctctaagtaaagagtcgatctttactaaatcgcaggagaagtcttcatagacatcgcatatatcttggtatatgcgagacttcagcacgtccttcttgctcctacgtcatctgaggcgtaataatgctactagactctgtcaaggacgtcacatcatctcggtgagcttggttcaggcgaagtttattcttgagaggtcctcttctaacagctcagcaaccctcgagggatgtgagtccacgtgtcattcttatgggagcctaatctcgactttctaagtgaaaaatatcacactataacagtatttttataattaaattaatgtttcattgccccaaggaatatttagtatactagtaaaaatcttgcatgtactatagtcaaaagatttaaaaataaaatctattaaaaatattttttttattgtgaaaatataaatagaattcatgagcatctatcaattaaaaatccatcaacaaaaaaaaaaataatgtatgtaaaatttatataaaagataatattaattaatattataaagtaattgaaaaaaaaattattagagagggtgcaatgtaattagtaatatgttttaatatatatgagtgtactttaatgggtattactcatgaataggtaatattaaaaaattttgaatttttatgcttaatttttttatttaattaaaaaaaatctcttatttttaaattatatgagctagggtagttcaatcggctgaaaaaaataataataaaaaaactttttagcaaaaaaatgataaaaaaagttgagtttgacttaaataacttttatataaatatatttttgatatagtgtaaaaaaaatatattttttgatattttttttaattaaatagctaaattaattataaaaattaaaatttctcttttattatttgccatcgaatcaaaatccaatgatttaatatttttaaatttaatatttatggttaaatatttttagtactcatcaataggtaatatccattataagaagtattccatatatatatatatggtgcactttaaataggtaacttatgaatagtagtattaggaaaatttgagtttttgtacttaatttttttatctaattagaaaatattttcatttttatattatatgagttgtggctgtttcatcagttaaaaaaaatcaataaaaaaattgagtttgagctaaatattttgtatataaacatatttttgatatagtgtagaaagagatatatattttttttaattnnntagctaaattaagcataaaaattcaaatttctctttattcttcatcattagattaaaatctaatggttattatttttaaaattaatatttacagttaaatctgtttagtaaccatcaataggtaatacctattaagaagtattttatatgggtgcactcttaatgg

SEQ ID NO: 132314 - DNA, 1349 bp, Cannabis sativa
gttggcaccggtggccctagagttgggaaccaaaaatgggaacttaggccgaatgggtgttttctctttccctgccttctcccgggagatcctccccgaagcgacatgcgctgggcaaacactagctcctgttcccttttgaatttatacttgttatacttatcctctcgaacgagagaatatccccccggagtgccttctcagtcccaagattctgagcgttttggcaaagaacctttgacaaattgaagtcgtccacagattggctctctaggatcaacttagccctccggtagttggcagtcatggccaggtctcccatgttcaactcctttttataaccagcaaacacttgtgtgtggtttataaagagttaagtgagggcggtgcggtgcatgggagaaaccctgacccagtccgtcagcaggtcttggcgctcaaaggttttgaagctaaaggaaaagaaaaactgatggcggtattccttcacattcttctgaaagtttaaaggcaccaaaccctaattagttgggtgggcctagagtttgtaaaaaccatctttaaacttgtctctctttttgggggactgatagaagttcataaaaatacagaatccaagcccgactaggcggggcccatttcctgacaatgtaaaaaatatacaagcctgataacaagcagtaaggttgtggtataagctagtagggtgaaaggccaacaaagactaaaaaaattaataaagtagtcctggagcgaaagcatggccccggacatcaagtgggtctggctccacgcccgaagtcggtgctgttatgattaggcatctcttcgtccctgagagatgatggtaaacccctgaactagaaggtttgattccaaaaacagtaatgatcttttccaactagtgggcgcaggtcagtgtcgaatttagctcacctacttcccaaccattggagcgagaagaactttttgtagactactgggcccttcatttattcatccaaagtggccaatttctttggccccttcttcgaagatttttctccagcagaggtggcggttgacatggtatggatttgataaagatctaggattcttggttgaacccaaagaaactgtgtgtgtgaaggtcgcggataactttactcatctaaaaaagaaaatctagcagttagcccccatatcaaaccctaggatcaaaaaggggaatggggctcccctattccatggaaatatgtcccctccgaatgcctaccaaaaaagggaatccaaagattctctaaggtaagcatcgactgcaaaacatcatagcaaaaaagaaaaaaagaaaaagggtatggaagtcgctt

SEQ ID NO: 132315 - DNA, 1543 bp, Cannabis sativa
  modified_base (632)..(632): a, c, t, g, unknown or other
gaatatagcagtctaactcgcccaggtagccatcctgatcgagatcccttaagcgtgccttagtgaccttgtatggagggctcaccaacctggcgcccaaagcaccctgcctcctctagggaaccgctgcagtaagttcctcagtgacgtaatccaagccctcgaccaggacgtctccatcaacatcaactagctccccagcctcattatatctgccaaagtttgggggtgcagcctcctcctcggaaggactaccagaacggacattgccctgttcttctatctctcggacctcaacgtcccctgcatgatccccctcctcctgtgtgggtggatcctgttcggcgctgggcaagggggcgtgctgggccacttgagggtcagaggcattagctttacgcattgtttatttaatacgagccatcattctttggttgaacgggaaaactgaatcaaaatgtccgtcgcttgaagagagtggactagagcaaagacgatgatgatcatcctacaagagttcaagcaggtattggtcgatttggtgtttgcttccccaaaactcaactgggttcatctacaaaagacaacacgcgagatgagtgtttggtcaggatatcgaacattaaacaggnagatatgccgaccaggagtactcaatagattaaagaataaaatattcgacaaaaagtcaaaactcagaagtttgaaattgtcgtgagttagggcaaaaaaaaattcatgaagcttagaataagaaagatgaaagacaagcatgtaggaaatcaagctagctgtaaattacatttaatgtatttttcatttactctagcattactaggtattcgctttgtattatatataccctttgtatatactaaaagagattatcagaaataaaacatttttctctcatttgcttcatggtatcagagcatttgaaacttcttaaacacattattttctcaccccttcctttcttaaaattaggtttcttaaaattagggtttggaggctttatcctagaagattaattaaaagtagtttcctattctcacctctgacctagggagcttgtcccacctccgatcgggaaaacccaaaagtctggcgttcatctgagctgcgcatgggccccacgcgccaccttcttctgtcgcgacactctccacgcgccggtgcgtgtacgcgcatggcagtctccagcagtggttttccgcatcgtctctcttaggtttcttcatctcagactcttctccaactccagcgacgttttttctggcgtcctctctctctttttgtctcctctcgggttctatacttgtgttgtcttgatgtctttctccatggcagaacaaaattctttaagagccatctgtttagtcgcaagacaatgcaacactcatgcacttcaggttattcaaatacttcatgacccttggattgtgcattctggtgcttctgatcatatgacaggtgatagatccttattttcttttctaagtgcgtgctctcatgaaaggactgttcgcatagctgatggttc

SEQ ID NO: 132316 - DNA, 657 bp, Cannabis sativa
  modified_base (567)..(577): a, c, t, g, unknown or other
agttcgtgtttaggatgttaaaaacatactttttagtaaatctagatcctagtaaaatatattccaacagttggatcatttggtcaggtacgatgagacacgcatgctctttacgatagcgtgtcttgggggatatcttctgacatcatacttgagaaagcctggccactaggtccgtagtctgacatgtacgagcaaagcctccacggaataagagcatagcctatttaggcacatttcaaaaggcatttgttcttctgagaaaaacccatactgtttgcgggagcagatggcttcagttcttgggaccggggaagactttggctcttggataccctcccacaaattgcagtcaaggaactcccaattaaggaagccctttctttatttttcctaaaatgaaattaaggttaattacattaaccttggctgaatgtagtggctaggtgtcaacacgtaaggcacccaccactcactccttggcaaattccataaccccgctcaacctcggtattctattttctccaatacacataccactcaaaaataaggttctagacttacccnnnnnnnnnnnctagccatccatcgcattttctattgtcgccgaacaaaaattacatattcacatataagtcaaataatactcctagagtt

SEQ ID NO: 132317 - DNA, 996 bp, Cannabis sativa
gaaactgcaccctccagtcactctctctctccctcttttttctctcactctcttcccttaattgaaacggcaaccttcaataaccttccaaaaatcatcgtcgaacacccaagctccacccacgagtctcccttgtctcatcttgtttccaaaaaccaccgacgaacaccaatcgcgccaatcaagaacgaagaacactctgaaccaatggcaaatgtacgtattttttattaaaaattatcaatttcgagtattttttgtacaaaatgttagttgaaattggtattttgtaaaatagaaagtaggattttgtttgatttgttctattttggcttagggaacactgacctgtgataatggtggtaaaatgggagtttctaggtgaaacctacattttttggggggttttgtgttaagttcgatggagtacaatggtaagacgatatgggcccgatgatttttctgtgatataaggaatttgtggttgaagatgaatgtctgatataaggacaatagtgggacgatagttagtctgatggttcattatttattttgtttttgatttataattttggggacgatatagtgacgataggggacgatgattggtctgatagtacattatttttgttgttttttgatttattagttggtggacgatggggaagatggtcttgtaatgccctaatggtaaggcacgttacagtgctttttcaattacagtgtgcaatctttgctaattaaagaattttcttgaaaaacgtgttaaattaaaacttttataataaatcttaaactttatattatattaaaatatttacaagtgccaggatcccgttttcaaactttttaaacttaatatttcaaaatacacataatccaggtcgcatatggactacaaaatataatccccagatgtcccgagaccgaacactccaggtcgcgctgccccgacatgtacaacttcatccaagctcaagttcactccagttcagc

SEQ ID NO: 132318 - DNA, 932 bp, Cannabis sativa
tcaaataactctatcatctaacggctctgacggctgcgtacatcacggattacaatccgtgaaagtacaataacgggacaaaattatatcccaaaatatttatatctttttcaatcctataaactattcgattattttttaaaaaaaaaattacttgtagttctaaataattataacacaaataattataaagaaaaaataaactaaaaaactttctcaaatactgaaacaaataagaaatatattgaaacaacttttttaaagaatgttgtactatactacaaaaaatatatatactttaaaattaccccaaaagttatatattatgtaatttttttttattaggcttatttgtaccgcaagtctttaaattatataaattttggtaagttagtctccaaattttattttttggtaaattaattttcaaactatatacgttttagcaaatttatccccaaactttattttgttagttaattggtcacaaacttttattttattagcaacattaagtccacactttaatttattttttgtgttaaattcaaataattttattttttaattctaatactttgataaaataatctatccacatatctataatttatataaaagtgagaatgattttttgggctttcactaattgaattacacaattagccttcactatatattcaattataaaaaatttaaactaggcaattgaaacatgtacactacttatttctttttcttctaaactaagcttcccctctaacattttatcttttgtgaatatttgtgaaaaatcattttgtcttatatatatatatttttttttgattgctatcaataagtatattttcaaataaataatgcttctttatttttttaaactaattttgctaataattattatttaaataaccatgcctatatatatatat

SEQ ID NO: 132319 - DNA, 963 bp, Cannabis sativa
gggcataaaacccaacaattccctcaacaacaaactgtaaatatgttgaaagtggattgaatactaagggagaggaaaaacaagaccaaacaacagttttggaaaataactctttctggtggtcaataaaaatagatatgatatctttaatggctctataataccctcaagtgataactttggaatggtaatgcccagaacgtaagtattttgtactccaatcctagaacaataatataaaaatcactattaacatacaaaactataaaataactctaaaataacagtttaactaggaagaccaaataatcaaaaatgataataataataataaaaagaattaaaaaaaacactatacctcaataactcttttctcacaagggacttcaatatcagcattataatgaaccttcatcttgatagatttccctttaccctaaacacaaaaaaaaaaaaaaaatcagaacaaccaaaacacaacagtaaaagaacataaaaattaaatgtaaaatatgatacaccgaatgagaatgatacgacaacaagtgatataaaatcaaacaaacataaataatagatgagaaaaagtctcaaattcatatctacaactaacatgcatataataaaaaaaaaaactctaaaaaataattaaacaaccataaccccaaaaaatgaaaaacaaaactaacataaaacccaaaaaattacaaaagaaaacagaaagatgataaaaaaaacaacataaaaacaaagaaaaaaagtaataatttcggcactttcgttatctcaaaatcttcatcttcgagatcaaaattagagtttaaatcttcaacgataggtttagtacattttgattttctcttttccaccaaattaactactgacttccttttagtagtttttggagaggtagggctaggaggattatctttaaaaaaattcttggaaacatctttcttaccc

SEQ ID NO: 132320 - DNA, 545 bp, Cannabis sativa
tttttgccaaacgactcctaataatttttaaaaactattttcagttttaaaaaacagaaaacaatttttaaactgtaagccaaacagcccctaaacttctgaattttgagagtatattcacatgctttataacatatattttaactattgctcatttaataataatttgagtggttctgtaccctaataaaataggtacattaattcaattcctaaatatttcggcatctctaataattttttagttcaaaattttttataggagttatttaagacaaattctataaaattttaggaaatttaaaataatttacaatatagaaattaatattcaaattaggaatgtcaattatacccactagttcgggtacttgctggtacccgccctaatgggatgggaatgatggttgactttcgggggcgggggcgagtatgggtttaaatattcatactcgagtcggaaacgggatggggacgagagaatagatacccgctccgaacccgccccgatatgatatatgtataaatttaagttttaaaatcat

SEQ ID NO: 132321 - DNA, 1184 bp, Cannabis sativa
tttataatacatatatcaaaatattatattttagattatattacttaataagtataatatatatgtataatttataaaagttgggcaataccgcacgaagcgcggcttagttccttagttaaattatagggaaacttatactgaaaaatggtccaaacttcttttatattgagacccagcaatttgaatgataaaatgctataaatttattaggaatgtaacttttgtaagttttcgaggagtgctaccgtcaacttcctgttacaatctcttagtcaacctctatgctcgtaaatacatgttggaatattttttttcaatttttctttcacgggggtgttcgttatgcttacaacatcatccctgcaaatttttgaaaaatttcgaatagtttacagtgccgaaaatacgtttgaagttgtttgtacgcccgtgataaactggaatatcaagaactctatttttcagtactgtaaactatttgaacatttttcaaaaatttacagggatgatactgtaactataacgaataccgttttgaaaaaaaaaatatttcagcatgtgatttcggacgtggatgttgactaagaggttgtaattagcattcatctttttgtaatagggattttttttattaatggtaaatgaaattttcttatatattaaagggaattaatctatatataattttttttagttgttatatagattttggtgtgatttaggagttattggagtttttgtgtggaattccataaaaaaaaattatttcaaagtgtataaatgaaaaaagttttatatttaatttttaaatttaatattttatttaatttttatttattttaatgataagattatatacataataatattcttatttttaaaaatttagatattatattattttatcttatttaatatttaaattaataaaatattatttaaataacattgatatttattagttggttaatgttttaaatttgaaaagatatttgggattgttatatcaatctctaaatttttgaatttgacattattcaaaattcttggataaatgccattttttttcaactaacttttcttattttgttacatgtttgtttatttaattgtttattcaaatttttataattaacttgttgatggattcaatgatttaaattaattatagtcaaattatt

SEQ ID NO: 132322 - DNA, 543 bp, Cannabis sativa
ttttttttttctttcgaaattttaggatttcttttgtttgttttgtcaaagtgaggtcggtaaggtggtgggcctacagatggtgactcattcattcattcagagggtaaaagccctcatagtcatctatgactatggctgtgatcataattaaatattaaaaatatatttttttttttattagagtaaggtcttgatttttgaacagtcgctagtcatcctattcattttttttttctgaaactaagtttaggactagtttcacctacatcctattcaaatttagttaggctaacctttatttaaaaataaataaataaaatagaaattatatgttagggcgtctctcctaaattcttcgtgaggttgtttttttctctaatcaggctcatcggctttttttagacttaagtgtggcttagtcagagttttgctattacgattaatattatctctgtgacttaatttttagtgtttttatttaggttactgcaaaatctggtctttgtgatatgtttttgagtgtcttttgtttaggttatt

SEQ ID NO: 132323 - DNA, 692 bp, Cannabis sativa
attgtgttgtatcatccaattgttgggactggcttgtgccaatttttgcttggtctggcctagtcgtgttttaattaaggctaattaagaattttatgttctaaattttgacatttacaaaattatttctcataaattttttacatcgttaaaattttttctaaactattgagattgtttgattcaacgctttcttttcaattccgttcaattttaataacgtgacgattgttgctgtactaaattgtgttccttaaactttgatatttatcaaagtgtgttctcaaattttgacatataccaaatcatactccttgaatctaataatctcaatagtagacaacttaaagtattatgattcttcaatttaattgagagtgaatctgatttataatcaatccaatttttagtatatatgtgtacatatatcattaatctaaaataaaatacaaaacgaaagagtggttcatatcatgtgaaagtgatttgtagaatttataaggtgatagctactaattttaacccacatgtaataaaattttggaattatttcaagaaaactctataataataaaaagaaaattaaaaaaatacaattgtacagtttttaagattttatttacatcaaatacggtttttttatatacttttatattatactcttattattttattgttaattttttgttatt

SEQ ID NO: 132324 - DNA, 536 bp, Cannabis sativa
cctgaatttatagtaacccaagccaagacgaagaatttggagaaggacgactacttgggaaatgtcgaatgcttcttcgcttcgccaaatcaccatgcacctagtccaagaaagggattttgtgtcttgttaggtgttgataccaagcagggtgcagtgctacctttgcttccgcacttcaagaggattgcagactactataatctctgcgcaacccagttcactccgaagggcgtcaaatacttatatgccctgttcatcctttatacctcgcaaggattgggtaagccatctcgcacgacaccaactggcatttcgacgtgaagttaacttccaagtagagcaggtttgggtacttctacttctctcaattggatgagaaatggttgaagggtactgtggacactgatgtcaacaaaatagggcattttgtggacaagtactacttcgtgtagggaatgggtaccgtccacacttagttccagcaaattccctcgtattgctgccctcctttcacattaggactcagggagagg

SEQ ID NO: 132325 - DNA, 854 bp, Cannabis sativa
  modified_base (49)..(55): a, c, t, g, unknown or other
attttttggaaaaccgtaaaaatgtaaaaaaaaacattctttgaacgtnnnnnnntaaatattttacaaaaaatggtgctttatgtaattatttttttttatgtgttctcactctattgatgaaattgaaggagaagttaaagattagttttgatgttctttatataacaaactaactagagccccataaactctaattaagtttacgtactattcagtattacacattataatagaatatttattgaattcatttgattagatcacttattttgtttaatttaaaatattagctcaaataaattgttaaacccacataatccaacacaaaaattataataataaatgttaattaattaaaattatatataaatataaaattaattatgaattttacctcttaaactttgacatgtactaaatcacgcttcttgaactattaagttttaaggctgttaaaaaacccctgaaatatcaacgtctgaggagcatgttttagtacatgaacaatcatcaaattaacaaaattgaatgaaatttgacaaaatccttaaatttaataatctcaatagttcagaaaaaaattttaatggctgaaaaaatctagagacataatttagtacatgcatatcaaaatttaaaggacaaaaattataattagcctaaatataatcaatttggttgactataagttgtattatatatttgcacatcccattcaataaccaaccaatccaaattagattttaaaattttacattcgatgatcaaataatttttggtggtgcgtagtaattcaattgattatattttgcatggacatctctatacttgtcctattttttttttttttt

SEQ ID NO: 132326 - DNA, 565 bp, Cannabis sativa
gaacttcctcatccaactccattaattataggagagtcctctaattccactgatttttctcctacggctacgacatgtacgatctcggtccctgctgcagtctcaactcaacgcaacatggtcattggtgggcaaaatgttggtaatggcagtggtcttagaaagtctctttctacagcactaacatctcctacagtatccagcaatgaagttcttgtcaaacaaccagcaacaactcctacaccagcacctattgtttctcatgctcataataacacaaagataccattgtctactgctaacaacaattctgtgccacagccatcacaaagtgagataattactgatttatctggggtgtttactccttttgctgtcataaatcattcaccaaatatttatgccacatatcccccacaagactataccttctcgccagcaaaaacaaacccgattcatgctccactaccatcctctaacagccacataccaatgccaattgtgacaccttatgcaattcagcaaaatgggaaagaaaacttatcaccaaatcgtttcagcaaaa

SEQ ID NO: 132327 - DNA, 1056 bp, Cannabis sativa
  modified_base (26)..(29): a, c, t, g, unknown or other
ctgcaaaaataaaagataacaagcgnnnnaatgctccaaacacgattaaaactcaattaaaaatatactaaatttaatctaaaattaatactaaaaataacctaacactagcagctatgcccaagtccttctagggaaatgccttagagatagcaaacgacattctatgtcgtttcatctaagtatgatcctgagaaaacctcaaagtgatggattgatcgtatacttagtgtacaccatattactagattcagagatgccctgatcatgaacttaagaaaagctaaaactgctaattatggtttttgtatgtttgatagctattctaaagtgattagaggtggatcatcctatggtcattaagataataaagtgtttgattcaacaaatactatttttttctaaaaacgtgactaaatctaaaaacaaagtagcagagtaaaggagatattttttgattcaatttcaaagtgttctatcatcttattctatataaggtggtcacactgcctctgttgtaactaatgaggccgatatcactaatgttcctagatagaaaatcacagtacctcgtcttagtgggagggtttcaaggaacccaccatgttatgacttggaagacacttgtgataaaaatttattgttagtttaaacaagcaatggatagtcagaataaaaaactaagaagcaaagctaagagaactatggttaaaactattcatatggactttgtattttacgaaactattttaggtgtgtccgaggtataggcttaggataggaaaggtccaaagtgataaacttggtaaaattactgatgcttgtttgttgaaattcctacaaacaatctaaaaaagttgaagttaatgaatgggataggcttgttattgacaaaatactgaagtagaaagtttgtgatacagaggctgctagtcttccaatcaaactttttgacgtagttttttttagagaaatgttaaagggcaccagtggtgcgtagcactctcctatgtgtcaatatcgctattggtccaactaaatatcgggttccatata

SEQ ID NO: 132328 - DNA, 737 bp, Cannabis sativa
gttaagtgcagatggtcatgggtctgtttagttagtttagttgcttttgttagtttgtttcatttcagtttttctagttttctcttcagtttgttggttgggcgctggtggcctttgtctctttgcttgttttctggctgtctgtgggtgtgtttcctttttaaacactaatcaaaaaaaaaaatgatgtgcatgtaattcaatcaatgagactatttaaaaagtactatcatattgatacatataggtagcgtttgttatacttttatttttaaatttttttaagcacaaaaataaaagtaaaatttttgtttttaaaattttgattttgaaaaataaaaaaacgttctataaccacttttatttttctattttaaaaataaaaaacaaaagtgcactacaacatttaccttaaatagcggtggaccactccgccgctaataaacccattttcggccgctataggctattagcggcggtagtcccccactaatagtctgtcgctatttaatagccgttgataatggttattagcagtggaataaggctccgccgctaataataatattagcgacgggcattagccaataatagtattcgaaactgacactaggcattagcggcggaaccccgttgctaatttccgccgctaatgaattttaaaaataaaaaaaaataattaattaatatacaaataataataaattataataataaataataggctaattaggatt

SEQ ID NO: 132329 - DNA, 628 bp, Cannabis sativa
tcatatattttaactttttcttttaaactctcatataaaataccttttttaaggaaaaagtaatatttttacacatttataccttaaaaactataaaaataaaaattcctctataattaagtagtgaaaaattaagtgatttttctcttttaaaaggaaaaacattaagaattaagtaaattaatggtatgaatattgttgtgagcaagtaatgaattttggatcaaatacaaatcatgatggtatatgatttgatagatagatagatagatagaagacttgattagttgataaagattattaacatattcaatgacttgattagtaaaaaaaatcaaactttttgggaaacaaattttttgattcgattaaaatagaattaatattttcagtaaaaaaataaaaaatcatgaatataaattcaaccaaatattttttaaattcagaaaacgcttaccctcaatacaattagaagatcatattattgattatacaaacacgagtttagttcccaattttctactcatgtttttaagtttcaaatgaaatcttctatgactttaaaaaattcccaaaacgtggttttttttttttttgaaagaacacacagttcattaagcgagaaaag

SEQ ID NO: 132330 - DNA, 565 bp, Cannabis sativa
ctcatattttactaattctcttaattaatatttacacacaacactctttggaacactttacactttggcgcacttgaaacacatttttggatacattctctagaatttgggacctaaggtcttaatacgtgggagtggcaaaacagattttgacacgacacacgcacacgaattcgatttttacaagttagtgtcagcaaagtcaaaaacggatcaacacgacttgacacgaaataaaaactgataaaatatgacacgatccgtttaacacgaatttaacacggattttttaaataaaataaaataaaataattaataatattaatataattatataaaaatatatatttagtgattaaatattgagttaaaaaaatttgcatttagttttctttaaatagaaattaaaaatatttttaatttttttaatatttattattatataaaattatataaatgaatatgaattttgtaatagaacctaaatttaatcattttctttactactctaatttcagtaataacaaaagggaaatttgattttctatacttacatatacctaat

SEQ ID NO: 132331 - DNA, 568 bp, Cannabis sativa
aagggtaaggatattatgaaagacaacaagtcagagctctctcgtactgatttgaaagcccctaacaatatcaagaccactagtatgaaatcggaattggggttgatgaaatctggacagggaagttcaaaaagggatggttcttggagggaagagaattgtagtgatacgggtgacaactcacaacaacaacaaactcatcaatctcccagttgccaaccgaatctgctcagtaattttattgacacattgccgaagctaatagaggttcccataagttatgacaatagccttgctacgatgaaaaaaatagagggcccatcgaagagaagaaaggtgattcctaaaagagccaagaataaaggaggtaatggtactaaggaggtgacaatggaggaaatacattcaacaggacagggttgtaacacaaaggacatttcgagaatttccgatttgacctttggaatggatatttcagcggcgaactcagtgaatctgagtcgccgagagccatgattgccctattttggaatgtccaagggcttgggaacccttggactttaaacac

SEQ ID NO: 132332 - DNA, 669 bp, Cannabis sativa
ggtttacctgacctagtatgttaccttaggagctccgatgttatttatttagaagaaagatagatcatttcatatgagtgtttactaccaagaactaagtaagttggaaattaagaacaaacaccatctgtctaggattgtggtatgatttgtattacaaaatataaatatgttaatgtgtattattaatgtagtattgttgttatagtagtatgcaaataataattaaaaaaaaagactttttaatacttttaattatcttttatataaatggctgtaaaatgttattaaaaaattatataaatataattgaagctataaaatataggggaaaatatatatggtttagtaattaatttattaattatttaaaaatagtatgaaaagtaaaatataaatttaagtgtggatatgaaaataggcttgtttaaaaaacgaatcagtacgagtaaagcatgatataaaaatattgagcatatgggtcgtgttagatttatcctttaaaaatattacacgatactacacgaacgaaacgcaacacgaatttacagcactaccatacctaaattaaaaaaaaaataaataaataaataaaaaaaaccctaaagaaataatatataaataaaagaaaacaaaatatataaaaaaaatatatatatcagccggcgg

SEQ ID NO: 132333 - DNA, 733 bp, Cannabis sativa
  modified_base (633)..(633): a, c, t, g, unknown or other
gatttagcgtgtcacttatcagttgcgaataatgtgatttaggggcttgtaattcatcgagcagcttttctactcaggttgcccggcacacttgaattgagaaacgaggtaagattagtataatgatatgcatatatgattacatgtttatcctacatgtttatgaatgcttgtaagttaacatattataatagtgatattagtgtacatagagatgctttgaatatcaaaagtatatgtttggctaagtactgattgatggtatcacatcggtatgactagcgtaccgagtatatgatgatattacggtcaataaaactgtcgtacgaacgttctacaattagtaccgtgtcaaacacagcgatagggttatggttgggaatatgggcgtttgattataatctaggttattgttatgttattgattatgcttttcttactgagtctgtcaactcacagatattgtttgcatgtgtaagtaagggcaaggcttaggttgaacagctgtgagagcgagcagatgaagattttacatgtcagggcagttaggtctagagcgtacgatcttcgggacagctgagcgtattttgtatagtcgctaggggacaacttttgtattatgcactacaaaanttttgtaaatattttgtaaaagggatcctaacttatatatagaagtatattgttatgatatttataaatagttaaataaagttttaattattcacaattt

SEQ ID NO: 132334 - DNA, 1555 bp, Cannabis sativa
acatgagtaaagcgtttgacagagtagccatacttgactgtcgaaatgaaataaatgggctttcatcaccaatggatttctttgattctcccgttgcttatcatctataaagttttcctttctgctgaatggggaagttgtggggaatgttcgcccaactagaggtttaagaaaaggagatcctttgtccccttacctctttttaatttcctttgaagaattttcaagattattaaagcatgaggaaatttccaaaaacttgaacagactaaagctcacaaggaatgctccatccatttcccatcttcttttcatggatgacaacctattattttgtcaaaaaactaataattcagccatgtccattcaaaaagtacttggcatgtatgactgtcctcagtaatgctcttttcccctattacaccaaaaagtgccaaaaattgtttgcataacaccttagggatgccaatctatgactgtcatcaaacataccttagttttccatcatactctggacgagacaaaaaagaaatgttaagtgacattaaagaacgagtttggaatttgttgcatggttggaacgaaaaattattttcaataagagaaaaggaagttttgtttaaggcagtgatacaatcaattcctacatatgctatgagttgcttccgccttactaaaaaattttgtgatcaattagaatcaatgatggtaaactcttggtggcgttcaaataagatgggtcaaagatacattggaaaagttagaaattactatgcaaatccaaatttcaaggaggtatgggatttaggtcttttgtccactttaatcaagcacttcttgcaaaataagcttggtgtatctttgaaatccctaattccttgctgattcgattattgaagcataagtatttttttttccaacaataacttcttagatgcaaatttgggacattctccatcgttaacatggcaaggcatctgttgggggagagagttgttaatcaaaggacttcgatacaaaatttgtaatgcccaacttttaagacttgctaattaaaaaatatttcagctatagtataattatataacctcgtaaatcgagatcccaagtttaaattcattattgaaaatacaaatactatatataaagttacacactattttttttacaaactacaaggaaactacaaaatacaactcaaaatgttgaaagaccgaaaccctccaggttgcactggcgcgacatgtacaatcattgccaagctccacctcactactcctccagcttaactttacccttacctacagagggtagcaaacttatgagtcaacaaactcagtaagatatgcattacatatatataaataatgcaacaccagctttatgcttaagccatcctgagtccatttactaggttcaccaaatggttaagaatgttctcaacgaaagtatgactacagtaccatatgcactagagtaccaactttgtacttgtgttggtagggccattattgtacttccaagagttacagacgtaccccctggtactcgtgtt

SEQ ID NO: 132335 - DNA, 890 bp, Cannabis sativa
atatatatagttagatgcatcctcatgcatttgcttataaatggatacatgaatatacatggagaagaaaaaagatgaaggaactccaatattatttgagtttttatttttatggtaaaaatttataaaatatgatttttttttttttttaaaaaaaaaaagttatttcatgaaaaaaaaatttaaaatatatacataaaaaaaaaatagtcctcgttatcttaaggaggtatctagttatctagttagcctaaaacgtcactagttacactaaattatttttctcatattttttaactttttttgcaaaaacttttaccatattattttattggtataaaagccatatttttacacattatataaacttcattcatttccacacattatttttcatatctatctaatttttgttagaaaattataataaatgacccaaaaatacattattatgtaagtaaatatctttattttaaaatttacagaaaaatgctcttttcacattctttattacttaaattatcttttgtcacataaaatttgtatggttctaactttttaattatatattaaatttatatttttttaaaaatatttagaagcatatcacttagatatcatgatatatctatattagttttcttaaaattatttttgtattaaagttatgttttttttttttatggattattgtgggttattagtatacatattttatacaatataattttttttattgatctcgtgtctggtcaacgatgcaaagtcaataatacgacgatatcggtgtttgaattattaaaatatgaaagagcaataaatgacacaaaattttatagaggttcgacccctgagtcggtaatggcctactcccatttttattgtatttg

SEQ ID NO: 132336 - DNA, 697 bp, Cannabis sativa
  modified_base (665)..(672): a, c, t, g, unknown or other
gatctaatattattttgttaattgatttcttttagggcatttttatccaagtttttgttaaaataaaaaatgcgatgtatgccaatgggataaaaactcttataaaaagcgagattaaaagtgaaaacgtatattacaaaaaattatatcaaacaagttgtgaatgtttataaactcaacaaataattttctatctttacaaaaatttctctacaatttgataaaatagaaacaaaaacttgttcataaaaaaaataagcataaaaccaaatctgaaattaaagaatgtccaatattacaatatcactattacaaataatttaggaaacaaaatatatattttatcacaaaaccccaaatttaaacaagaaaaaaaacattgctagacaaacccaaagtcccaaatgcttcttcggccataaactgtgaagctccttccaccacgaatcgtgaagctcaatttaccacgaacccagaaccttcatccaccatgaactcataagcttgtcgcacgaaccttcatccacctgagaaaaggaagaaggggagagatcaacacatttcggaaagaagaaaaaagatacctgaagtataattggacctcgaggttgttggaaatattttaccaggatctagattttctaacatcctaatatgaattctannnnnnnnaaataaacacataagggtttaagga

SEQ ID NO: 132337 - DNA, 1101 bp, Cannabis sativa
taaataagtgatgaaaattcttctatctttttattgatatttaaatgatagagattagattgaaatagagttttatttagggcataaatcccaacattgataacttcataatttcaattaaagtgtgagacatgaattgatagagcattgaaatagctacaaaatgcaagttgaattgtgtcaagcggatcaatattgagtgagttatgatcgttttaatgaaggttgttctaggcttagcgttcaagttgacatccagtgcccaagttgacatctcatcacccaatttgacatattacgtcaacctggatgttgggtgagcaagaaacgtcttggggatgtatttttttgatgcctaagtgatattttgacatcacttacttcgtttctgtgttttggtgaaactagtcaccaattctcaaagatgctgctattttgtgaaaatgggagactcgaaacttctcatttctgagtagtttttcatgttggaaatgagaaatgcgaagttctaaatttgaattttataacttcatggatcttagttactgtgaaaaactagatggacggtcaagacagaatcaaaattagataagcagaacccagcgcaccaggccatttgtcaacttgggagtcgggtgttgaatttggagcttttgggaaatttttttgatacttccaaggttcaatagcttgatgacgaggtcttctaccccattttttgacgattctggagagaatgcttggatcaaatttggcatttcaatgatcaaaaccagtgctctaggttgattgtcaccatgtcgcttggctctgttttcaggccctcaggtttgtggttttctccctgagtttgcttgaatcttcattctttctaatgatgcaaaaaattccaagattttttttcgagaacctgattaaaaacagcccaagttgacaatatgtcaacctgggcgctgggcccagtgccaggtgttaacctggtagctggtgttgggattttatgccctaaataaaacccatttcaatttaatttgatttgttatcaattgaagattagaagtcatttatgtttacatctagttttcatgtttatggtttaat

SEQ ID NO: 132338 - DNA, 602 bp, Cannabis sativa
ggtttcactccttgattttttgggttgttttttccaccacccactctcggtcgtcctccttgtcgattgaagattgacctctgggcacctcgctccccttgaggaggaagtggtgtactctggccgaccaagagtactcttattgatggctggtcagccaatagctgcacagtggggggtgttgttgagccaaagttccatggccaatcccccatgacatcggttaccaggatctggctatttttttcatttgacctttgaggaaaggtctgtcctttcctcaagcaagggaagatccgtcctagttcccgtggaattggtttgatcagcgtgctgacaggccctccctgatctatcgacaagccttccttgaagtggatctctctctgaggagatcctagcctctttctttcttttatcagtcagttcttctctggttgaaccgtcttattagatcactgacctctcggttgcagcgatctaactttgctcagtgagatcgaaggatgtactcttgatcatccatccatctcaagaattcacatctctattgagcaaaaacatcgcaatcagtagtgcgtggtgttggaattattttacca

SEQ ID NO: 132339 - DNA, 848 bp, Cannabis sativa
ttacataaaaatattgcataaaatacaatttaatataatactatacaatacaatatggtataatacggcgtaccaaacgaaccctaaaagtctactttatatatttacctcaaacttttacattataccatacattagtttttatattttttttctatttattatttaaatattattttttttttgataatttttgttaattttataaaaataattcataaaatattacacatttatagaaaagttaagaaaataatactaaaataggtttagctcaataatcaattatctctacatttagatttagctaagcactattcattgagcctaaaaaatatgtaaaataactaaagtttagttcacttgttgtaaactcaattttgtaatcttttttctataattaaagattgggttgttttaactcatctatgggaagtgctctaagttgaataagaactttttatgttcggttcgattttgacttattatatcattgatgtgaaaaaaattagaatgattttttttgttcggtcaatcaaggtctcaagaggtagatgagggatacatatttacaaatttttttgataatatttggtgtgaggaccgagatcgtatcaaattctattagcaagttgaagcttttggaatatcttaatctttctgaaaatgaggtaattacagagattgagaccctcgtcttgtttccagttcaacaaattgtaggaaaatttacgacattttgagattgatgggtgtaatagcttgaccaaatattctttttatcacaacttgtagcgagtgaaggctccttcatacccgatgtggtagagaaaaattgcaagaattgg

SEQ ID NO: 132340 - DNA, 943 bp, Cannabis sativa
cggacccccactgattgtttctctatttaaatcctcacaccccctgtaccactattttttccctttcatttttttttctaatttttgttttcccatttctttcctctctgaaaaattcgaaggagaggtcccgtctaccccactgcgccagtgacgcgtctctgccttcgcctgtgtctttgcctccaactgtgtcttcgcctccacctccggtccctcactaaaaatgtatgtgttttatgtgtttatatatacaaatatatatactataatataattttttgaaatgtttagaaattttagaaatatttttgttctgtttttaatgtaattacaaatttttatttgtgtaaagtatgtttttttttagttctgtataaattgtagttaatattttgattaatatttattataattgtgatataaatctgaaaaatttgagtaaaatattgttcgtttataaatctgaaatgtattatatataaatatatatgtttatatataatataaatataatttatcttgttaaatatttctaatagttggattattgtttgaaattaattgttattgtatttttattttagttatttagtataatgttacgttgttttagttatgattatttgtctgattaaaataacttcaattttgtatttagtaagattttagtaaaaaaaaaattaaaaagtttagtttaaaatttttaattataaataaataaaattaaatgaatatttagtataattattcttaattaacaggtaaaattttttaataaagtaatataattataaaattaatataatttattaaaataagagtttttgaaaagaaaaattttgcatttaaatattttaagaatttcgggttattttgtcattatttttaaaatgtgtgattatttataaaaagaaaaagtaaatttttttaaaaaaattat

SEQ ID NO: 132341 - DNA, 665 bp, Cannabis sativa
caagcctctctttaaatttactttcatcaaattttataactttgcaatttagtatcaactacactgataaaaccaaaaagcaaatacttatatggctatatgtataattatttagtaattttattatcaaacataaccaccaaattagcgagcttgttcaattttttgcataattatttagtcattttattatcatattcatcttaatatattgacaaatttacgtgcttcacgctcagttttacataatcatcctacttttcgcttatttaattgtaaattgacgagcgagtgctaattttttcggcataagtatttagtaagttttctaagatatttgaaatgcgtaactcaagactcattttcacatgataaaatagcgagttcatggtaagctcgtgatagtgctcattatttataatacactagtacatcgcatatacagccaatgtctcattaaggcgatttatgtgaagatgcctcggtccaaacgggtagtacataccccaaaaagttctgctatagaagcattttgaagaaaaaaaataatgaccaacagtcattatgaaaacctcaataaggtaaaactaaagatcacctgcaatgtgacagatcaaatgtccctcaagaaaagttcaacgattagacaacaacatgtcatcgca

SEQ ID NO: 132342 - DNA, 635 bp, Cannabis sativa
tatttaatttttaaattaaaaaattatttatttattattattaattaaatttgaaaatatttttttttatttttttttaaaaaaatagagattcaagtcgaataaagttggaagtgaatttttattttttttgtgatcttaatatcacgcccatcaatggtaaactagaaaagtttttctactacaataatattggactagaaaaatacgtttttatgtccctggatataatgtccaacacaaaatagaatagtaaactttatctagtccaactttgatggacttaaaatggagtttttgtagtagtgagtttttgccttctctgggtttgaggcagggtgaccctctcttgccctatctttttatcctgggaagcgaagtcctttctcgtttgcttttcaaagcagaagctaatgggttagtacatggatacaagatttatcttcaatgccccgctatctctcatttaatgtatgcgcatgacgcctttgtcttttgtatagggccaacagtgaggaagtggattgggtccaagattgccttgatatgtattgtatgtggtctggccaagtcattaatgtgaccgaatcggtcttggttttttctaaaaatgtccatgtcatgattgttgataa

SEQ ID NO: 132343 - DNA, 814 bp, Cannabis sativa
ttccgccgctccttctccttcctctccacttctatctttgtccagctgcccaatgatttttttctcgcaacgaatgaccaacggagtttagatttgacctccacaccattcgaagcatttaggtatcgttccatcacgtcctttatttttatttttttggaaaaaccaattttgttcttcgtttattctagatctctatcattctctcttttctttggtagaccgaggttgaaggtccgtggcagtttgtttatcatggtgcttcttagtttgtggcgttgacgacatttgtggtgattgtcgatggtggtttttggttgttgagtatttgtggtttttattgtagtgattattctaggttttattatactgatttgtatttgctacaaaaaaaattgtaaagtaacagatttttatatctgaaaaacatatgcatgaatattgtaaaacagtggattgataataaaattttaggtctaattatttttctttatattttttttattttattttatgttttgacatttaatcccatttttacataaaaacaaggataaaaagatattttttatcctggtttttataagactttttgtttcactggcatataccccaattttattttagcaaagaaaatacccttaaaaattgggataaaagtctatttttgtagtagggttttgtgctgacattttgttgtattgtagttttatttttccagatacaatttgtgataaatttttagttgtttttgtgtgtgtctatatttttgtgtttttcttatatagttttttgaatggatacaatttgaggt

SEQ ID NO: 132344 - DNA, 748 bp, Cannabis sativa
ttttttttttttttttgcctaagttgataaaaaaggaagattgaagttacttgtaattattttgtttgattggagagttcttaattcctaattaaaaatttccggccatcaagaataccaagaaaaaaaaaatataggaattattttagagatatgcaaaaaaaaaattaaaaatttaagtttttatgaaattttgagtttttttttacatctttatggattttttaatacagactattgtttacacgttgttctaaaaaatattattgtttacttgtcgttttcacgttacataaatatagtataacattatgatattataaaaaactttgaaataacacaaattcgttaaaatgtaaataaaacagaaattcgtaaaaatatatataaaaaaaaatctacttttaggtgtattgtgtaaatttttaaaaaatatatgcatgaatatttcatgaattatttatataaagttgattaattattctttgatgaatttcaaactagtcaattatctcttaggcaattacaagattttaatttggtaaaagagaatatttaagatgtatttggaagtaattgtgtaattaatagggtagtccttaagtacattgagggtcggccttgaattttagtggcccgtaggaaaaaaaattgggcctttattcaaaaggatgtggtatttttaaaatcaatataaaaaaatatgtgtatttttaaaagagaattttttgggccctaggcacaggcc

SEQ ID NO: 132345 - DNA, 544 bp, Cannabis sativa
gatgaattgtctttcttatcttgtcattgctttaatatatatataaaatctatgctaaggtataccttaaagtgctaagtaaagatgatatttggtttttagtgtaatttaatattaagttctacacattttcatttaataaattaataatattaaaaatcgctaactactcacaacgcgacaaatcaatataaggcattttaaaatgctcaataacaatactctaattaaatttaatcacatgtaatgtattacactatgcataagtagaaatgttaaaatgtaccattaatagaacttaacaaccttctcaatattatattattatttgcgtaattaagtattgagtttaatataacattttttttttttttgaaaggagtctaatataacttaaaataataattttttgaaaatatcgctaaccccacttataaataatactaggcaatatcaatacttatgcataaaacatgtttttaaatatagaaagttttaacaaaaatcaatacaaatgattcttctccttatatcctataatgat

SEQ ID NO: 132346 - DNA, 932 bp, Cannabis sativa
  modified_base (350)..(352): a, c, t, g, unknown or other
gttacatagccacattttaaatataatagatacataaaaaatgaaactactaacaaaccgaaaatacctttacaactttctccttagaaaatttcttcttgtacaagccaagagaaaaaaagaatgagagaagtgagagtcgatgtttagctcaaacggtacatttgaggagaaatttcaatggagaagatctacttgtgattgtagtgtgggatgttcattaaaccgttcaaaccgcccgcaccgcaaaacaaaatgcagtttaaaattctttgcagtgcggtcgcagtttaaattttttctaagccatgcagtgcggtgcaatttacagttttgaattgttaatatgnnnttcaaaccgcaccgcaccgcacattatataaataccaatttttatatttatttaggtcaaatatgtgaatgtcaaacccaaagtccactaattattgtattattgaaacataattttttttttcatatttattttcaagccttatgaaatttttgataagtgtttctcaagtttcgttgtatttgtgatagtttaattattagtgatagtccaaatcgcaaaaaccgcatcgtaccattttttgcggtgcggcttccgcagttttttaatttcacggtgcggatgcggtttgggaaattataaaaaatgcatgtgcgggttaatttgaaaaaaatggtcaaaaaccgcaccacccgcactgtaaacaaccctaattgtgatggatggaataggagatagatggagatgatgacacatttatttggggaagacatgtcagcttgcactcatttatggggatcctatttggagttctttaatcttcaatacgtataaaggaataattgcctttcattcaaaagttaaagagatgagagagagagagagtttgtaacgccctaatgctaaggcacgctacagt

SEQ ID NO: 132347 - DNA, 604 bp, Cannabis sativa
taacatttgtatactatttgataacaaaattattaattgaatcatggaagttggtattggaaacaagttgtggtagcaaaagaaactctcaaaaagcttactggtacacaacaatttgcacagaacatgtaccaaattgctgaaggatacaacctgctttgtccaattcaaaacagggttcattggtgtgatgaagtgtgggggaggttcaatatccccaagcacagttttatactgtggctagctgtgcaaaaagactcaaaacaaaggaccggcttctgaaatttcgaatcatttcagatgcagattgctcgatctgtttgcagcaagaagagtcaatcaaacacctatttttcaggtgttactatgcacaatgctgtgtggagaaaatcaaagagtggttgtcatggagaacacaatcttatgatctacatcagctcctcaagtggattcataaaagcaaaatcagcaagtttaataagaaggtattggcggctgccattgctcacttggtatactcgatttggtttgtaaggaatgataatttgtggaacaaacacatagaaaacaaagatgtaactgtacaaagaattaagaatagtgt

SEQ ID NO: 132348 - DNA, 820 bp, Cannabis sativa
acttctagttttttcttttgttttgttagctggatgatcaagataatccactaacttgctttaagggtgtccaattatttgaccaataatacttatgatttgaaattcttaatcgaggattggagtacagtatacatgttgggtctattttttttgaatgaatattcataagctttattaaacttcaatctctgctaccaaacatgatagcaattcagttgagatattcctcatactaaaagtacattcacaatataaattagaaactcgaacaaaagcatgagccaccacatttgctgaacgcttaacaaaatgaaaagaaacatttcttagctctgcgagcaacactttacactccttaataatcaaaccaaataaagaaagcatttcaaaagaatttcgcaacgcttgcacaacgatgaaacaatctgtctccactacaacttggtttcatccctggtttttaatccaacttaaagcttctctgaagctaattgcttcagctatctcaggtcaaaccacaccattatagctctttgtaactccttccaagaaaaagccgtgatcatcccttgcaaccatcccaataccgtagccttgactaactccgaatatagatgcatccacatttaccttgatatgatttctttgaggcatacaccatctctcaacaccatcaccagcaactaggtcggtttagatttgagtttggtatttgtttttaaggtaaattgcggcataaatacctaatgttttcgattttatacacttaaatacctaatgtttatttttggagtatttttggagacaaaaataccta

SEQ ID NO: 132349 - DNA, 650 bp, Cannabis sativa
caattgcatatgattgatctgtccatgtctaataaggttccgtttcttctctctgcaataccattttggtgaggtgttccaggtgctgtgagttgggacaatatccattcttccaacgaatagtgtttgaatttgaatccaaatactctccaccacgatctgatcaaagtgtctttgatgatttacctaattacttttcagccatagccttcaagtcttttaactttccaaaagtttcagacttcttggccattaggtaagtatgatcacatctaggataatcctcaataaaagtgacaaagtattcataaccaccttaagcttgaatattaataggtccacacacattagtgtatattagctcaagtttttctttggctctattgcattttgtagaaaaaggtctttttgccatcttgcctcttagacaagattggcatactggaagagttccaacttttagttctctcaaaggacaatcctttattaactggtttatactgtctaggtgaatatggcctaaacgtaaatgctatagatacgtttcatcatcattagaaaccattttgtctcttttgctgttgaggcaatgttactcgaaataaaaaacaaagaataagaaattttattgctccaaaccaacctttaca

SEQ ID NO: 132350 - DNA, 730 bp, Cannabis sativa
taaatgtgttgcctaaaatccatgtatgcggtaattagattattgtgattgctgtatgacctacctgaattatgggttcataggtcaagtcctataatatggatgcccagcaaaacacaaggagttggactaatgtggttgagactagtggcagtcggggaggttagaatcctcaaaatctctatggacgcagcaagggccatggcatgttttaaggaagtggttatgaaaatccaccataggctccttaagattgggagctaaggtttacagaaatgcaagcctgaattaatcaataagataaaaagatccagacgttgagacagcagggtcctcctgctatgcctcctcagcaagtgtcagctgctttagtcctagtggtgccagcagaacaacctgttgctggtaaccgcatgaaacccttgtatgaaagattctacaagcaagagcctccaacctttctagaaggtcctaatatcatgaaggttgaatagtggctgacagtaattaaaaggatctttagttttatgggtgtcaccagaaatgactaggtgatctgtgcaacgtttcatttccaggaggacacactcgtgtgttgggaaatggtatccctcacttgggatgtcactacgatgacctaggaggagttttgagatatgcttaatgctaaatactacaatgaggcagtccgcagtgcaaagcggaaagagtttgttgagttggtacaagg

SEQ ID NO: 132351 - DNA, 1343 bp, Cannabis sativa
tattttgctcttggtgaaaagcttgacacatttgttcttgtcataaaaattgttagagttcttctagacagatttgacactaaactcttggctatagaggaagccaaagattttaggaagatgaaggtggaggagttaatgggttctttgcatacttctgaattgaattagcaaattaagtagaaggacaaacccaagtccattgctgatagaggtaatggtattgcttttgatgatactgaaaaagaaatttcacataatggagaagatgatgagatggatgttttaactaaaaaatttcaaaaataaatgaaaaagaaaaagtgacaaaaagaatttttcaaaattctctaaaggtaatactttttcaaaaccttcaatgactaacaattaaaagagaattcaatgcagagaatgtgaaggctttggccacattcaatctgaatgtgcaaagacattgaaaaggaacaaaaaggtttataatgttacttggtgtaatgacgattcaaaaagtagtgagaatgatttagaaaatattgctttaacttgtgttgttcctaacatcttttgtgattcacaggtaaatgaaagaatggtatgtttgaataattccattaaggaagaatccgattctaatgaatttcaaatccgtgatgagttcctgacttagtcttataaggttatgtatgaaaagtggatacatgttacttctgaaaatagatcaatgtcaaaaataaataaataattgtctcatcaaattgaatttcttgaattgaaaattaaagaatatgagattgatttttggttaaaagatgaggaaattattttattaaagaaggaacttgaacatttcaaggaaaatgttcaaatgcttaaccctggatcttcaatttttgaggaaattcagaatgcaggtcaaagaggcttggttggtcttggatcaaaggacactgaaagttctgaaaaagtaaaatttgtaaaatttagtgtaacaatgaatttacctgctactgcaaattcaaggtctgttgtttcaaaggtgtcatttgcagcaacaaaatctttagaaagcacaagaagagtaagttctcaggtaagaaggtttattcctatttgtaatttctgtggcattaagggacatatccgacctagcattttcaccatgcaaaatttgttcaaattaaaatatttcggtattttgaaatttttttaaaacaaacataatgctccaaaacaaaagtggattgaaaaaagaaaatatcttgcttgattttttgataaaagtgttgcgtctcaaatatagtatcttgacagtggttgttctagacatatgacaggtgaca

SEQ ID NO: 132352 - DNA, 922 bp, Cannabis sativa
acgacagtctagcaaccacggcgtccccatgataaaacagtctctgtatacttacgatatgttctgcaccgaactatatcgctctgttacaccctaaactttgctctgagaaggaagaaagaaacgatttttttaatgttggaaaagatgtattcttacattgtttatcgttcgtggaggagttggattgtgggagtaaaaagcggattattgactgatcgcgttttactacttctgacccaacccaatcctgctcggattggtcggtcagcagcggcggcggcggtgcgcgcacgtatggtggtccagtgtgtgagtcctcacccatgcgcacaaaactgggtaccccttggggcccaaacccatatcttaaacttgcgctagttatacacttcaaataaattatttctatcccatgtgggactcctactcacacacttcacttttctatttttacataatttcataaaaagttccaacacaaacggtacaagattatctaccttctggattctacaaggccttcctcacaaggcttttaggatttacactaaacttttggtatcttctttccgcattaacaatttctatcccgaatgacaaaacttgtaaccataaataactatagcaaaaaacttttatgagtatgtttattgaaaagaaaatctatttttctttaatatataaaattaaaaactttttttcagatagataaaattagtaattcaatcattggtaatcacaatattttgcaccccacataggtatggtctggtttgcggttagaaaatataaaattaattacacggttaaaagttttacttatcaggttgaattatttatcaattcactacataaacgtttatatattatattattaaataatataggggtattatctcatatactattttttaacttt

SEQ ID NO: 132353 - DNA, 651 bp, Cannabis sativa
gaaaatgcctcaacagaaacttaccatatcgtatttgatcatggtcgctttcttcctcactgggaaggacaagttttcggtgtaatgcccgcggtaagaatatgttataacaagccttatgtattttggataaatttttatgtacatttttttccattaaaatgattaataactgtttgatcaattcaactattattataatgattattttagaaggatataggattcttaatctcatgagatgaattttgaaacccacgatgaagttttgataaaattacattttttattgtattttttatgtacatttattttggacattctttccaacaatgctttacaaaatgatgatcttcatgtaagttgaatgtgtttacaattttgcacattaacactagaaaaagagaattattctcaatgatttctctcatatccaaccttaactaaactaaattttgtattttttcgcagccaaaaaatcctttcatagttggaaactcctcacaacttagatacttgactagtgcttcttctagtggagatctttttaatggtagaacgacaagcttatgtgtaagtctttcggttggtagcactagtgaagttttaatcaaatcaaagcccggagataaaattcaactcacaggtaat

SEQ ID NO: 132354 - DNA, 507 bp, Cannabis sativa
aaaccctcagatcaaataactcctgcatataacggctgtcgtacatcacggaatacattccgtaaaagtaattacgagacaaaatcgtgtcccagaatatatatagatagataatattatctgatgatatatcatacatcaagccagcactaacttcatgtactgcattatatttagccacaaatatttatatatatatatatttatatatatatgataaatgacacatctactactactaactactaagttcataatatgtgaaaaacgttttcacaaccgacagaaagattttatttttaaattgagtggagttagctggctaggtactacctttacagaacacccaatactttatgctacatgaaacaagccactataatttatcaaaaaaatacaagctattttaaatgtttttataatttttttgattttatttacagaaaataagatttttttatattgtattcttattaatttatggttgattttttgttatctgtatat

SEQ ID NO: 132355 - DNA, 1032 bp, Cannabis sativa
tcgtccatctatttcttgaactggttgcactccttttttgcatgtcccttttgtttacaaaagaaacatttgatggaatttgttaggctatttttagtctaactttcaggtcaatttcagagtgctttctttgttaatgttatcttttggaatggttttacgcttgatttctcttgtttcatgttaccgaggtattagagttcaaattctaccaattggtgaaggatggggcaaattggagaaaaatctgctgaagctggcaatttgctatagtagtcgcgaccaccacaatccatagttgcgacaaattatgtggtcgcgactataaggctgggcagaaagcctattttttgaggtttgcctatggtcgtgactaaactttaggaagtcgcgactatgggctaaatataggatttttgggcagttttggaatttcgccattcgaagatatcaacattaattactatataaaggtctcgtattttagaaggaagatactcaataattgaaccctaaaactaaataaggcagcaaaggaagcaattgtggcgacccggagcgagatcaccaactagttcttccttttccctttttttatttctttatgttaatttttgtttcaagaattattaaggatgtgaacatgagttttatgaactaaattcccgatttagggatatgatgaatgttagatgatgtttcttcaatttagttaatgtgattattagtttttcttccctatattgtgtgatttgttcttattagttttaattacatattttagacttgccattttaaaagtgatttatgatcctaatatgaaatctgagaagtgaatattaggaatgctctaataggacaaacataagttttaatgtaaaacgagagtatttgttggggattattttaccaagatctagatttaaatatgaatcttctaaaacaatggatttaaacatatataaagttaagaatttgattgcaacaaaataatatgtctccttccactcagatctctaacagatcggaaga

SEQ ID NO: 132356 - DNA, 2027 bp, Cannabis sativa
ctagagtacgactagtgtatcgagtataggctgatattatggtcagtagtactatcgtacgaacgttctaaactcaacaccgtgttggacacggcgataggattatggttgagtgtatgggcgcctgattataatccgggttattgctatgttattgtttatgctattcttactgagtctgtcgactcacagatattatttggatgtgtaagtaagcgcaaggctaaggttgatcagccgtgagagcgagcaaatggagattgtacatatcggggcggttaggcctagagcgtacgatctttggaacagcagggcttattttgtatagtcgctaggcgacaaacttttgtaacttgtattatgagacggttgtaaatattttgtaaaatgggatcccagattattataagtatattattttagtgttaataattaaataagtaaaattttaataaataacgattttcaataaactcgttgattagaaatgaacagcacagttaagttaaaaatcactttaacatgcctaatctagtagggtgttacaatttggtatcagagccgcccagttatcttttgaagatcatcacgacatgtacaatcatcatcagcgatcagctcgtctcacagttcagtaagcctttattgctttagtagtttatttttatagtatgatttaagtaaatcctgataggaagcatgttagtagcctaatagctgaataggcgcatgtttttaatttccaaaataagcggtaactagcaagttattcttgatcgtgatctgactagactagctcttggttacgcaagttgttctagtactatggacgctaggcgaaataaaaggattcagggtaactcggtcggatgcagtggtagtgagggagttcagattcgcccaaatgttcctggccgaggcacatgccctagaggcagggcacgtggtcggggtgatgttagccagtcgtaggctgcccaagctggctaggaatgggaaaattgatttgtcgaaatgtaagccagaattaatgagcaagatgaagaaatcagatgcttgagacagcagggtacccctacgatccttgctccagaaatgcaggtagctcctgcccctgctgtggaggcaggacctgttgttgcagtgaacagtatggaaccactgtatgaaagaagctacaagtaggcacctccagtctttctgggaggtcctgatgtaatgatagtcgagcagtggctgactgttattactagaatcctgaacttcaggggcgtcaccggtaatgacagagtggcctgtgccacattctagtttcaagaagaggctctagtttggtgggacatggtgttcctgacttgtaatgttaccactattacctgggaaaagttccaagacgcaaagtactataatgaagcagtcagaagtagaaaggaatttactcagctgaccgagaaagaaaatgtgagtgttactgaatgcataactcatttcgattgattggcaagattggcctcgggaatagtgcaaccaatttcaataagaaagaaaaatacttggatggattgaattcgaagataagacatgaccttatgatcaccactgatgacaacaccacctatgttgatatggtggggaaggcactacgagctgagggcgcagtggagtgcactaaggagtcccaaaggactcaggttgttggtggggcctttactcctcctacccctagttatggtcggggtgggagtggctcgaccacttattagaaaagaagggaaccaactgcatccagtggctcaggtcaaaacaagaggttccgagggaaccaaggtcaagaaaaccatcagggtggtttcgaaacccgatacacttacccagaatgccccaattgtaaaaagcatactcggcgagagtgtagagggcaagagtgcttccagtgtggtttgtcagggcactataaaagagactgtccatagcttaagaaagaagaacaaaagacaacaacaaaacctgctccagctagggtgttt

SEQ ID NO: 132357 - DNA, 528 bp, Cannabis sativa
gagactcatttttctcggcgaggttgctgagcaacacccgccgtttcctcgttgtcggacatggaaggaacaactgcgaaatcagaatgagaggctcaagcctgtttcagcatgctacgaaccgacgaacccacttgacaactctgtcgagtgaaagaccgcttcctagtggttgaaggagcgataggagtgtcaaggttggatgatggaagattgatggacagtggccttgggggttcggggtacatgggagcctttcctttggaggtggaaggagtgacggtggaagacataatggggcgagaggggagtgggcagttaatagtggggtatgtagggcgttgcgaagtggtacatatagtggttggtatgaataaagtgggggaaggtacaactgtagtgtgagcagtggagtaagcagtagggagggtaggtgcagcagtacttgggacaatgaaatggtccatattttcctgaaggctgaagtgggtagtattggagagagagggttgttcctcgaaagggata

SEQ ID NO: 132358 - DNA, 736 bp, Cannabis sativa
cagtttgctgcctacttgtgttattccttgtggaatgctagaaacaaggtgtttcatagcggttctccgctgagaccgcaggacgttctgtccaattgtttgaagatggttaacagttttctgtctagcaggttgagaaactctttggaaggaatggaggcccatgttcttccctgtcaaccgcagctggtgccaaaggaattcaattttttctctgatgcggcggttcgtggtagctgggcgtatgtggcttttgtagtgttcaacaaggaaggagatttcgtggatgccatcactgccaaggcgtcagtttcttcgcctcttcatgccgagagcttagctctctgtcatgcattctctctgtgtctgaaactgaattgcaaggaggctgttttttatactgattgtttacaacttgctacggctgttaggacattttctatacctgtgtggaagctttctaatgtttttctgcatgttttttcttgccttaaactgaattctggtttgtgtatttcgtggctgcctcgtggtgccaatgcggtggctcacaatcttgctgcgtgggctgctgcaaacaatgtatcgcgtgtgtgttcggaaagggaagtagcaccctttgttgctactagtgcttagtttggttgtttcaataaatctctctgttgcataaaaaaacaaggacatttagttacatgctgaattaattataaacacttaaatcaaaaaaaaaaaa

SEQ ID NO: 132359 - DNA, 791 bp, Cannabis sativa
gaggcaaatggtgccaagtcactcccgaccctcagtaccaactatttgatgagctcctcgtagtctatcaccagtttggaaccctttgagcaagccctgttaggaattttagcctatttttgtgacttgatgaggaggtcctcctctgggccacttccacttgtttctctcagtgtccctttaagtaacggtcagcctcttgcacactttccaagatgtctgcacttatggcattaagcttcaaggaaaaactgatactttaggccaaaatgttaggaagggaagtataaagggttggctttttcacttgggtgtttggttgttggttgtttggttgtttttgttgttgttgagtttgaaacaattctatttggagttgtagtggtttttggttttgttggtttggttgttgtgcatctggttgattttgttgttgttgttggattggttgttgttgttgttgtttcgattggtttttgggaaaaggtcttttcttgcctcaagtctccatctccttaggaagagcgtttccttgcctccaccttggccttctttgttttccttttgggattagagatgatagagcgtttggaggtagcggctgccttgtcagggaacacatagcctaccccattttctttagataggatagtggcccccgtgcaactttggtcaagtgagggagcggtgttcctagaaggatcatgcattgggttaagctcagactattacagaggcggaaccccaaggatcaatccactactagaaagcgcccgactttgggatgcctc

SEQ ID NO: 132360 - DNA, 501 bp, Cannabis sativa
gaagagattgtacctgatccaaattattaagttattgtttatatatttgatatacccaataatattatacttgtcgagtataatattattaagttattgtttatatatttgatacctggagattgtatcaaatatattgttcttttcacccggcattaaatacgtggctcatcatttcgtactcgaattatattttggttattatcacaataagatttcatttcatgcatggtggtttctacaatcatatagtcatggtcatggtgtttggaggaacactccaatgaaattgggtaggccgagttttggcttcagtggtccaaccctattgttgtttatattcaacattgtcgttttccacgggtactatcattcaatgtcgttcttcttgtaggttgctatcatttattttcggtttagattatttgtgtcgtactctccatttgaatatcaggtatttttttactcatattaatttatatttattaatgtatttactgt

SEQ ID NO: 132361 - DNA, 742 bp, Cannabis sativa
aacccagatgtcatcaataacacccattctcaaggcttgccctttggatgcaatactggtactcaacataatttttctgatcttcagaccactaatccgaagcccctccttccccaaaccagcaactttactcctcctaccatatcttctcatcctcccaacaccttctcaactttccctacctataatcatacccctcaccatataaactcacacactacaagctccaccagtacacaatctcataacaactcaatccccaaccagttgatacattccctgccacctttcaccactcagaacaagaataaacaagtgattagccacacccctgtagtaactctaccatcgcctatcaacccaactgccaatacaacatctaccactgacctctcccacatctatatgcctgacttgcaaaataatacctttgctacttatccaccggtgctgaatccactttctcccaacaccactcttgccttcaccactctaaacccaccaattacccactgtccaacctactccactactgcaatgtctgttaccaaggagaaccagcctccaacaaccacctttaagcgacataatgactctttatctatgaggaagtttctaaagaggtgtcgtaatgctccagcttcatcatcttctccattgtcaagggaggatgatattgagacgttggtttccgattttgaggattctagcttctccaatgactctagtgcggaggttgcta

SEQ ID NO: 132362 - DNA, 807 bp, Cannabis sativa
  modified_base (86)..(111): a, c, t, g, unknown or other
acttgtgattaaaatatagtatttagttacaaattgtcactaatttagttttaatcacaataaatattgtgactaaaaacacattnnnnnnnnnnnnnnnnnnnnnnnnnngactaatacttttagccacaaaccctttagccacaacacaagaataataatttataattagccacaatttttttttttgtctttagtcacaaattttgttatgactaaaagtaaaattttttgtagtgataagaagagggagtgagaagagaaatcgaagagaatatggtgatcttcaaggtaagggtctcctctagtttgaagtcttgatcacaacattgaagacttgattcaaggagggtgatattgtaataatatttttcattaattagtggtggagaattccttggaaggattttaagagggattatataggctctctacatttgtagagagagaaagttgaatttcttcaaaattttggtgttcatcttttatttctacactttatatttttctattatttcaatttttcttgattaattgtttgttctaactttttggttgaagtttgttgttttaacccgaaaaatttaaagctggtcgatttattgtgtgctcaactaggcataacaatctatgaaattaaaggatcaagaaacggtttatcataaaatacgatattttgaaattgttgatgttgttagttaaaatttaaagttacgatctttgatcaattttttattaaatcttaaggaagagatcaatcaggttgtaaagatcttatgcaaattaaattgcattttgagtaaaata

SEQ ID NO: 132363 - DNA, 575 bp, Cannabis sativa
cttaactatgtggattgagaatttaaagttttgagttgggtttagactagggattgtgtaattttgtggctgtagaatgaaattgagtttggattatgttaataggtctgatttaaggtttttttgagcatattttaagtgattttaatgattgtttagtttgaatgtgtttaattaagtgatttgagtttaattttcatttgggtgtatgattttgagtaaatgattgagttgtgattaaatgatgcttgggataagttgtaattgttgtattgaactgttctggagttgtgtatcaggtttggtgaaggtttggttcgagtttggggaaaggaaccccaaatttcctggtctgccagaactggtcgatcggttggttctggtgtaccagaactggtcgactggttgtaagtaggggaaatttttgggatttcctcaggctttggtgttggctcaaggttgtacccagtatctattttaggttatttatgtgtggtattacatatttttggggtgttggagattaggccttatctgtttttggattagggtttattttcggggtattgatttag

SEQ ID NO: 132364 - DNA, 1410 bp, Cannabis sativa
  modified_base (322)..(324): a, c, t, g, unknown or other
aaaagaacttccctagttcaattgcttattttatcaatcttccaggagcatctggttttgataaaatgggttttgatgtccagggtcaatccccaacatactccactcccacaattgtctcaatatttagggtcaatccctgacagatgctggggttccaagtaaagtaatcctggttttagttgtttgtcttcaactgctactagttgacatccacctttccacatggcaatcacagggggttgatatctactcacatcgcaattcttttacacaattgttttatcgaagtaactgccctttgtattcttgtgacccgctnnntctcgagataaccaaagtgtcccttcttcttgcggaagagggatataatcttcagtcgctcgagttattgggcagatcaaactaatcataggcatcttcctgcccctttatatatagttgaagatgtccttgcgatataagaccttctatctcatctctcaactaacgacactcttccgtggtatgaccaatatcaccatgatattcacaccgcttatttggatccctcttgcgccttgcatgtttcataggtcttggctcgccaaaaacgacttcttgtacatgtgcgaggcagattttttcccaagtttcattgagctcggtatattcggcataaagagggctatatctgttgggcttcttatccttgagcagccttttggaatcgtcttttttctttgatcttgaggcctccgaatcaggttttccaacagcatcctgccacggttgtctcttgggtttcatgactcgataccctctgaacttattctctgactcgctcattcgcaaatggaatgaatccttttgccttgaactgagtcgttgacggaggtcaggcttcttcaggttcagatgttctcgtagatcactcttgtcatgattgtggtcaaaccttgcccttcctctcaaggtttgactcacctttttcttcctataaaggtttgcacgagtttcattctcatgagcttgaatagtgggttggcgattttcgttcgatgttccccgtatctctggccgtgtctctaggttttcttcagttcctttaggttgcatttcctgagggatctgagtatatttcttggttatcctctgccccctggtctgtgagccatgaggtttgccttgtgaatctcttttaccaaggtcacattgattttgggtaccatcttcccatgctacctttactgcagcaatttcacgctccaactcgacattatgctggttcactacctctaatcgatgcctaagatggcggttttctaactcctcgattggtatgtatctggttgggtcataaacgccatccacatcaacctggttagggagtgaccgattgttgctcatccaaggtccgtcaagccaggg

SEQ ID NO: 132365 - DNA, 636 bp, Cannabis sativa
aatacaaaaaaaattttgaaaagtgaaaaaatgaaaaaacccctaatatttataaataatttttacttttatatttaaatttactttataatattttaaaccattaattatttaattataatatttataaaaaaaaaatatacttttactttttctaaaataaattttttgaataataaattatttaaaaaattaataaattattagtccacattaataatcatatttttatttaaaatttaatttttttaatttaaaatttattaacaaaaataataattcattattaacaataatataattgtaaaaaaaataaaattaaaaaaaactcaaaaaataacatacttgtgtattagttcaattttgtttaattttttttaaaccagtatgtagtttaattatatacccaaatgattcatcagatgattttttttttctttttttatatatatatatatgattttttttactattttctatttgttcagtttttacaattcgcgtaaaattcaaataacaaaaaaatacaccaatacttccattgcatgtttagtattaagtaatggaaattaatggtaagagagtcattctcttacctttgtttacttaggtggcgtttagtaatatttttttaat

SEQ ID NO: 132366 - DNA, 516 bp, Cannabis sativa
tcttcgcaagtcgaacgagtatctgctggtgctagaggagcctacataattcaagcattccccatctttcaatgtaccatttatatcaccgataatgaccagggggagggggcaactgcaagtaaagtctcctaaaaccttccaaaaggcctccttatcaccataggtagggggccataagtgccaataagagcccacgggcagtcgggggggttcgaggcaatgataccaatgattttgtttttatcagccagttggatatgacagtcaacacccaatttccaacagaaacccaggcccccaaccgtacccaaaggaggaacatactcaacgccaggaaaatgaagtttcgtcattaagttaacaaaattaccttgagaaagtcttacttctgagaggattagaacttcgtgatttgacatccggactaggtccttcagttgtcgaactatcgcggcattcccgagcccacgacagttctaaaatagtgttttcattggtggctgggagactttt

SEQ ID NO: 132367 - DNA, 635 bp, Cannabis sativa
tcattttatataaaaactaatactaaattgctattgaatagtccacgaacaaattctctaattagataataaaaataagtgagaatacgattgagtagatatagaaaaagtacatatatgataaaatatattgtattgtgtggttaaaattatataccgtattttatgtattttaatttaaattaaaatattctcatatgaaaatatttatataatttttatttttaaatatataaaaaatattataaaattaattaaaaatattttgttaaataatgatatatattttggtaaagttaatagagaaaactaaataacatgttttcctttttcttttttcagtgtacttcttaagttttacttttataaaaacctctcttattatttagttagggtggatatatttttccatcaaaattggagagggtctaaaaataattttgatgactaatattcttggtagctattgacaaagttaaaaaaaaaaaaattaagaaaatattttcttttttttaagataaacacaagttagggtaaaaaatttttattcttattttatttttataagaacttttaagtcaatcaaaacttttttaaaagtgtcttattagttttgatgttttttttttttttgt

SEQ ID NO: 132368 - DNA, 641 bp, Cannabis sativa
agatcctggtaaaatatttttcaacagtaatttatatgcctggagatcagctaaaagggttctataaccacctcaacacagaaacgtgcaacataactttggagtggaagatgtgtgtaatgactgcttgattttattatggaaattagtagatatataagggtttatttaatcttttttcattatgtgcctcttagtagataattaggggttactttcaaaaatatgcctttaatttttattttctcaacttatggagatttatttaaattctaggtgtattgtgtatgttatatatgaaaatttacgtttttcatatttatgctcgataatagtagaatgcgatgatttggccaagtagagtcacctaggtgatgtatcttagaattagcaggaaatagttagacacttggaatgtcaggattaattggggttatgatttggaccattttactcctaagttattagattacttcttagtgaagtaaagggaaacgtagtctttcttgccttatgatttattatttggaggtaagtgaatttttttagtaaatcctttgattattttttttttattgtaagctgaataaaacaaagagttattgtggataaaaattagataccttctctctcttttgttc

SEQ ID NO: 132369 - DNA, 683 bp, Cannabis sativa
aaaaaaaaaattgttttgaagtataaaaataaaaaatatcctatatattttagtatttattattttttttttgaaggagtatttattattaattataataaaatatgaaaaaaaaatgcatggtttatttttttgacaaaataaacagaaaatctaaagtggtgtttaaattcataattgaaaaattattttttaaaaattagagtggagtgtttggccatttttttttaaaaagaaaatttgaaaatgtggtcatagacatggttctacgcttcttctcacaaagaggaggtcctaagttcaaatactccctccccatcataaaaaaaaaatcgaatataatttttatttttttgtctcatattatgttttacattttctctcacatattcaagtttgggttcgggattctagacccggacctgtgacctgtcatcgggaaaaggcccctgaacctggatttggattttggactcaagacccgacctcgacctcaaacctagatccgaattcggactcaacccctagacttcagaacaagatccaaatctagagcccagtctcgaaccggaattcggacctgaacttgaaaagtttaaaaagaatttttaacgacctgaaaagttcaaaatgcatgatttggtacatatcaaaatttagggggtaaaaatctaattagcctt

SEQ ID NO: 132370 - DNA, 563 bp, Cannabis sativa
tttaaaccaaaagttttcctactaaaagttaacatggcaacaccctaaactatcaaggaattaaccaaccaaagctctgaaactaacacaaatcgacaacacgaaaagtttggaaaccaagctgctgatccggttaaccagttaatcggttttacaccaagtaacctaaaaaatttgaaacctgaaccaatttgaatccaaagcttccagacctgcataataacccaagcaacagaacaacataacatgctcaaaatcaaaattcaccattaaagagcaaaacttcagttcttgaactcaaagctttctccaccaaaactagctcaattcaacataaataaccataatctaacttcagaatacatccacaaacaaaaactacagaaccctaaacccacaattcatgcaaaattctcaacttaaagcttaagaaaactaaatagagagattctaggaccttaccttgccttgagatcactaagaacttactgtaaattcctttgattgagcagcaaaactcccaaccatagcttggttgggttcgagagagagagagagagaga

SEQ ID NO: 132371 - DNA, 1022 bp, Cannabis sativa
ggctatttaataaatttttaaaaattacaaaacataatataaaagattaaaaaaatatttagcgggggtggtggtgggttgacgttttacgaataattaataattattttagacttattattagattaaactatgtgagacacaataattaattatattattaatgcatttagtagacatagttggcaaagtgatgttacaatttgtgcctaaaataaatagcgtcacgaatttaaaaattgtcactctacacatacaaattttaaaaataagtttaagggtaagtttggttgggatttgaaagaaatggaaagacaaaaataagaatgtgtaagaaaattcaaaaaaaaattatttgatttttttttatcttgtagtagaaagagtagttaccattccactaaaatgataaaaaaaaatcatttgattaatcaaaataatttataatactttaaaatgtaattaaataaattgattcttttgtatattttcaattgagcaaccactgcttatgatactaattttgttatttttaatttttatttttactctttaaattttttatttacaaaaatatatttttagtaaaataattaataaattatttttttagttgttttacactttatggatagttatattatagctgatgttatttttctaattattttttattattttatagttgatttatagttatctcgatgttaatttttcattgttttaaattttttgttgaacgaagtatatttttataatttaaaaattttttaaatgtatttttataattaaaaaatttagactgtaaaattacaaataaaatatataaaaaaaatttaaaaaatttcttggggtaagttgagaaataccacttttattaatcaattaatcaaatttacatctaattttatatttaattgaaacatacctcttttatatgcattatacctaacatatcctgacataaaagaatcacatagagagtatcttgaagtgataagagcaaaattagtacaatgttt

SEQ ID NO: 132372 - DNA, 915 bp, Cannabis sativa
  modified_base (140)..(142): a, c, t, g, unknown or other
aaacaacaataacatacatataacaaaaaatcaacaacaaattaacatgagtacaacataaaaagaccgtatttctttaaataaaattaaaaaaaaattataaaaatgtttaaaattctgtgaaaccgtatttttgtaannnttttgttgtttttgtgtatttgtgaaataatccctaaaattggaattctgaattcagtgagccctagacacaggcttgatttgttttagcccaagagtgtttagacaccccttaagacatgacatataattatttagatttaatatcgggtttcacgagtatacatatattttaatttgaattaagtacgtagaaatgtaatattgagaaataaaaaaaaacatatctatacaaattcgcaaaaaaaagggctactgaatcaacctaaggtatctaccttagccgattggtaagatttaatgtgagtacatactttaatttgaattaaatatgtaatacttagttacactaataataatatattatgtatatatcagataacaagagatgttaaattcttttaaattttacgaaaacaaataaaatatctactataattacaatatacaaagtcacatcaattttttaagttataatttcattaagaatatatagacatttccgacaaaattactataaaaattttcaatatagaattttcttttataattaatttatatatatatatatatatgcatagacatatctacatagagtccaaacaaagtttaagcctactttcaaatattagaagagattatataaaattagatatacaaacaatacataattattaaataatataattggtataagtatttgttcgttagttagtagatctgattttcaatttgatttctttcagctctatcttctatttttatttatatata

SEQ ID NO: 132373 - DNA, 573 bp, Cannabis sativa
agagagagagagagagagacataccttttatcgagagagagaaggaagccaacggaggaggcggacggccaaaggagatggacggacggccagaggagatggatggctagaggagatggacgacactggcaccgcatgaagaagataagggagagaaagagatcgggtgagaggcagtagagagagagagggtgtttgaaatttagggtttggaaaataatatgtatatatagtaggttttcttatgggtttttttttgggctttttttcaatcagctcaatagtctcagtctataaccgagaccaaagaaacttttagtgtcggttataaaatgagacttatactcattttgttagtattttttttcgtttagaatttttttaggtaataattcttttattaaatttaatttatttataattagattcaaaataattttacagtaatattttataatgttttatttacatttttttttattctttttaaattgttgaaacttttttttattattttttaactaaatataaatttcttctcttaaatataattttttagaatggaatttgatt

SEQ ID NO: 132374 - DNA, 732 bp, Cannabis sativa
ctgcaaaaccacgtaaaaaaaaacatgtgttcatatttttacttttatagctttatttttttttctgtgtgagattgtcacaattagcttatattaggttaacgaaaatctgcgttaacagaaagtgaccaagagacttgattgtatggtcacttgggggacactcatactgcataagctactaaacttgcctgtaagttgtccagtcatactttagcttgacaaagtaaatctggacccttacttgtgaaggccataagaatatagctaggattaaagatcgcctggttaatcactcaatccatgatgaaaaagcaacagggccaaatactagtattgttcaaaaatagagggcttatggccaaagatacaaacatgaaggccttggggtttaaaataaaataatgttctaaaaaggcttcatgccacataggacaagaaagcatgttctaaaaaggcctcaggccaaaaaggacatgaatgtaaagttccaaaaagttcacttgacacatggaacagaatagtaagtaatgttctaaagatgaaaggccacatgccttataaagccacaagctatgcagaacatgaacacattatctacgtgatacaaatataatattgaatactactaattaaaacactgtaacagcccgatttcccgagatgtcacataggatagtccgtataaaacattttaataagataaagacaatcaaatacttctttattgaa

SEQ ID NO: 132375 - DNA, 877 bp, Cannabis sativa
caactagggtttcagtttctgggattgtcttagtgaaaatgggtcaaactttgctctgggacatgaaatagacacatcacgaacatatttgaggtatcaaaaaataaattcagagaactttcatttttaagcacccggtgctcgggcacatagtgtccaggttgaaatttgtcaacctgggccacttccaagcaccaaattgaaaatccaactcgtgcatcttctttgttatcattaaatacatggaaacaagtgcttttagggaagagaagaccaatcaggggccaaaataagggaggagcacatttcgtcaacttgggccaatttcgaggagtattttcgtaaagtcttccgggaatattctctattttcatcaaagattaagattcaagtattttcagggagcaaatgaaattgtctaagggccttaaactggatccaacgcccaggttgacatattgtcaacttaggctgtttccaatcagttttctgaaaaagtattttggaaattttttctgccataaaaaataatgaagttacaagtaaatttgggggagaaaatgacaaatccaggggcttcaaaattaagctcagcgcccatgttaacctggtgcgttggttttgatcactctaatgcaaattctactttgagaatttcctttgagatggtaaaaattgaggtaagacaccacgtcctcaagttcaaaaaccttagaagtgtcgaaatggcatcccagaagctccaaaagaagctcccaatgcccatgttaacatatggcctggtgcactgggttctacttatctgattttgattctgtatcgaccgatagctatgaagtcagaagattcaaactcacaactttatattttcactttt

SEQ ID NO: 132376 - DNA, 1107 bp, Cannabis sativa
attctttataaactatattttttttataagtgataaaattataatttgaaaatattataaattattatttatcaaatgcatataaatttataatatgagaaaaaaaaattaaaaaattatagaaaataataaaaattaaaaactaaaatgtacatgattatattgaatcttaacaactcacaacactttaaaatataatttaacaaacagtcagcttagctttttctcacagttttgttataatttttttctcacagtacaactacagctgcttttccccacagcacaactggccaagctggccctaggtaatttttcatgcacaattcaaatttattacgtaataagtagagtaatttacggcataaatacttaagtttaatttttaggtaataatatctaagttgtaattctggaacatctgtaggtacctagctattaattgttaggtaaattaccatgtggcaatccttgattagtccaagtcattaaattttattaattttttaaaaaataattagtttaaatagaccaataagaaaataacacgtagataatgacttgacatttaacggccaggtacctacgaaaattccaaaaatataacttaggtccgccaaaaactaaactcaggtatttatttgtaaccgagagttaaacttagttatttatgctacaaataaccctaataaatataaggctcgtttcgtatgccttaatgtattgtattgtattgtattattatttaatacaatactatatgtttggtatggacttatattaatagattgtgtaaagttataatatatttttaaaaaacttgatcccaacaccgattacaggtcgggtctgggtctaggttcaggtttgagtctcattgggtctaggttctggatccgagtctagtctgcgttcgttccgagttcgagtcctaggttcgggtccaggtccaagtctgaatccagatccagatcccaagtacgagtcttggtctgggtctagatcccgagtacggttgcaagtccagatcctaagtacaggtccaggtctctaggtcataaattggggttgactctaaatcttttgtaaatattataatacaaacta

SEQ ID NO: 132377 - DNA, 733 bp, Cannabis sativa
taaggaggtcgaacttctataaaattttgtgtattctttactttttaaatttgattctgtaacatgtggtaaatatcagattcatacaatttcgttatcggttgatcacttttcgacataaacaatacatgtttaataatgcaactattgaacatttggaaaataacatattgtgaccccatgcagttatatattgttaataaatcgaatcaactattattaaactaatcaacaataactttaagtctcaaattagtattctaaagattcaaatataaaaatataactaacagtaatatataaataaacttaccataataaaattacgtgtcatgaaccatatatgaaatacttgtgaataacaccaaaagtttgagcagccggatcaggggataagtattattacaacaacattgccatattcataaaatagaactataagaccatttttaatagaagatatagaatttgatctatatttggcaccaaatataattttgtgatatttttacatcaatttttattatacattttcattggagatgcaaaaatataattcactttattaaaaatctactccaataatgtgctaaattatagtgcaaaaatctcacataatcaaaagcgatttaaatttaccttacaatatagcatgatacaaaatttgtatcacaataaatgttatgttttttatatttactattatacatattttattattaaaatttagtta

SEQ ID NO: 132378 - DNA, 871 bp, Cannabis sativa
cgtccatacacatatcattatcacttttttgcttcaatccaatagaaacatagccaagagttggagctttagtcgattgagtcgcttgtgacatactaggaggattactactagtactcaacatagcttgtgtttatttatgtcgtttccaagtcttcttatgttgggctttggcaatgcattcgtaactcttctttagtagtttgcaaacttccaattcagattgtccaatggccttttccttctcaaattttttattctatcaggcaccaatggcttagttactagatcagagattcaaactaactttccaccacaatttggagagtggtggaattcaaacttacctccactgcattggtaacttgcggtcgtggggaattcacagttgctgccattgacaaatcagtaatgtcagcttggattgaaggaaactcctttggtatgtcattagcttttgagttagccaagttattttcctaacatagttcctcatccctctcccttccttcaaatactaagcattaaaatttctctgcatatgttctttgtgctagtccgatgcattgtacagtataggtgccccccaactgaccatgcagacaagtcttttggtcacttgctattcaccaagtttcacaaactttgcccaagttctgtcttgcgagggtaccatagtatgcatgtggtactaaaagaataactttaaaaagttaatttgtgagctagtggttcttagacacaataaacataatataaatattgttattattcattaattggtctttgttgctgtggaacttatgtaaattgaatctacaagcctatattacataaaattagcttctagatgtcaagtggctaaccctgc

SEQ ID NO: 132379 - DNA, 1430 bp, Cannabis sativa
ttgcattgggttgctgcgtggttgcgcgatggttgcccaggaagcatggatcctaggttgaagatgtgtgtaagtggtatttgtgtaatttttcttatttgggcagtgtattcgtttatttggccaattgaaagtatttttataatattgatactatttttggttaaaactgaaaaaattccttatttatatggatgtcgaaattatccaaatcttttttattaattatataaggaaaatttgactatttatgcttacactatggggaaattaatcctatgaacatataacgcccaatatttgtagaataggccaacaaatatattgttctcaaaataccctccccatttcaatcaccctcctctttctgtatcaccaaaaaaacaaagttatctcctctcttctcttcatccgagcattcaaaaacccaccaaaaaaaaaaaaaatactacattctcttctcttcattcattctattcacttcttttcactacactacaagttacactacattcgagcactcattttttagacgaagcatcatacatgacttcaatgggtaattattttttgtttaatcttgttgatagttgttacatttagtttagaatgttgtttcgatggttgatctgtcgtttgttactattattttattgttttgtgtgatcaaatggttgccgtatttgaaaactatatttttccagggttctgcaatttttttttgtctagtccgatggggtctgatgttgcattgatggtagtctgatactttacttggtattaggataaggatgaaagctcgataggggtccgatatgggttttgggactttgattttgatgggcctgaatgggcccgattgtggcccgatggtgtggtccgatatgaatttggggtctttgatattgatgggcccgattgtggctcgatgatgtgatccgattgtggaattgacactctattttgtgatgggcccaatgggtgacgatagtgttcagatgttgtgtctgatgcattacagatttaaggcattttcaagaatttgtatcacttttctgttaatttttttttctaaattgttaatagtgtttttttaactgtgataggctcaactgtttttgctttcgtatgtataatgatatttgggagcttgagggaagagattgggtttataactgggccaaaaatttgacatttgagattgatacgaacgtaagctactcacgtttagttgatcttttgtacgaagaactcaatgttgacaaagtgcagtatgatttgaaattataagtggattacaagtacataaagacttaatgtatcaccttaaagttattagaaatgataagcgtgtaaggtcatttttgtctatgcttgcaaagaagccagatgaatttactcctttatttgtgactttgttaaagaagaat

SEQ ID NO: 132380 - DNA, 1994 bp, Cannabis sativa
tatgtttgattatatatataatctaacattttaaatatgaattttctaaaaacgataaaataaacatgtaaaagttatagaaaaccttaaattggttgcatcggaatataaagactccttcccttcaatattctaactcttgtttctttctgttgcagaggtttaacgaatactaaacctaaattattctttggacaacgcatacacatttttttcacaatcttccacaatctgagtattgtcttgaattgtgagggcaattctaaaacagctaacactcgaaaatttgagaaagtaaaggcaaagactttagaaatttctacagggaataaaagaattttcttgattccaattttttctaacaagagataggttattagagtctactaaattcaaaagccatcatcttctatttatagagtttcttctagggttagacttagaattaaaattagttgaaaagatagaatgactttaaataatcccttcgtcgaattctatatataggcccatgggtttgaattttatcattttctttacttgatgaaacatccatatctttcttcaaaattaccattttttctactctaattatttaaatgctaatttaatctatttaataattattaaacaaaattatgattaaatatgtttatcaattagaccctgtaaggttcttaattaaccaaaaaaaaaaaccctctctttacttttcttctcaaataaacccttgattagtgaaattcctagataagtcaaagtcttctttagaattctaattggtttaagaaactaattaattgtgtctgcaagataatattattctagatagtgtggggaccatgagcctaggtaatcaagatcccaataaacaattctcaaaatttatgaatagattttgttacttattaattcttttggactccactatagatttagaattacactcttgatatagaacgctttgtacacaaagtacgaatacgatgtgaattatccattattttaatctaaataattaatgatcatctatagatggtttatgttgattagggagaaatttattattttacgctttgatgtatttatccttcaaatacttgcctacttataaatggcattttaataaactaatataactacagaaataggagcttttccatttttgtcgttaagccatgctctaaagaaatcattgtttcatttctaaatagttatagaagctatagattctatttctttgattaacactcccactcaatgtttgttttatggtactgaattaggtacacaagatgaagagcaatgtagtttctgaacttacattgggctttattattacaaaataatatccttcagactcaggaatgtaggttctacttagcggaggttagttaaatgtatatttcgtgacttaattggaaataatttagaagtctatgttgatgatatgttggttaagtcagagagattagaagaccacatcagagacttgaggaatgcttaaacatcctgttggaatattgaatgaagctcaatcctctgaaatgtgccttcaacatccaatcaggaaaatgtcatggattcattatcaaatcaagaggaattgaagtgaatccaaaaaagatcatggtcttgcaagacatgaagtcaccatcataagtcaaaaacatgcaaattctaaatgaaaaaattactacacttagtagatttgtctcaaaattaatcaatatgtttgttcctttatttaatttactaaaaggaagcaacaagaggtttgaaaagactgatgaatgcaagcaagcctttcaagctctcaaacatcacctggtcaggcctcccatcttatctaaaccaatagatggctaagaattattcatctattttgctatcatcgagcatgcaaccagtgctgctctggtacttaaggaagaagggatacaatacacggtctactacatcagtaagtgtctcattggggtcgagtcaaggta

SEQ ID NO: 132381 - DNA, 631 bp, Cannabis sativa
taagatacttttgcaatcttttgaagaatttgaacaagggtttgaaaatgaggaaacttacagagtttactatgcaaaagaaacggtagggttgaaaaatgtagtttcacacatagtaatatataggtagaagatcctaagatcctaagattgctagggcaaccgctagtgtttctaggtacatggatgacgtggttggtcacaaggtacgtaataacaatatataaattataattgcataaataaatacgagtactattatttcgtattaatagtgcctagtactaccgtgagctggcccctaattgtgaatagttagcatataatatattattaaaattaattcatgtgggattagtatagttattaaaattaaattatgtgacacccaataattaattctactaatacgtgatataatatcttgaaaggtgctagacacaccacatgtaccttttaacaatatttctcataatatattacctattctagtcttgacaaattgtctaccccaaaatttaagatctttatatattaatatatatatatatatatattaatatataaataaataattttaaataaataattatttatataaatatttaataaataaaatctaattaatata

SEQ ID NO: 132382 - DNA, 928 bp, Cannabis sativa
tataactaagtatacgtgcattgcacataatattacctaataaataaatataatattaatctagtttatttatgtgtgtcaacaatattgtgtcatgtatatattgtgtccatgtagacaataccctatgtacaatacatggatagtgttataaatataggtcagaattttggacacaaaactagcacgactaggcacaaaaaaaatacggacttagacacaacacaacacgatgctacaaattaagtacgacacgacacgagaagcacgaaagacacgatacgcgacaaggccaaaaaatacaacacgacatattaaaaatcattatttattaataataataataataataatatatgaatttatcaattataaataagttaaatataatatttgatattatataaaaattgaagtatttataactaactatttaagttctaatgatgctaataatatttttatataattatttgtaaaatattgttgaaaaattatataaatataactaaaattgtaaaatatacatgtactttcataatttttttaaaaatatatatatgaaaaagtaaagcacgaatttaagccgacatgagcaaagtatggcacgaaaaaatatcaagcctaccctttaaaaatattagcataacacggcacgaccaattattttttgtaacacgacatgatacggcatattttttaaaaagcatataggtctatggccagcacgaacttattctagcacaacaaatggatagtcaatcttacagttaactgtcaaaaatagaggcaaatgactaaatgctaattgaacaagagttttgtgttggattaaaatcgtactgtgggcacatatgtataatgtatatgctattataaagtgtgatacaaaattaagtgaccaattatgttatgggtatcaaaaggg

SEQ ID NO: 132383 - DNA, 674 bp, Cannabis sativa
ataaaggatcttgacttatcttgtatagtatagttagtcaattagagagcaaaacacttgtgaggaaagacttcagagatgttcttgtaagtactagattctgttcttgttaaactcaattactttctttgtaataattcttgcttgtgaagaccatcatcactagtattttctgttcttgttcatttgattctcaattgtttgtataggtaaattaattctgtcaggctccctttctaattttgttaagtaaattaattaacaaaaacagagttttgagtacttttaccgcaatttttggattttaggtatttagttacaaaaaaattaaacaaattgagtatttaagccgtgaatttctctaaggctgattggtttgagatttgaaaacaattttatgtttttaaaaaaacttaaaatgtgggggtccacataaaaatacttgattggtagagtgtttttaaaaactaaatctgaatatgattttaagttttaagctaaaaaatgaaaacaataattttgttttaattatgttttcaaatcattgattccaaatttttttcaaatattttcttacttttgttttgagattcttaaccaatcacaaatttaactttttaaaactcaaaaatactaaatcacactacaaccaatcacatttttagaaacaattt

SEQ ID NO: 132384 - DNA, 1152 bp, Cannabis sativa
tctttgcagagaatgatcttgtcaaaactactatgaacaagatgcaaatgccatagatgtataattgtgggtgtgatcttttgatgatccctaggtttagttacaacaaagagttcttagaatagttccagtagattctaatcacaaaatataaaactcataatccatacatttaacatacagtttggatccattgatagaaaatagatattaatcacttgtgaaagttatatcgtagtgttcaatgtattctaaaaattgaaattgaatttttatttagaatctaaaatttaaagtcaatgacataaatctataccaaatattcaatgagaaattattctagcttggacctccagttaaaatactaattcaactctaggtttaagttgcctttagtaagcatatgtaagtagaagatttttttaagatcgatgatttatatcattacgagatagaatatctagaatatggtcatctacacgacttatttttatagatgaaaatagacatcatataagcagatgagtcacaaaccttcttgtccaatgatatactatcttaagcaatttcttaatgaaaaagttaagaggaaaaactaaaggataatttcaattaaaataagaatccaacaatgattcagtaggcgagagtcaaggttatttcataaacctcttcattatttcagcattgtaaacactagtctaagttgccatcgttgggatgagtcaactagattttgtatttacaaaatacttgtctcaccagatctaacactattatgttatctaacgaatgaaaatctattgggattgtcccattaaaaacatcaaaccaagttagaccaacaatgaagttcaaaattgatactacagaattaataacagaaaacaatacaggttcaatataaattcatacacaattcagaaatttgtaaacatttagcaagtaatgaagacatgaaaaaatacaaaacaaacatatcttaaatatttccaaagttatcaactaaataatatacagtgtttcggtagatgagagtcgaagatatcattagttgaatagagtagttagcttatctaaaatggacatcattttatcaactttttattcgatcaaaataagaatccaacattgtctcggtaggcgagagtc

SEQ ID NO: 132385 - DNA, 605 bp, Cannabis sativa
agagtcaccacaagaaccagaggctaatacagcccagagtagatcaaggagtcgggggcaaactcgatccttgagatctcgcacattagaaaacccactgcgtggggagagaacaccttaatatgaatatcgaggcgagaaagaaagtgtgagtagcatgcgtgatcaacctaatttacgagaccatataatcgaaggcgtcctaatttatgtgagcagataaatagaaatacaccaaatctcatagagagattgaataggaatgcttagggatctaatgaacaaactaatcaactcactaataactccatccagcaatggataattcattctgaggatcaatttagaaaatatcaggatggagaatatagaaaacttccaagttacgagtcggatgaagacctagaaccttttcaccctaatattttaaagttgcaatttctgaaaagatttaagaatcctcatttcacacaatacaacagattcataaacctgattgtacatttgaataactcaaatactataatgcgagttgttgggattttatgccctaaataaaacccatttcaatctaatctgatttgttatcaatgaaatattagaag

SEQ ID NO: 132386 - DNA, 606 bp, Cannabis sativa
atcttttatatcttagaactgattcgttttactgaaaaacgagaaaaaccagaatgggaaaatgattgtctaacttgtaaaaataaatatatttatgtagggcaagattatggtaggacttagcatgacttatttaccgtatggaagcttttttcactaaagattgtaaatcatgtagttattaagatgtaaggtatatacttttacgatatgactgcttatatacaattaaaatattatacatattataataatatttaattatatatttatcttttaaaaaataataatattagtaattaataaaatttattaatttttaattttaaattaatactattaattttttttaagttaatttaaattatttttatataggtatttattttttttttttaaaaaaaaaaagaattttacttaccaattttgctattaatttttttatactaataattaattataacaaaattgattacttaagtactattgtcatcattctgtttagatatacagttctactatgtatatcttttaaattaattagttttaattatttttttaatcaagaaagataattttgttgaaaatttattttaccaggatctt

SEQ ID NO: 132387 - DNA, 527 bp, Cannabis sativa
ttctcattctgcttagtagatctatattcattttaaattattattattttttattaacagctaaaaatgagataataagttactacattactgttatgagagttgcttcatttttgatcaattacaaagacacttttgtaagtaatatttaacaaaaataaataaatgtttctgtaacttcaaataaaataaaaaaaattgtaactcaaatttacaaaattaatttgtaattttcttggcaaattaatttgtagacttagtttatatgtttgtaataaagatatagtattattttgattagtattgtaagtttgtacgtgtcgtgttggctagattcatttatcagtgtttttttaaaaaacggaccgtgtcatgtcgtgctacaaaaaaatataaaccgtgttgtgtcatgacaatatttttaaaagatagatccgacaagacttgtaggttcaatatttttatgtcgtgctcatatttatatggtgctttacttgagtgggcaattcttttttttttttttaaaa

SEQ ID NO: 132388 - DNA, 550 bp, Cannabis sativa
aagataaaactcggttttatcatttgtcttgatgtgacatgtttatcaatgactcggtaatatttcttattcctcttacattttttttaaagttttattatagttgctttatccttgttttttagtttagcaattgttattaagtttttgtaatatttgttcacatttgtttttgtgcttctttattgtgttgttttagcatatgaatattatattctattaccttagaaaaatagggaagtattcttctgctgttactatgaatttcgctacaacagattgcattttcgatgattctattcaatctttataccacaaattctgcaaagccaagtcaatgaaaataaagatggctcacatccatgttgctcccccaatagcgcattatatcagaggcttgtgaattccttattctaagtcttggtatgaagccaaccatgtcctattcattataaatcttaggatagaaagcgatttggtttttggccgtcttgatttgaatgaggggattatatttctttataattctttgaggactgccaaaatgaat

SEQ ID NO: 132389 - DNA, 953 bp, Cannabis sativa
tttctgtcctaattgtattgtatcaggagaactggttacttttaacagctgattattcccagatagaactgcggatgatggctcatttctctaaagattccgctctagtagaacttttaagtaaacccagtggtgatgtcttcaccctaatagcttcaagatggactgggtgtccggaagattctgtaggttctgatgaacgagatcagaccaaaaggttggtgtatggcattctctatggaatgggtgctaacaccctggcagagcaactcggttgcagtcctgctgaagctggtgaaaaaattcgaagctttaagaaatcttttcctggagttgctcgttggcttcatgaagtggttgtagactgccgtgagaaagggtaagacactttgctgaatttttcgacacacgttagtcattactgttattaggctaattaggttggctgagtttagctattatctgttatataggttatagtctgcattgttttcacttcgttgtttcggattttgttttaagacatttcctccatcgtgccatacttgttcgtatatctgtgaaagttttaaacatttaggtaaatagcggcataaatacttaaaattttgagtttgtaagcggtatagactcattaatatttttttagctgcataagtattcaatgttttgtaatagtgtaacttttttccaattttgtcaatatagattccgttagcttcttaaaattgtaaccagatttagctgttgaatttattaaaagaagattttgaagtaactgatacacttgtttccgcctagaccctaatgatttagaatttaggccttacatgtgtcctgtttaagacattaacaatgtttgtactgacaaaactggacggaaattataattttactaacattgggtacttctgccgataaaagaaatcattgagtttataccggttacaaat

SEQ ID NO: 132390 - DNA, 2264 bp, Cannabis sativa
actgtagcgtgccttagcattagggcgttacatacctaatggccaagaagtgtgaaacttttggaaagtttgaagaattcaaggctatgactgaaaagcaattaggtaaatcattaaagaaacttcaatcagatcgtcgtagcgagtatttagattttgaattcaaagactatttattggaagaaaggatcttatcccaacttacagcacctagaacaccttagcagaacagtgttgtagagagaagaaactggaccttgttagacatggtcagattgatgatgtgctactcatcagtaaacttctggggagacacacttttggcggctacttacattttgaattcagtacccttgaaaagcataagcaatactctaatagaattatggaatgagacaaaacctagtttgaaaattttttcgtatttggggttgtcccgctcatgttcttaaacctaagtgtgggaagcttgctcctaatactgaagtgtgtatatttgtaggatattcagatgagactcgaggttcctatttctatagtcatcaagacaataaagtatttatttcaataaatgctattttttttaaacatgactatatgaaaagtcacaaaccacttagtcaagtggttattgaggaaatctgaaatgagatttctgaactaatattttatcaccattagttgaacgaccgacaacgattaccacatttcttgaaaaggaaatctcggtacatcgttgtagtgggaggattgtgagacaacctgtcctctacaaacatgaagcgcatgctcttgtttttgacacagacaaggatggtccattgacttacaaagaagcaataggtaaccttgactcaaacaattggaacaatgccatggattcagagatggactccatccgcaccaacaaggtttgggtatatgaaactccagttgaggatattacacccatagggtgtacgtggattttcaagaagaagagaaatgctgatgagaatatagaaacctttaaagctaggcttgtggccaaaggctacactcagtgagaaggcatcaattatgaagataccttctctcttgtggcaatgcttaaatctatttgcattcttctttctatagttgccgcatacaattatgaaatatggcaaatgaatatcaagaatacttttctaaatggcaaacttgatgaaatcatatatatggaacaaccaaaagggtatgtgtcactaggaaataatcgaaatgtgtgcaagttgcttaaatccatttatagattaaagtaagcctctagatcatggaatatcatctttaataagactattaaagagaatggcttcaaacaaaatgaagaagaagcctgtgtgtacaaatacattaagggtaatctaatggtattcctagttatttatgttgatgacattctacttattggaaataatgtagaaagattatcagatgtaaagaagtggttagccaacaaattccaaataaacgatttgggaaaagcaagctatgttctcaggatcaaaatctataaagatagaaggaggagaacgttagcactttctcaaaaaacttatatcgatgagatgctagaaagattctcaatggagaattccaagaaaggacaactaccatctagacatggaattactctatgtaaggatcaatgtctaaaaactcctcaagaggaagagggcatgataaagtacccttatgcatcagcagttgagagcttgatgtatgcaatgttgtgtacaaggcatgacatatgctacgctatagggattattagtcattatcattcaaatccaggtttggaacattggattgctgtaaagcacattctcaagtatcttgggagaatgagagatctcatgcttgtatattttggtagagagtcaaaatcctactggatatgatattctaattttcaattagacaaggatagttgaaagtcaacatccagatcaatatttactcttggtggaggagttatagtctggagaaacattaagcaaactagtattacagatttaaccatggaagtcgaatataagtcagcttgtgaagcagctaaggaagcggttcagttgaagaaattctacactgctctggaagtagttccaaaagtagaaaaaccactggtgctctactgtgacaacagtggagctgtaacgcccgtactttttataaattactaatttagttacaagcgttaaaatgcggaaaatctataatgtcgcttttatttataaacataa

SEQ ID NO: 132391 - DNA, 1189 bp, Cannabis sativa
  modified_base (27)..(40): a, c, t, g, unknown or other
aggatattaatgaaacatacttgttannnnnnnnnnnnnntggtaaaatatttccaacatcaaggtcttatatttatttatggttgatactcaaaattgggacataaacaatatcaccactacatttaatgattcagtgacagaaaaactctcagcacatgtattttcccgatgctggaaagtgataaattcttttggatggctagtaagagtggggatttttctgtcaaaaaatacacattgggtggaccaacaagttcatttttaagtggaatcgaaggcttacaagaaaatttggagtttacggattcatcccagacacagacttcttctttggaaaatatgcacttgttgcctcccttccaaagacaaactttattcattgcaaatttggaaaaagagtgtgagtcatgtcaccaagcggaggaatctttatagcacctatttttcaagtgtacttttgttaggcttctatggttttttagcccctagggtatccaaattgatgacatgaattggtactcccctaatgattttgtggagttgctggctacaatggaagtgaattatgttggaggaactttgatgcattttggcatgtgcctcttagagacaacctagtttttgggtagtgaaataatgagagaaaaaattggcctagatttgattaaaatctcggaagacttcagaattaaagaatctgaatttgcatactatgcaaaatgataggattcgtgtaacgccctaatccataggaacgccacgtgtgtgattttataaaactagtttaatactaatatattaattaatgattaaaaactgtgaggacaataaaaaaggagtttcggggattcctgttataaaagatttatccaaaagacgatatacaacaacaattcaaaatacaatagacacagccagtctaaaataactcctgggaactcaacacgtaggctggtggggttaatatgtatattactggagaagaccgtcatctcatggttgttctaactttgccttgcccttacctgcaccacagagcacctgtgagtcatatagactcagcaagaaaagtaataaagaatgatacatcaaatagcaaattatatatttcactatcacaaaatgattaaactataacattcaacagtaggtaatgtaaccgatcatatgcatagaaatagatatg

SEQ ID NO: 132392 - DNA, 536 bp, Cannabis sativa
attggtaaaactattgtcatcatcaatcaaaacatgtttaagtaactctttcttcttattatttaatatctctttcacgtactttactgcttcttccatctctacctcggaattgttcttcatgtagactgtgattgagttcggtttaccttcatctttttccttctataagttcaaaccgagtaaaaaaaatatttttagttacaaaaatttcaatttatcataactaaatgcatttcactagctaatcacaacaaattttatttgtacatatcacaatataaatattttcttagtaacaaaaaaattactaggtctattttcatcgattactctaaattttacgtacctcataactttgtatgtcattcaataagcgacaaataatcatgactaatttagtaatgttatcatactccatcgattgcatttttaaatctgactttagaagaaatgaagctggaataagtaaggtgtgagttgctatggaagtcattccaactttaagatattcatccatggttggtacaatccca

SEQ ID NO: 132393 - DNA, 772 bp, Cannabis sativa
ttcatgcaacaatgaatatttttacaaagaataagaccacttttagtggaagaaacactagatacttcttttaacttgcggtctttaatttttatcatttctttcaaaatttcttatgtttatattttttttttcaattattttaccaattttactcctatcacttcacgataattttaattcttctataattaaaattttgtccaaactttctcacaaacttacacattcatctacaacaaatctattatgtttgaaattatatcttaatatgtgaatgtgagaagtacaatactaaaaaaaaaaaagtatatttgaattaaattttatttaaaagtaaatttgattaatgtatataaaaaaagaagatattcttcaaattctctcaagaaatatgcaaaaattgtcttatatttagcacaaattacagaatttgatacaaactttaatatttttattaaaagtataaaaaagagtaataactttatcattaatatcattattttttattatgtaaaataataataaaaaagaattgctaaaaaacaccattggtacttaacacccttcttcgcgacatacaattattgttgtaattaagtagcatgttctatataagttaagaaaataatttttatagaatattgctaattaatcataaggtgttacctatagaaggtgctagacaccactagtacccaatagcaatgcttataaaaaagaatataaatagtttatcatcaatgttatatctaaatatactaataaaata

SEQ ID NO: 132394 - DNA, 979 bp, Cannabis sativa
tttcgtggtttgcatagcatacagaggaagcgaaagaccaacagacttaattagagtggcctgcccagctttggatagtgtcttcgctttccaaccttgtaactttgaagttagtccttcaaggatgaagttgaaatccgcatccttttgtttggatctaaatagaggcagacccaagtacttgatgataccttctggagaaccaatacccaaagcttcctttatgcttcttctcatccctatggaagtattcttactaaaaaatattgacgttttgagcttgttcactttttgaccagaccaggagcaaaatttctccaagcaattccagaagcctttagcctcatccacattcgcccgacctatcagaatcaaatcatcggcaaagaataagtgagttaacaccggtccacctctacttaacttgatacccttaaaaaccccttttgcaagatcatcttccaacagtctagataaaacttcagcagcacagataaacaggtaaggagaaagaggatccccttggcgaagtccgcaagcgggcatgatcttgtccaccactcctccattaaggcacacattaagagaggaggtggagatgcactgggtgacccaattacggaccttcaggggaaaaccataccactcaagcacttgattaatggctccccagtttaacctatcataagctttaacaagatcaatctttattgcaaagtagccctccttgcctgtcttcctgttaaatgagtggataatctcctgaacgatcacattgttatcctggatattcctccctgggacgaaagccgcttgagtagggcatatcaaagaagggaggataggctttagtctgttagcaactatcttggagatcaccttgtacagcacgttgcaaagagaaatcggtctgaaatggctaggtcttttcggattctgaatctttggtataaggaccacattagttgagtttatacct

SEQ ID NO: 132395 - DNA, 993 bp, Cannabis sativa
  modified_base (946)..(961): a, c, t, g, unknown or other
ctatttttgagggccaatttagtcgtttgaactttattaatttattatataaataatagctttatttacgtatttcaagggatattggggatgtaagctctactatataaagggcattagtcaaaccctaactctctaggtctcaaaccctaagtcttaagctccaagtctgatgctcatctcatctctttatctctctctcacaggcataggcttgtctctatcacttgagatttgctgacttttgttctcacattgtaatcttaagagagccactttatatcacactactattaggatctaagtggtattatctctggtatcaatacagccaaaagggaagtaggtcattacacgataattaagggggtcgaacctctataaaatctcgtatttatttaattttctattctaattgtgtcacacgtggtaagcattagccttaaatacgactatgctgttggttggccaaatctgaggttaacagtttggtgctttcatagagagagagagagagttgttaatttatctaatcaaacatcatggttaacacaaggagaactccagctgcaacatctacctccttaggttttcctcaagaatctatggcagctgatcttaatgttcatattctagtcacaactggaatctccacaaacccaactgatgtggccactcctgccacctcggcaggcaccacaaacctggccaccacaactggccaggtcgacacagccattcccgtggtctaaatagtcgacccatgcctcctagggaggactctccactagcgcctcctactaaaggaaggacccacgtggagcaacccctaggcaccacaactattgtgctagagagatagggccaggaattggtgagccccatctacacttgggacaagatctcgatgttgggattttatgcgctaaataaaacccatttcaannnnnnnnnnnnnnnnaattaataaaagatcaaaaataattttatgtt

SEQ ID NO: 132396 - DNA, 985 bp, Cannabis sativa
cgaggtttttataattactatcgatcatcatttatattttcaagatgccctatcagcagaactctttgggctctgtattgcccgttaggacggagaggcattttttttcatgaatcgtccaaatgaggcatagatttggccatatatgcgatgtgctagtgttaaaagtatcaagcaccatcaggggtttgcaataaacttgttattttatcatgcaaaaaagagtctttggacttgcctatttgtgattattaaaataattattgcaatagactttctaaataattatgcaaaaatgagcacacatagctcgccaattcgcgattacttaagaatgagcatagttggctcaaataattatgcaaaaaatgagcacacatttggctcgctaatacatgaataaatgtataaagagcatatttggctcctaaatagccatgcaaaaatgagtgcagacagtgctcgccaattgtgattagataagcataatcatcggctttgtcaatcatacaaaaatgagcactattttttagcttgccaattatttgtgagcatatgcaaaaatgagcattatagttggctctaagtttcatgcgaaaatgagcacacattgagctccccaatttgcgattatgaaaaaatgggtattgcaatacgctcataaataattatgtaagaaataggtgtcatgtttcactctatttttgcaaacaatatgagcacatgtaaaatcacagattcatcatgcatttagatgtaattctatttctcttacaagtgaacgaataataatgtatcaaaaatgattatttgaccaaagtgttagaaaaagtgcacctggtaatctgtaggtgttgggctatccgcatatatagcgtccaagcattgattaattcttttccatttttttaatatctcgtgcctctttatttttatatatctaatatataagagggtagtatttaccaagtgggccatcgggccc

SEQ ID NO: 132397 - DNA, 1111 bp, Cannabis sativa
tcttgtcctaattaaactgagactttaataaattaaaccatgcaaaccaaacaacacgtaatataaattataagaagatattaattttcttaataattgactatacataatcgtagtcatactacttttctttatttttgtcttcttctcgtggaaaattagctaataattcacccacaaagtcaagtaaagcaaaaataaacaaataaattaataataacataaagttatttttaaaaaaaattatatttttacattgaatgatttttttttatatatttttacaatattctataaaaataacacaaaaataataaaaaaaaattacataaaaataaaaaaaaaataacatttaaactacacaaaaatataatctaaaaatacattaagagatcgcattttcagtaaataaaatcgtaaaaatcgtaaaaatatatttttaaaatatttttgtatttttgtatgtttttgaaattatctttataaaattgattttgtaataaaagttttaggaccaatttttgtatggagacgcttccttctctttaataattgaatatatatcacaaatactttaatttcaactagtgtttttgaagattaccaaatattatttattaacaattataaaacttaatgtaaaattaattatttatttagtgttttgactagaaatataaaaattaatatttatgtaatgttttgactagaaatatacaaattaagggaaattatctcatatatactattttttaaatttttttaaatttactatttgggttactctagtagtttttttatgggttgttatgtaaattttagttgcgatttaagttgctatgttagttgttatataaattgttatgtggatttttgtaaaaaaaaaaactgctttgaaatgtaaaaacaaaaaaaaaaaattccttaattttattatacaaaacaaaaaagaaaaaaaaacataaatacttcatataattaatattatacctaaagacactaataaaataatgtaaatagcataaataataataattataattataataataataataataatacatctattctatataaaatgtggctatataaccgaattcttggttta

SEQ ID NO: 132398 - DNA, 618 bp, Cannabis sativa
ataaggccctatgtatattccctatgataacatgcaattttctactcctcaaaattcgaaattcaaagtgtttttcagaatcagagaccaaatacgcaagtagtttcgaaactaaccttgagttttgacgattatcctgtgattagtttcgatcgcttctgaaacttaggagattcgagaagagaaggcagagatctggaagaaggatttgagtctttgaaatttcggagaaaaaggaaaagaggaaaatggaaatgagagggaaaataagagaatcgtttcgtatcagggagcttaaataccaatacccctcataaattgggattgtgacacgtggcaacaggaatattgcctaaggtcatcccatccaacagtcagccatgggcacgcctacacggaaaccgaagagtttcgtgacgttgcaccataagcaggataaaatgtaataattacagccatcatttttcgaaaccctcgatgggacaaccaaaggtcaccacctcgtgacaacctttcatctgtctctcatgtatagttttcctcatgaccccacctgtcaagtcgcgaaactggggcatgtgttatagtgagatttatctcacctagaaactcgagacc

SEQ ID NO: 132399 - DNA, 639 bp, Cannabis sativa
tttttttttttttgaaacaataaattgttttatttttttttttttttttttttgaaacaataaattgttgtagtttgatagcttgagatttatctaatttgttttctttgaaagctgacttatttaaaaaaaaaaaaaaaaaaaaaagataaataaaatattgatcctcatgaactatatatatagggagttttgctatatgaacttttttaacagtaattttgttatttttttcacaaccattagtgtgttcattctattacattctttcattcattaaattcatgattactgaaaaattcatgatattcactattatttcattattaattgaataggaatagttattaggggaattacttatatcattgtttttattcttttctaaaaaatttatgatttgggttgctgtaatttttatgtggtttcttatatggattttgattgcaatttaagttattcttttttggaatgtgaatttttgtaaaaatgcaaaaaaaaaaatatatatatatatacagtagaatttatattcaagaatacacttgtgacgtaccaagtaaattatattctaattgggaggttataactaaatagagttacactagaaaaaaaaattaaaaaaccaaaaaatatcaa

SEQ ID NO: 132400 - DNA, 752 bp, Cannabis sativa
ttttaaatactgtatattgtgttaagttttcattgttgttttaattattctattttgttattttatgattgtactataaaaagacagtatatttgtaaaaaattctgtgtgactgtaaaattgtaaatttttgacaaaaatctaatatttttgtaaaacttctttttttttttcattaacaaatgaatgtaaaccttttatattctaatagagatttttagaagttgatatatttatcctgtcatgcctatataatcttatatacactgaaaatattatttattaagtatttaacaaaataaactcttatgttttttggtagtatttgacaaaaataaactctaacgacacataaataaatgatttgaaaaatttgtaagttgaaaatgggtataatcttttcagttaatcacacctaattaagatgagacttttataacttaaaaaaaaaaaatattgtcaagtcactaaatataatttttgtgcctattttatatttacatgtcattgtgtgtaactattatttttctttttcttaactcttaaaacaacttgatgtgcaaaatactttttctatgaagaagtttgtgaatccttttaagtaagttctctatagtttaaaaatgactttgtactattgaattagggatgctataactcaattgttgatagtttttatcaattatattaatgtttcattgattaaataaatggtaaatattatttgttacaagagaatatttttatctgat

SEQ ID NO: 132401 - DNA, 600 bp, Cannabis sativa
ggacccgaccaagggtatgctacagccaccatctctgcgacctgggaccacctgacatcagacaagggtacgaggtgtaagaccacctcctgcacctatagtttgcagcccaaaagcgataacttgtctcttttggacgactatgtaactcaggctattatagcctataaatacccattttcaagtgtgagaaggggtttgaaaattgatcttgtaactcatatattagatgcaactcaagaaatctcccagctatttaaacttgcatttcatttcaccttcatcttatttttgagttttacgtttagattttaattttccgaccacaaggttagttgacgagttcttaacgtcaacaattatttttgataagttgaattagtaaaattgcaaaaagaagattaatgatggtaaaaagtaaaaataacaaaaaaaaaaaagtattattaaataataataataataaaaagagaaaattacataaattgttatttttaataaaaattttacacttttatatttaaagtttttttttaatatttttacgatattctataaaacataagaaaataacaacaaaacaacataaaaaataatata

SEQ ID NO: 132402 - DNA, 568 bp, Cannabis sativa
gggacaaactccaaaaaaatttgctattgatataaaccacaggtgcaagggaaagtaagcacctgcattcataaggaacctcgacgaggcactataataaggactttggtagccaaattatctttgattaattgtacttggtgttcaatcatggtactaaatacaagagatcttaagttgaaagcttggtctcttgggtcatcaatctaaatggcagctttaagaagcttagttgccattacctttccaccacgcgccatgtataagatcttagactttagcacaatcagcttagctctaacgaactgagccacatagggatcacattcataaggtattcttctacttctcttcatccaaggcataatgatttcaacgattggttacttacaactcaagagagatctttttggctttggaaaggtgaatccaaggtaatcataagggagtttcaaagatactgttttacaattttgaaggtctcaataaggaattcatggatttttttgggagttttagaaccctttaagcaatctcaacaaggataaatttttttttttttttaaaa

SEQ ID NO: 132403 - DNA, 1339 bp, Cannabis sativa
  modified_base (52)..(56): a, c, t, g, unknown or other
ttttaaataaaaggggcaaaatttcatattaatcaaagtttagggagtaaannnnntaatttttaacggtaaagataacagaacctaacagaaggggcagaattatgtaaatgttatactttagggagaatttttaacaagccgtatattttaaggggcaaaactaggtagtgccgaaagttcaggaggcaaatatgctaattattctatagttaacgcatgagaaaccaactagcattagatggagaaaccaccgcagattatgagacaaccccgtcagggctggccttgagttaaaataggtcataggccaaaaaaaaattttggacccttactataaaaataaatagtattttttaaaaattattaacaaaaatattttaaaaggtattttttttttatttgagcctctaaaatgagtgggccctaggcgcgtgcctagccgacctatgccaagggctggccatgaactccatctctcttgtaatgtgtaggaatttactttaaagcccctacaccaacaaacaatcactaaactgagtctccaagatcaaaaatgaccttttcttatgtttgctgaataaacactattatcctcatccaaatcgacacagttttggttttactcaaaaaatttaccctaagagaatcactctagaacattcaaaaaatcaatactcacaatttcaaaaatcctagtagataaacgtttgagagttctaagagaaacacaattcaagatattcacacacaaagcacaaatcttcaagatctagattgatcttgaagattcacacacaataatcaaacatagaaagcaaaggaaacaatagcattagattttcccaaggttcgccccaaaaattaggattacgtccctgagctctcccataaagttgaagaggctctctgcattaccaaagatcgatccaaatctgatgcgtgtcgtaagccacaaaaaatttactaatatttatttccaatacctccaattattttagtataattgtaagtaagggtcgatcctaagaggactctgtttattttattattcagaaattagtgtcaaaagttagaaaaagggggttttgagattgagagtgaaatggcataaatattaaataaaaacaaattaaaagtgagagtatgatatgagaaactagttaaaggttattcgccaccctcaacaatcattcctaattcttattaatgaatgtaatttcaatttccaatcaaattaatcctacggataaaggtgaagcagtcaattatcctgatctccctatcacatgtaatcaaggtgaagcgctcaataattaactcttttacctaagcagta

SEQ ID NO: 132404 - DNA, 880 bp, Cannabis sativa
taactaatatctatgtatatattgataaaaattaaaaatttacatggtatatatattagaaaaattgtatttttctatacaaaaattaaactatattgtatattcataatataattgttatgctttttttttttatgaaacttttgatagtaatattattctacaatcacaatttttagtatatatatatatatatatattaaataaataataatatttgaaaaatggtgatacctttgttgattcctctcgtcaaagtcttcttcattaggcatgttgattcttttggagaaaatattgtttcctagctatatgatactcaaagcgagtcaatgatctacatataattttttatgagagcttattatcacctagggcaacttgttatgtacatggtttgcctctcctcaagtttcaaatatatgaacttgcaacttacaaataatcactaatttatttcaaaattttatatttaaataaagtgataaaaataatcaatactacaatcattatttttaaagggcttttgactttctattttcctattcatattaaaaaaaatattacatgaatttactttattagtatatagactgttgtgatcaaatgttatttataactattgggatgggatcatgattgtatagtttatatagtctattaagaaaattatgtaaaattacaattacaattacaattacaaattacaaaagctaacaaatgagataaaaagttaaaataagctgatagaaagtgtgacgtcactgacttaattttctgtttatataaatactagggaatagatccgcgcttcgcgcggttttaataatttttttaaaattttacatgaaagaaattaatttttagttacgaataaaat

SEQ ID NO: 132405 - DNA, 787 bp, Cannabis sativa
ccaatcccaatatcatatttgggctaaatcaaataaatatctaaatccacgattaaggaactaggtaagagaattagtgtagaatttctaccccattttaccctaggcacactaaattatgcatcaaattgttttacacgattaatggtattagattttaaatctacaccagaagtgtatatttgcatttgaacccttattttattgtattttaaaaattaattttatattttaactctcaaattaaaatttgttataaaaataattattttaaaacactaacatatttaaaaatataaaataacaataacgaaaatactaaaaaaaaatataattataaaacttaataaaataaaaactatataattgtaaaattaaaaagaacataaatgaaaataaatattaaaaaattaataagtattttgagaattttaatatttatgaaatgcttgatattgttggtgatttttttttttttttacagttgctcatttagaaaatggtgacgtatattaagatcaattatagtattttaatattttatgtttgtgttttatttattctataataaaattttattttactaaattattttaagattttaaattcttactattagtcatgatataattatattataaattaattattttgaattattaatataaataattaatataaaatgtgagagcttttaagtgaaatatatttattttgtaggatatttgatgtgatatttagtttaaattattagagttgttacaccaaaattaaaatattataatgt

SEQ ID NO: 132406 - DNA, 966 bp, Cannabis sativa
ccattgttgctctgaatatttctttaagtcttcatatttttatcgttattctaagtctcgtgtttatgttttgatttttcgatcataatttagttgacgagattccaccgtcaacacttatcttcaatcaatctacttttggagagattgaaaatagtatattcggagggagaccaaattcatccatctatcctttcctttttactttctttcatgtgaaacaagtaaatttgacctctcactcctctccttcctagtgttgtaaatatggaccgagatttttgacatggcacaaaattaacacgagcccgagaggcacaagcacaatcaggcacgaaagaatataggcttgggcataatacaatataatgcaacgaattagcacgacatgacacgatgttgcaaattgacatgatacgatacaaaaaatatgggcctgagcacgacactacatgaaaaatatgggtgtaacgccctattccatagggacgctacgtgtgtaattttgtaaattattttaatactaatatattaattaattattaaaaattatgagaatattaaaaacttgactaaaataaaagactggaaacggacattataacggcaataaaaaaagtgtttcgaggatcccttttataaaagatttacccaaaaaaactatggacaatagcagatacaaccagtctaaaataactcctggcaactcggcacacagaccagtggggtcaatatgtacatttttggagaaggcagtcacctcatgacaactctaacttttccttgcccttacctacaccacatagcacccgtgagtcacaaggactcagcatgaaaagtaataataatgattatacagtttattattcgaatattatcatttatacacaatcagaatcaaaccattacgcattgttcataagatgaaatctaaatcactaatggcatctaccatgaataagcatc

SEQ ID NO: 132407 - DNA, 1219 bp, Cannabis sativa
ccttgtgctagtcgagctattcagctagacttgccatttcctttgtactgaattttattaatggatttccttttcaaaaaaaaaaatatctagatagttttagttttatttctttttatataacagtatatatcataattaaatattttataaatttttaaaaaatttaaaataatttaacatgttgaaaataatattcaacaatttgttgcactcatttttcttttattttatacgagtataattgtttgaacattgttttagttcatgtgttataaattaatttaaatttctcaaaattttgtaaaatatctcaaataatattatgcactatcatatatatgggaaacttatgactaaagcacacaatcaaaatgttaaaattttaaacaatcaaacgattagcaatgacaagattatcaaatcgaaacaataatcagatgaaaacatagacaaacagagtaatgaaaatcataaaataataaatgcagaaattaaagaaattaacaccaagatatatactagttcaagtctttttatctcaaattctcttttgagcttggctttgatacttttgatcacgaatttatctttgctcatgatgagcatatcatccacatagagtaaaaagaatacggtcgtagattgttccagattcttgaaatataagtagtgatagtacgtggatcgtttgaacccaatttaatgcatatacatatcgaatctcttattctattgccttggggattgtttcaaaccatagaggaatctgttaagcttgcacactaattcaactcatttcccttttacttgaaatccaggttgttgcttcatgtagatctcttcatccaagaatccattcagaaaggcaatcttgacatcaagttattcaacctcgaactctatctgagcagataaagacaatatcaaccttattgttttatactttaccacatgtgagaagatttcagtatagtctatacattccacctaagtaaaacccttagccattaacttggctttgaacctctcattgattccctcttttaccttgagaatccatttgcatagttttctcgttctctggctttggcacaactatacaaattttgttcttttagagtgaatccatctcctcatccatggcttgaagccatttagacttgtttccacctaaaattacctcttcataacttttgggtgttgggttttatgccct

SEQ ID NO: 132408 - DNA, 520 bp, Cannabis sativa
aaaccgactaaaccgaccgatgtacaaccctagtaaatttagctcaagatatagtattatgttaaatttagcatgaggacatgtgaagttctacagagcatatttctcattcatgcactatattcataattttaacttaaaatatcagagcttctaaacaaaattttactcaattcattagatttgagtttgcactgcttaaagtttgaagtcttatggattttctttcatctacatatataacaagctcaattgtatatgttaatttgatggagatgtaattgttgatttttaataattaatgagcttctacttccagaggaccatggaattatatttatgtgctgaatcattttggtgacattgagataatttatgacattttataaataatttaaatttcataaaattatgacatttatgacattttataaaattatacacatataatttcataatttaaattttataattatacttgtaatattaattttaaattattacacttaattatttaatt

SEQ ID NO: 132409 - DNA, 554 bp, Cannabis sativa
  modified_base (501)..(511): a, c, t, g, unknown or other
ccgaccaacctggccaacccaacccgattttgggccgaaacagttctttttttattgggctgaaactaattgggtttaaaagcctagaacccgtggtcattgggttggtaatgggctgattgctttgtaacccgtataacccaacccgggtcgacccattacagttaaaagaaattatacactgaattttttcagcccactcactagcctagcccaatattccattcccttaccctagcacacatataaatcacatatataaagaaaaaaccctagcacactctttattcattcttttcttttcctattcgttcacacaccaacaccacatccacaatcacaaaacctagcagccaaaatattttattttcatgaccgctattcacgcaccccgaccggtgcgattgccttgccggagttgacaaccaaagccaaaggcccacaggtaagagagtaatcttctctctctctctgctctatatttatctctctctctctctnnnnnnnnnnntctctctctctctctattctatatatatgtctctctctactcc

SEQ ID NO: 132410 - DNA, 695 bp, Cannabis sativa
  modified_base (343)..(345): a, c, t, g, unknown or other
gactcatgttaaaagtcaattctaatctcctacaatacatcacattttagtggctacgaaccactctttatatccataaaataaaataggatccattttatttttgaatccctagaaatagggtatttttttaaattcccaaatcataaaatagtagaagtagcacatacaaggtatgtgcattttaattaaaatgaaaattatacaaggtagggtatagtaaattttaatttataattatttaattaaatatataatcaaataacataggaaaatttgatattttatccttacattagggagaaattttttccctaaacctataatacattatattggtaannngggacaacatttactatattcccacattacctccctcattcaaatctaacctctctctttcccctctctttctctctctctctctgtctcgcatctcttcgccacacgcagaccgcccatagccgtcaacgcagaccgcccacacccgtccacgcagaccgcccccaccgtccacgtagccaaccgccccacgtcacccacagccgaccgccccccaccgtcccctctctttctctctttctctctctgtcttgcatctcttctttttttttttttttcaatttttttattcaatttttagtgcttaaattgatgaaatggattattatgttgcaattttatgtgaaatc

SEQ ID NO: 132411 - DNA, 898 bp, Cannabis sativa
  modified_base (719)..(726): a, c, t, g, unknown or other
gagttaattttaatcatagatataccttgatgtattgtgcgataaggttcagctttttttcggtggaattttgagagtgaagatgggttatgtccatgtatcttctgtatgcgtttggtagaattcgacaattttacttcgggtgcttttagttagaggtaataaaataaaaatggaatcaatttttatttcattttttgcatttggaggtaataaaataaaataaaattaattttaatttcattcttcttttggttagaggtaataaaacaaaatggttgtatattaaagtattatttcagtgattggttttacaattttggtggaaattctatatagaaatgaaggtaattttttttttttcatacatattaaattttattttattttatttttattaatattaagattgtgttcttatttcttccaactaaacgtatctttccagtgttcattctaatcttatttattgatgggatctaataaaagggtcaacgacgagccagaacactagtactagtagtagttgcaattgcaaattatttagcataaacaattaccgaagattaagcaggatgaaataattagaaatttatgacttaaaaatagacaaaataaaatagaagttaaaagtatataacattcaaaatttgacaaatctttgcttttgtcttgactgtataagagtcgtattatattaaataataaataaaattatnnnnnnnnttttaatacaatgtatgttatattattttgggccttttttatttttacatttctaaacatttttttttttttgcatttttacgaaatcttattttatatagaaacctctattgtaactagtgatgcaacctaaatcgcaataaaaaatcgtataaaaactcctattgcaact

SEQ ID NO: 132412 - DNA, 1074 bp, Cannabis sativa
aattaatacacactcatccaaaatttaattgttaacttagcttgaaaatagagggccctcgaaacattcagcaaatgttgatgttttctttctacaatggtattttatttgaagttttgacacaaatgaactcagggagaatgtcatatttagaaaagagatttttgaaactaagttttggtgcattgtctaatctgaacttcttaacacacattcaaaatgagtttgaacataggataaaaattgtagattaatattgacaacatctgatttttgttgtaataaataaacttaagtaaaacatgaacaatcatcaaccaaggtgaaaaagtatttgtggttggtgtcagagatgatgtggtaaggtccccaaaaatcacaatttttaacaaattaaaattgtgattagaaaatttatttttctttggaaaaactagtttcttttgtttagaacataacatggtacattcaaggattgttggtatttgaggttcgagaagtcaggtctatacactgtcaaaagtgcttgcaggtacctagaagagctaaaaaatgacttttcaaatgataattcagctagtttttggagaaagatatgggctctaacacacccccaaaggtgagaaattttctatggcgtgttgcatctaatgtgttgcttacttatgttcaattggtcacgaaacatgtacctattagcactatttgtcctatttgtaacaacagtgcagaaaccatatttcatggacttgttggttgttcttttgcccgttcccgttggcacagatcttgtgtcgagattagcagctaaatggagagtgtcttattctgatggtggcataatttatcgagtagggtaggggttggcatgttggaggaggcaactatggttggacggggtatttggcaagctcaaaacactgtcatttggaaccagaaaactacaattgctattgtaattgttctctcgactaggcatgctcttgatcaatatagttttgctcaatcaacaaaagatgattcttgattgttattctgggataatgataaagttattgagtaatggaccactcc

SEQ ID NO: 132413 - DNA, 680 bp, Cannabis sativa
cgctattttgattagtaatccctattaggggattagggtttcataagtattttgagtagcgtgccttattatttagggcattacaattactctattccaaacaccccctaatggtgttataaaaagtacgttaaatttagcatatgttaaaagttatgttgaatttgacataatatatagtattttattaaatttaggccacaataaatgctaaaattatactatttttttatttactataatctattttttattgacttcataaagtgcttagtatattgttatttttttttagcacttttcaataaaaaagctctctaatggtatgctataagttgtgtcaaatttgacacatgctaaaaattaaaccgaatttgacacaagatatagcattgtgagaaatttagcacaaaataaatgtcacttttgtaattacaattttatcattaatcattaatgacatagtttaatacatacattttatttataatattaccattaataattttttaaatatttaatttattatttgttattaatgatattatgttatgctaaatataacatttgttcattttttaccaaatcttttggggggtaagttgaaaaatgcctcttttattcatcaattaatcaaatttacctctaattttatgtttatttgaaaaatacctcttttt

SEQ ID NO: 132414 - DNA, 564 bp, Cannabis sativa
taataaatatcattttttacccttttttcaactaaaaaaaattcaaataaaactcgcgaaccaaggacacttgctgaagatacttctagataggattgagctggagttgactatttggaactgccattccaggaaggatgactagcaaactagaacttcatcctggagtgagtctacctatcctgagaactggaactggagtggacatgatagacatctgggaactcccttccggactcgactatcattccacaagactccttccaggactgacaaccgagagtaaacaaatttctaaaaataacgattgcggagaccttctcatttagaggaactatactaaaacatgttaatggagaatgtaactaaactcaatcttaaggacataattgacacctaaattagtgatgctgacaaaaagtttttaaatgctcccatttttcattataaccaagatgtggaaaaagacttcaggagaagaaacatacatgagttttaggcgacagaattcccatttattttgaaaaaccgtgtttttgcaaatgtcagttgtatataagaaaa

SEQ ID NO: 132415 - DNA, 755 bp, Cannabis sativa
ggcaatgttgagcccaagctcttggagaatgcctcttttcataccctcacttgtgttattgctgaagaagatggaggttttaagcttgtttatacgttggctagaccacttacaaaattttgctaggcattgccaaaatcctttttcttttgcaataatcgctctgcccacaaggataaggtcaaccgtaaagaacagatgggagagcctagagccatccctacttaaagtgatacctttaatggatccaacctcaagggcattctcgagaatacgcgagtagatattagtagcccagataaagaggtaaggggccagcgggtcaccttgccttatgccatactcaggggccaagttacttactaaacctccatttaggcaaatgttgaatgaagatgtagaaaattggcgaacccaattacaaaatttttcaggggccttaaagctgcaaaggacgtgattaatgaatcgtcagcttaacttgtcataagctttcaccgggtctattttgatagcaaagaggccttctttaccttttttgagcttaaacgaatgaacgatctcttagaccaacacattgttatcctgaatactacgatcgggaacaaaatccatctgtgtagggaaaatcaaccaggggaggatcggtctaattctgtttgcaattattgttagaatatgttttactaggatctagatttactatcatgtatgttatttaacatcctatttatgaatttctaaaataatgtaaa

SEQ ID NO: 132416 - DNA, 675 bp, Cannabis sativa
tttttgattttctaagcatagaaaatcaaatttccctactagaaatgatgtggtatggaacaataaaattcctatgatggatgaggtaattcagcttgctaagattaattatgtggactggtttaatgcataaaaagctgctgaggacactcccaaggactaccataagcctcggtcttataaatggaaggcccctgagtttccaatcatcaaagtaaacgtgggtggagtagttttttctatggagaatcgatatggagttggtctggtggctcgagctgcatctggtgtggttatccaggccaaaactgtgtgcaagtttggtgcacttcagccacatgaagttgaggcaatgggaatgaaggaggctttgagttggattaaagctaatgattggcaagatgtgatcgttgagtcagattgtctacaagttatttcagatttacatagtaataaaattatggcttctccttatggccatattatctctgattgtaaggcgttgtttgccgatattgataatattttgttaagagatattctaatagggtggcgcattgtctggcgcgatcctctcttggcgaggctaaacgtattttcagtagtcactctttacctactgttattgcttccctagttcgggatgatttaagttaataaagtttcgattttatt

SEQ ID NO: 132417 - DNA, 505 bp, Cannabis sativa
tatactagaatggaggcagtgcgttgcactggtctgatttttatatgcaaattagtagttaatacaataactcagagaaagataattcaaaacattgcataatatacaattaaagttactaccctttcaacctctttttgaataagacaacaatataatttaagaatataaatctgtgactttgaaaaagaagaatgaataataataatgcatgggtaacgtctctttgttttaaatgctatattgagattgattattctctcagtgacaattttttggaagcaaaaaataaacattgtatagagactgtgttaaagcatatttataaaatgtctctagttgtcgatgtatttgcaattcaatctattctataaatacaatatgagaactacagataagaaatagaatctcctataagtgtagaatctaagattggctacaacttgaaatttgcaataccatttctctttgtaattaatctattcttgaagccatatcaattatg

SEQ ID NO: 132418 - DNA, 582 bp, Cannabis sativa
gggattgcacagcttacccggtatttctccttacggatcacgggactactgactgtcacatggcacaagtatgataacctggcatgacaaaaataaatatagacccctgaatatgacgaaaaaaaataggtttaagccccgcatgatgcaacaaacacaaaaacacgaacgcataacatacgtaagtacaaaattaaaatacaaactaaatctgcaaaagtaattttttatttggcaattctttattttattataatttttttgtataaatgtttttaaatatatattaaaattatatgtatattttctagaagatttaaattatttataaaataataacttaaattcccaattttatttttgttggcaatttttttttcttacaaaataataaaaaaaatatttgttgaaacaatccattaacactttaaaaattaataattaatttgaaaaatattaaaaaaaaattacaatttcttcgtaaatatggaccgggcccgtttatgatccatattttaaataggaataattacataaggcaccattttttgtaaaataattatatttttacgttcaaagaat

SEQ ID NO: 132419 - DNA, 742 bp, Cannabis sativa
  modified_base (176)..(177): a, c, t, g, unknown or other
atatatatatatattgttaaaattcttccaattcataaaaagactctaaaatagtggtagttgggagctatctcccacaaacttaacaaatcacaaataggaccctgagttaaaataagttataggaaaaaaaatgagaaaattgtattatatactcactttactttatttatttnnatttttacctttatttttatattcattgagatatacctaattttatatatgatgtccccattatatctcttagattaatataaattatatgttatacttaagtggagggtgaaggtatatttggcaatccactcacaaaaatggatagattttaatgaaatataatctgagggtatttttgattaatggatacaaaaaagaagtatttttcaacttatcaaaaaaaaaaaattaggcccttattataagaataaatggtatatttaaaaattattaaaaaaatttgtatattttttaaaagatatttttttatttgagtccttaaaatggtgggcccaaagcgcgtgcctagcacgccttaatttagggttgacccggaccacaaacattgtttgagaagccccacgaggccagagtgtaagcagccaagtttgactccctattacaccaaataacgaaacaagaaaaaaagtcaaaaagattaaaaatagagaaaattatactcactatggtattttaaaagttgtttacttaaatatggtatttttaagtttgaccaatttat

SEQ ID NO: 132420 - DNA, 844 bp, Cannabis sativa
gtttggcttctgtagtgatttactattctatttgaaagaacttaagaatgaaaagtgacgtgccgtttgtttgttccatagagagagactgtcgttgaagaaagcgaccgtgagaagcaacaagttgaagttagttcttttacaacagtaaataaaacgacatctcattcctcaaatttgttaaatcaacggtttcatcaataaaaaaaataataataaaaaaaaattgaatcgaagatgtttaaatacaaaacaaaattgtgataaccagtttaagttgagggaggatacgttttttacttttttttttgtaagaatggttgagaggtagtttgttttctatataatatagggatttgaatccttcaccattattttagagcactgctattaagtactagtaccagtactgtttagtaccatttagaggtgatatattacgattagttagattagttagtgacattctataaataaattaaaaaaaattatatgatattattgatgcggcatcaactggtctaagaagatcgtaaaaatatagaggattgcaatgaattaattttgaataataaaactgtaataaataaattggacaccagagatttatagtagttcacctcccatgtcgcgatggtaatggagttacgtctatttttatttttattgattaaacccgacacaccagaattatattctcaagagtgtatagataaaaatacagcaaagaatttttagataaaatcataatcgagacttatgaatataggactcatgggagactcaacattcataaatctgatcaaagttggtggttgtaaggttcttgggaacaataaaccaa

SEQ ID NO: 132421 - DNA, 1136 bp, Cannabis sativa
taatttttctaaatttcaaaaaaatattataaaatattctaaataaataactaaaatatagacaactacaaaaaaaaaaaagtgaactaaaatattctccttaatgttcaaacaaatagaaagtgtatcaacaaaccccctaaaggtataatataagacatttctatactaaatatatacacttcattttataaatgataagactgtagaaacgactgaaatttagaatgttttaacagttcttttaaagtttttcattaacaatttcttttttctaatatatacaaaaaatattggtatgttttctaaaaaaacattttatttcaaattttaactcactacaatatttcttttatcttttatcttatatatagtgaatatagctatacaatataatttttcttttaacatttcaattcaaacttaaaatcattacacatattataaaaaaatatctttctattattattttttacccaatccacatcttttttatgaaatgtagctatctaacaaaaattgttagtttaataatttttttcgttaaagctaacggttaattatttttttattttaaaaaattattttaataattaaatttaattaaaaagtatcaacaaaattagataattattttttttatgtaaatcttaatcaaaatttaaattaatcgttaatttaattaattaatgatactttataacaaatttacagatatatatacatactttataacatgttatattatttaaaaatatctaaacttatttatttattttattgtttaataaagttagttacacatattttttttataaataaatttgaaactaaattaaattttatatatttaaaaaaatatataattaaattatattaaatttaattttattgtgattatttaaattaataattaagtaatagaaactaatatttaaatttaatatctaatatctaaaaaaatacatttatattattattttttaaaaaaacaatatgatagaaaaatgtttgtatttcttaaaaaatcattgtgacattattattgttgaccgaggttttcggcaactaataaaatatgaatataataatgagctgtaagaaagcgagacgaagactttttacgtggttggggc

SEQ ID NO: 132422 - DNA, 1059 bp, Cannabis sativa
  modified_base (738)..(744): a, c, t, g, unknown or other
gtataaatttaatgtgttttaaagttagttgttattgtaataaaattaattagttgttttaatttaggtaaaattataaaactaatgcaggaaaaagggggaaaatatagatttttatgcaaaaatctgcattttttttctctttttgttttttacattctcggcagtttaaaaccattgcctataacagtgtatatgcgacggttttaaagcgtgccctatactctatagtataggcaatagttataaaacagtcgcctataccctgttataggtcgtcgcctattttacccgttttgcgatggttgtataggcgacagttatagaaaccaacgagaatactttaaacgactgtttaaaaacattagaaaaaacgatttttgtagtagtctgatgacaacttagcagatcctttgacgaaaggactagctagagagaaagtccataaaacttcaaaaaagaataagactattgccgttagaaaagatgtgtcactcataatggtaacccaacctaatgactggagattccaagaattaggttcgacgggtaataacaagttatgaggtgatatgtgttgatcatgctattgttatatgagaagcatgaagtcctgaagcgataagaggatgagttaatagaaactcttaatgagatctgtactctatgtgataagatcatggcccttaacgcacgggcttgtttgaatacatccttgaaagattggtgcgtggtacnnnnnnngagataaagtttaagacttcgagtcactctagtaaaatctaaatcgtattcactatgcaagattcaaatcgaaagatatctttgttgaagcactatcttatagttgtttgatattgctcgagaaaatattctttaaaattttaagtgaaggattgttggaacttttgtgaaattgtataaaaataaaaagtgaagcgtgtgaatgattagagtcctacatggaatatgaacacttcattagaagtgtataaatagtgcatgtttgagaattgggtatgggccccaaggggtacccagttttgcgcgcatgggtga

SEQ ID NO: 132423 - DNA, 666 bp, Cannabis sativa
ccaccaagcttttgggaaaaatgatttaaagagaatgcaactaaaactctttctaaatgaaataataattaatttataataatcgcaataatttagaatattctttttcaatcgataaaactctacaaagtcgtaactcaaataataataataattgatctcttaataaaatatcaattccctacaacaaaaaagtaaaacttgtggatatatgaattttcagatgagcattgtctgacaatcaggatataattttagggtggattaattaaattttttactaaaatttaaaaaattatattacattttttatttaaataaaattgaaataaattttagtatctaaataataatatgagattttataattcttgtttttaaaaattttatgtaaaatcttgtgttaattataaattaaatataatttaaaataattttttaacatgataagttttttaccaatagaaaagttatttataatttaaatgctctatgattatacttttgtatttttttttattttcaaaaaagtagatttatatatataaataaaaatagaagatagagttgagaaaatcaaattcaaaattaggtctaccaagtaatgaaataaatatttataccaattattctgtctaataattatatattgtttctatttctaat

SEQ ID NO: 132424 - DNA, 804 bp, Cannabis sativa
  modified_base (758)..(760): a, c, t, g, unknown or other
atggtaaggtgcatgaggttccatatcaaaactaattgacaatgagaggaatagctcatgcatcttatatgcggtatttagttttaacacattatcattatgagactctctaacaggacaatattataattttataaataaatactctccatcattccatcgcttcattccatcaaacaattcaaaatgattgctactctcctctccctccatcttatcctacattctccatcctccttattttccatctttcctcacaaacaaacatcattctacaacaagacaattaatatatataaccaatatattttataaaaaaagtatcggaataatttattttttaaataaagatatttatggttggacttttggagaaatttttttaggaagtcgatcaattaatttaaatcatctttaattgtaaagtctcgcataatatctacacaagaatcatcacatttttttctgaaagatgtgagattatacaacttatattaccttatcattttataaaaaatattgtattttttgtgtgatcttttttttaagtcattattagtttgtttctttctttcttcttttttaccattatgtagttgagtttgtagtttcaaaacctatttcttaacagcgacgatgactgaaaaatagtaaagaaaaacaaaagcctacttaaagtacgtagcattaatattcttagaaataatataaaaaaaattatgattatatataaataagggataatttcacaaatacannnaaataacaaaaaatttacaaaaatacagttttatggaattttaa

SEQ ID NO: 132425 - DNA, 780 bp, Cannabis sativa
  modified_base (60)..(62): a, c, t, g, unknown or other
aattatatgagacccgatacttagttagaccaatagcgatattgacacataggagggtgnnnggcaccactggtgtcctttagcaattctctatataaaactatgttgtatttcaaaatttggtgaatctaatttgctctatatatatactacaaaatgatgatatgttgtcgaaagattttagacaacaccgaaatatgtgcaaataatgaaggaaacgaacaaagaggtgcgaacactcaattagagtagcgagtactcaacaaagaactactaaacataacagatagttgaaaaatgatgtgaacataaagatatatagtggttcagtcagatcacggtcttcttagtctactgttgcaaatgatttctgcttatatagtttatttgatttggatcactcctttatatagaaagcaagtgtccttttagttttacatgagtgatcgcggttttaagaccacttttacaaagggatatttacacagggtactgcttttttacaaaactttcttttttactgttatacgcatatattttcttttttactgtataatatacataatgtatactgaataaagttttttccctttaatgctttttctcacttgaagatatatttttttttaaaaaaaaataataaaggttgatgagaaaattggttgtcacgtcagtgacatatatatatttaaaaaaaattaataatgaaagtttttattgtatttaatagtaaaaaagttttgatgtgatggtattgttattttgtgatttttttttttt

SEQ ID NO: 132426 - DNA, 725 bp, Cannabis sativa
aaaaaacaaagaaggagatggaacaatacctagaggttacgaatggcagaactcagatctgaactccattggttgtccgtcgttggaaaaaagtcactcgtatgggctgctggacggagatagaactagagaggaagagggcccttcgtgtgcggttgaaagagaacgttcagagttttccttttaccttgtttagttccaacaaattaaacattaaagagtaaaagattgattttttttagtgaccagtcaaacaagacctttgcttcaaagtgtgatagaagaggcatgaggggtctatttggatagtcaataaaaaataaatctttaatgtttttttctagtataagtttttcttttttttttagtgctaaactaaatatggtccttgtgctttatacaagagtggtgtaaaagctttcaacatacctttcatcctattttttatttttctcaagcataaaatttaggataaaaggtctcatatgtagtgattgttgttttaattttgaatacaccaatttaggtgaatacttggagttctgtaagtgggtttctttcgtaacacgaatactcagcagtttttattgttatataattttctccaacaacaaatataattataaaagggaaatttgatattatatacttaaaaaaagcataaattatttttatatgcttcttaaaaaaaatgtaaaaataataccctccaaacatctttaatc

SEQ ID NO: 132427 - DNA, 795 bp, Cannabis sativa
cggtgccctacctcgccgacaacaaattgtcggtgatgaacttatgccggcaattgaattcttcggtgtaaatacttttgccggcacaaaatgtcactgaaaaactacgccgacgagatacttttacttttggcggtgacaaaagtgctttttcttgtagtgagtacttctggctgccaatccagttctgcatgctcgaactaaacacaatgaaattgacttgtattttattcaggacaaagtgttgtaacagcaaatacaagtcaaacgtgttttagctcaagcacaaattattgattgtcttactaaatccatatccaatttgaggttcaataatattcgattcaaactcagtgctgcttcaaaatccacactacgtttgagggaggctgtcgaaggtgatcttgagttagtcaatcagttagttagttagttgttgtaactaattctttttgttttgtcatccttctaagtgaatattagtagtttgttagagcttattttgctctgatataaaaactctgtattgtaacttgacacaagtaataacttagtcttctttgttatcatcttctctcttcagattgaatcctcacacttataaagtatcattttggtacatttattattaataaatgatgtaaaatttgaattaaatttggctcaaaaattttaatgttatatttaattcaaattttacaacatcacgttcacctcaatacattaagagtaaaattaaccgttcttttaatagaaatgtgtaaatagatgaatgcattaaatttttattggaag

SEQ ID NO: 132428 - DNA, 1509 bp, Cannabis sativa
tggttctaacatggtgaaatggattggtgattgaattactatttttggtgctttgagtatgccatgtttatgatattatattgatctagagcagttggataggtttggaatggtttcggctcgattttgaggatgaaaacttagaacttcctgcctaccaaaaccgatcgaccagttggttctggtattgtagaaccggttgatcggtcggcctgtaggggaaaattctagggttttctccttgaatctaatattcactcggggtgttttcaagacctggtttagggcatttggaagttataaaacctattttggagctagtgaaagttaagatttgtctagttacgggagttagtgttattcccggagtttttgatttaaggtatttattgaattttattgtcgtgacataggacctcggatcgtcaagttttatttccactcaggtcggtccgcacgcctgacatttaattgaggtaagaaaagctttatgcacttctatccctagcggcctggaactgtttctcaaaatccctagacagatgctcctaggaagttattgagtggtgagtaaacttgttaaactagctgcttgttactccaacaagcgaggtggggaacaagatacagcgtaaattgtttgtcacattgctcgcttgcattattgtattaaagttgttcaaatgcgagaacggatcagtggttccgtcatatgatgagacatgcgggtttttgaatcccgaaggaaaaggggtactcatgatatctggatgatacggcttgagctctttgtctgagtcgtatctagattgtctccctagttctcccacttgatatctcctaaacttgtcctccaactcgtttattcgcaattggatgggatcctcttgctttggaccgaactgttggagaaggtcaggtttctttcaattaaagtgctctcgcagatctggttgggagtaaccgctgacagacctcgtcttactcatagatcgtgtcctactcatagacttcgtccaacatatagacttcgtcctacacatagacttcgtctttgagtgactcgcggatttgctagttcccatgctttcttgatcattagctcgttgagtactttctcctctttgagttgatcgactgtgggtccttgaccacctcgaggtcacacttgcctcttcacgctctgttctttccccctgattctggtttgtcgcatttcccccattagggtctgtacgagcctttgctctatgggttcgggaagaacgttggtgattcctcacaggtgaccttatttctccaggctgagtcccaagattctcctcattttcatgtggaatttcttgttcatcagtttctggttgccctccattctcattttcgtgagagggttctggctgatcattctgattttcagggggtatctccttttccctgggttgttcatcccgggcattttcctgtctcctggttcgtaagccacgaggtctgcctcgtggtcttctcact

SEQ ID NO: 132429 - DNA, 1089 bp, Cannabis sativa
caaggaattctcaaagatctccaatctgcttgttaacggggtaccttttgagtttggagagcaatgcttgaaggccttccaagctcttaaggagaaattgatatcgacacctatagtgacttcaccgaattgggagttactgtttgatttgatgtgtgatacaagtcactacgccattggagttgtcttgggataaggagttgacagggtgtttcataccatatactatgcttgtagaaccctgaatgatgctcagctaaactatgccaccacagaaaaagaaatgctagcaattgtgttcgcgtgtgacgtgttccggccatacctgattgggaataaggtgattgtttatacggatcactctccaataaagtaccttatgaccaagaaggatgcaaacctaagattgattagctgggtgcttctgcttcaaaaattcgacattgagataaaagagaaaaagggaactgaaaccttgttgttgatcatttgtcaagacttgaattagaagagagccaaaacgcaaaggaggtgcaaataaatgaagagtttcccaatgagtaactctttagtttgagggaaagcttgatgctgccttggttcgcagactatgtcaacttcttggctgcaaatgttacacccctaagatgtctcgtcaacagctgaaaaaattaatttcagaggtgaagcactactattgggtagagccgattctttacaaactttttgttgataagataataagaagatgtgtgcatgaagaagagatgtattctgtcttataccactgccatgccttaaaatgtggggggcatttcaatggcacaagaatttctgctaaggttcttcaaagcgagttctattggcctactctttttaaagatgctaatgattttttgaaggcatgtgatcgttgttagagaacggggtatatttctagaagaaacgaaatgcctttgataggtatcttggaggtggagttgtttgatgtctgggggatagatttcacgggtccttttccatcttccttcagaaatctgtatatcttattggttgtggatatgtatcaaaatgggtggaagttgcagc

SEQ ID NO: 132430 - DNA, 1087 bp, Cannabis sativa
atctttttttcataattattaattaatagattttatttgatatatatagtaaaaaaaaccaaattgcaaaatcacttatgtgtaaaagtaaatagttaactcattagcaggcccggctctgggcataggcgggctaggcctgtgcctaggccccacccaacccaggggtccaatttttttttttcttttaaaattatatatttttttttactgattttaaaaaataccacatttttcctaacgtaagggcccaaaaaaaaatttccctgtggcccactttgtttcaaggcgaccctgctcattagtgatgactacaagttagtgagacaaagttaagacaacgattttgaatgtaattgtgactacaagtgagtagggtgatgataataattttaaaaactaaccatataatagtatatataataaataaaaaattatcattcatcaaattcaaaataattaaaaaaattaagactttataatattaatttatttttcttgtaaaaaatgaaagtttagaaaaataattattcatgttattattaaaaaaattatattaaactatatcatatttaaaatgtgatagttttattttataatttagttatcactaaataaaaatagaaccccatgcaaaacccaatttgttttctagtttaactaataattcaaatttgagaaatgattggtctaaaatcattctgacccgttcttcttctctttctcaatcccctaatttcataaggagaaacttgaatggaaaatcagcattctaaatacgaaataaatagcctgaatgaaaccaaaccgtaagcacaatgagaaaaaagaaataacttacaaaccaaaataaatgatgcaacacagcacatacaatgattatacaaagatcatcatttccattagtcaaaactcaaatctcctaatacaccagccagaatttagtgatgaaattgagttttccgattcactgacaatgtcctataacctttaaagaatgtttttttttttttacatttttacggtttttcaaaaaataacacgaaaataatataaaatcaaaaagaaaactacataaaagtaacat

SEQ ID NO: 132431 - DNA, 666 bp, Cannabis sativa
acactcaaaaaactaacctaataataaataacaaaccaaataacacttccaatacacatatattctaaactattatgtatacaatttaacaaacatacactcctagatctaatcactactacaaatacccccttttaagtccatcagagttggactagataaactttcccagtccattttttgttggacataatagtcagggacataaaaagggtatttttctagtccaacaatgttggactagaaaaacatttctagtccaactatactagacttgaaaatcaatcccacaacgcaaacccctttcaagtccaacaaagttggacatgaaacttgattgttggactagaaaaaatatttctagtccaacaatgttagacttgaaacttgttttttttttttcaaaaagaaaataaagtgcaagaaaaaaaaatcatttatatattaaattataaataattatttatattttataatattatttttttccaaaaattatttattattattttaattcaattattaaacataaaaaggaatacaaattctaaacaatcatttgatatttcaatgtttacaatatttgttaaacataaatatacataacaaaattaataaatattgtattaaaaaaaatatatctttaactggtattgtaactaaata

SEQ ID NO: 132432 - DNA, 599 bp, Cannabis sativa
  modified_base (537)..(537): a, c, t, g, unknown or other
aaagtactaagcaccactggtgcctaatagcaatgctcgagtgctaaatatatttgttactttgtacacaatatacacatggtaaaatattattaggtcacctaatattaattattaaaaaaaattaaaatattaaaagaattaaaatcagaaaataaaataaaaatttctcttttttctgttttcttttttgtctttctttcctttttttttttaattgttcttcttcttcttctttgctgtccaaaaaaaccaaaacccaaaaccacaccgacaagaccccaatcccaacaaaactacactcccgaccttgtcaaccagctagcaaaaatctaccacccaccctttcaagctctccctctctttgaggtttcaccctctcgatttaaaaaggtaattataaaagtataaatgaaaaaaaatcccaaacaaatttctcaatcgtagaaaagaaaaagttttatttatttttagtatattttagatttaaaaatagtattaaaataatttttgtttttaaatatatataataatatnataaaattaataaaaaatattttattatgtaactgaaatattttgttaagatcggaagagcg

SEQ ID NO: 132433 - DNA, 1743 bp, Cannabis sativa
gcctaaaaccgaggtcaatagtaagttatgcatttcgttgatcagttgaattcgtaatacatttaattaactaatttttttttacatatattaatttttattttaaattaattttgatgattcatagtgtgcatatggagttattacaatcaatgattttgagaaggaaataaaagtcgtcaactgagtatgaattttggagaccaaagccgatactgcaggcgtttttcaaagggttttcagcattctattcttctctattttcttcgcttctctaaaattaatatgtgtgaatttacaacaatgaacatgagtaggtaaacaattaattacggtctagacggatatttttttatattgatttatggttctaatatgactttattttccataaatttctatgtattttattttatttgtacttaattacttttaattgcctggtcatcaattaattattttatgattttgatacgaggtctgagaactgaatgtcaattatgctatagcgaaatagaactgaatttcgatataggacgagagtacttatatggtttagatagctgatatggttttccttagtaaacctgctattgcatagaaattggtaataggaagataatcatattagaccataatgagtagttacaattaaaattgaaagccctaacttttattaattgttaattttcctattaatttacttgcttcacgatttttactattcttattgtttcctagtttaaattttctcttaaattttattcagccaaatttaagtaagagtttaattttaacgtacttaactacaatcctcgtgggatcgacctcactctttgtgagtaatacttgttcaaaccacacgtatacttgcgtgttgcaaaataccacaacaagaggcatacatgatggtggtacaaactcataaaggccttattgattagggcgacccgatggtgatagatcctaacgtgcagacccctagaaacacgagaggacgacaagggtcaaacctcgggtcggtcaatggagaaccgcctattgtgggccgtggagtgacaccaggcgtgcaagagactgggaacactagtttggcagctgagcaatccactcccaacactgaggtcccgtcaaccaccaatgttctgaggcttatcggagatgatgataacatctaaaaccttagagtagcccttgcactcatgcaaggtcataataacgatttgaaccatgacaaggaggatctctgttcaactataaaccttgcgtttgacgagaaaagacgtcagtttatagaatggagggacagggagatggaaactctgagggcttagcaagcagccatcgataatcgcacaaggcaggacactgtactgataagacggtcctaccaagtcaccgatcaacaaccagcaactacgtctagtatccccttgggcagttcagaagggtatgcagctgggcataacgtagaaagtcacaacaatcaaccgtccaatccacggccagaggtttaacctgtgggccaaacggtagattaccagatcctgcctgattgtaacttggttggagttagatacaacaacttcaccccaactgaaattgttggccaacctataggccaaataagtcagacaccaagaccctctggtacttcagtatttgataggttgagtgccgcacatgacctcatgactgattttaaccgaagaaagggtctagacgaacaatatattccaccaa

SEQ ID NO: 132434 - DNA, 1173 bp, Cannabis sativa
agaaccgatctaatccaacatccagtggatgttggatcaattggatgactgaaattaattggatcggatcagatggtaaaatctaatattcaatatacgattgaatcagatctggatagacctaaaatattagatgtggtccaataaacacccctaatttcctttatatttaaaatataactttaaattcttaattagaataagattagtttaaataaaatattgtcttcaaaacataaaaataaaatattatgaaattaaatattaatttataactagttaataattatataatttgtaactaactagtaactaattttattctaaattattaactagtaactaactataatatactaaattactaactagtaactagttagtattaatttaatagttatcataattctacagaaatttcagcagcataacgtctacaatttaacgttctcaaaaaatctaaagctactaataacaacaaataataatccaaaactagattaaacaatcataacaacatttagcaatacaaaaatgtgttacctatccgatcgcagtacatgtattcgcagaatatatttcactagcggtgactatttaagatatttaaactcatttaacatgcattttattccacttatccgaccgcagtataatatatatcgcagaacctacttcactacggattaatatttaagatatttaaactcttctaagcattcataattagttaataaataaagttagtaaatgtatacatctagctagctagaaaccgattaacactaaataagtcaaattctcaaaaattaacctcacaacctacaatataaaaaaaaaaatactagaaaattaaaatttgattatacttactgattatataatatatgagtaactagttaatttatcactaactagttactaatgagtaactagatcgaaaaattagtaactagttagtaataaaaaaacatgaacataaatgaaaaattgtaactagttaaaattaaaataagataaaattaaatttaatatgtacatagaaaaatagataaaagggtcaatttttttttttatcttatatttacatctatttttttaataaaaaaaaaagaaaataaataaaagtagcaaaaattaagtaatgagctcacacttttatatattatttaa

SEQ ID NO: 132435 - DNA, 524 bp, Cannabis sativa
atcttccaaggtacacctacatttttttctcaaaattttctttccaagtaaacctaaaaataaacacttatgtatttattcgctgattggcaacgcttaaagaagcacttttttgtgcttttcaatattgaaaagctctcatatatatatttggatgtaggggaattcttatatgaaaaatgagggtatagtttattttttatgggattataggggtttttttttttttttgacatttatatgtgtttatttatgccatatttttgtaaaaaaaaaaagtggaaatcccatatttataaataataagttttgccggaaaagttgtcgggaccgaaaaagtcaccgatgacgaaaaagtaaccagaaaagttagtgatgccgaaaaaatcaccgttgccggaaaagtcacagccgccaaaaaagtcactagaaaagccaccagaaatagatgtctcagatataattaaaaatataaccggtatgaataaaaactaataaccaaaaacggttataattgaaatata

SEQ ID NO: 132436 - DNA, 744 bp, Cannabis sativa
  modified_base (490)..(492): a, c, t, g, unknown or other
actccatctcagatccgcatggtgcttctccattcatgttcgatccgtcccctactggtgtaatcggctctgatcccgtcgccgatctccccagttcgggaccagttgaacacctttccatcgcaccatttagttcctccactactccagcatcgacctccacaccatcacaaattcaaacaaccatgctttcgtctttttcctcctctaatccgtcctcggttcagacggtcccttcactggcgtcatttttttccggcgccaccacggctccggcccagccacagcccacgccgttctttaatggtaacaatccctttcttggaactctaagccatgtggcttatactgataactctagcttttttgctaatcaaggcctatctcgcgcctctttcgatcgaccttctcaagatgatcgttatcacttgggaactggagatcaaccaaatataatttcctcattccttttgactggtcaagataattnnnagtcttggaaacgagcggcttcgattaatatcgctgccaaaaataaaactcctttcattgacagcacttcaccccatccaccacttaatgatccttctatgtccgcttgggatcgatgcaataacactgtaatatcatggatccttcaatccgtgtctcgagaaatcgatgcaagcatcatgttcaaaactactgctcgcgagatgtggaccaatctccatgaccgcttcaatcagagtaatggcccgcgca

SEQ ID NO: 132437 - DNA, 1232 bp, Cannabis sativa
  modified_base (1136)..(1149): a, c, t, g, unknown or other
ggtcagacaatgaagatttccgtacaattttcttggttcgcgccatcattctactcccttcatgcacttcatttttgtcttcttgcaaggctctagtttggaggtaagttgtgataggtgacatctgtttttgagtgtcattcaacttgtcaacttcttctgggataaaaatgctaggttcttctaggaactgtatgggcaccaagtttgctttatcagcaatggtgctacatcccagacaaccaagtacatctattgtagtattctgctctctagggatctacttaattttatagcctttgagatgacttagcaagtttttgatttttctcaagtaggccaccatttttcacctcgagctgtgtgttcacctaggacttgattcacgactagttgataattgctgaatatgtttaggtggttagcccgtaccccatgcgccaacttgaggccaactattaaggctttctattcagcctcatcgttcgaggctttgaagccaaattcgattacttcgtgcaattgctgccctcaggtgttgtaagggcaatgcctgcgccgaaaaattggtcagtgcagtttcaatcaacatggagtttccaggttggttctttcggatttttttactgctcttgctctcgtttcttctctggctcttacttttctcctgagtcttaagggatctcaagagttgagttggggcactcagctacaaagtctgcaaggggttgacgctttatggctggttttgtttggtatgtgatctcaaatgggccaagctcaatggcctattttgtagtcggcatgatgctttaggtttttgcaaaacctatcgcagcagttgatcagtatacacctttatagggtgtggttggaagtagggccttagctttcttgatgccaagagcaagatgtaggtcagcttctccatgagtgggtgcaaacttttcgatgttgattagccttttactgatgtagtacatagggtgttatacattatattcttctcttgtgagggcagcactcagaagatgttatgttattgctaggtacatgcctagctcttcattgtctaggggtttagacagcagatgtggttaggccaatcgtctctgttgggaatattttactaggannnnnnnnnnnnnncaagtatgttgattaacatcctaagtatgaatatctctaaaacaatgaaattaaacacaaaagagtttaagaaaaccttacat

SEQ ID NO: 132438 - DNA, 725 bp, Cannabis sativa
tacctcaaaagccatcgaaaggttgcttttttttttaaaaaaaaaacttggaaaacactgaaatttttggatgcgagatttttaagttttttctgtttccggtaattattttggatttcggtatttatactgacgtggccatcggtatttgtgtaaataattttgttgaagatatctttgtaaataaaattaatttcaagtataatattgaaaatgcctcatttttatttgtttctattttaattttgaggaccaaataaattaattatttattgaattaatttatatatattcggtcaaaataaaaaaattaaaaaaaaaaataaatagtgtatacatagggacacgctggaggggtgactgttatctttgcagtacgattttaaaaggctagggactctaaaatagtttagtgactcaatttgaaggatcactacatattactttttcagtcacccatattagtgacgcatagtgcagtgtcactaaaaaggtttagagtctcgtgggtcactgaaatctatttttgtagtagtgaagtgaacaacaaaattaacaaaataacaacaaaataatttaacaacattccaactttaatcttatatttgatatacaatcaacaaaaatgaaaagatagaaaattgagtagatagacaaagtgtttggttgggaggaatgaaaatttaggaatgagaatgagaataggaataggaatggaatagaat

SEQ ID NO: 132439 - DNA, 546 bp, Cannabis sativa
tcatttttgatgagcacaaactcctcaacttcatgctgctttgaggatttttttctgcccaaagttgttcgttgttaggtttttgtttcttttatagagagtgattctgaagttgttgtgatttctatctattatttttctgagagtgtctccaagtagagttgttgttagatcttttaagttcttgttatttgttttttcaggtatatgccttcaacatgtaatgcaaaatagtaataccgtaacacatggtgagtatggtatgcactacagatgaaaaaaatgaggtttcttggtattaggagaaatttctccttgtttgaaatagcttaaccattacactaaagttaatattatgtctataaatattatttattataaatatgtgtcctaactaactaaattgcataaatattttttttttcgatttttttagggatgcgactgtcccacctcgcctacatgtgggtatgcgcctgatattagttaactctcaataataaaatggctaattaggatttttgccccctaaactttgacatgtac

SEQ ID NO: 132440 - DNA, 721 bp, Cannabis sativa
agaaagcactgaaggtggcaacttagatgagttttacctcttttcaatttttttatttttcttatttatttagttttaattattttttattcaacaataatataaatactaattattatataaaataaatgttgcagttacaaaatttatagcaccagtcatcattcaataaacatgtgaaacatttaaacataattcaaaagtagttacacaatttttatagaaaacttttttctatgtctattattattacactaaataaagatgccatttattaaacaactacagtataaaaaaaaaaagtgatacatataaaaagagattttcacatctcttttcattgatgataagtaatatatatttagtttttaggcaccaatctcaaagtttcactaacaccaaaatctaatttatcctttaagtgtctctaagatatgcataacaattattattttttttttttccttctaattaatctcataaatgcgaatataaaaatatgcattattattcattttctttgttcttctaattaatcttattagtattgatatgaaaatttgtattagaactaaactttttacaaaagattttcatgaggtgttctattcttactctaaaaattcaagaaaaaagtaagcatatctttatatattaaaagtgcttatctaacggtattttttggtttaacagaatatactttaaaaataaaagaatattc

SEQ ID NO: 132441 - DNA, 644 bp, Cannabis sativa
atgtgataatttaatatattaaaatctgaaaaaaaaatgtataattatttgtcaaatataaaaaagaaatttcggaaaaatgagttacttttctgccaaaacttatatttgaatgagaaattagatctcatataatttaatataataatttttatattgaatattgttaaccaatatttgtaaggcgccaccagacttgacattgggcataggtagactatggtagaaattgtattgtatacccactttattttatttgtttttatttttactttcatttccatattctttaaaatatcctcacttttataaataatgtccccattatacgccttagattaatatcaatcatgtgctacgtggagggcaagagtatattaggcaacccacttataaaagtaggtagattttaatgaaatataatatgagagtattttttattaacggatgcaaaaaagaggtattcctcaacttatcgtcaggctaagcctgtgtctaagtccctagcttagaggcccaaaaaatatttttcccttttaaaattatatatttttttacttaaaaaatattaattttttttttagataaatgctaaaaaaatatttattttttatgactcactatatttgagggcagtttaggta

SEQ ID NO: 132442 - DNA, 533 bp, Cannabis sativa
tttaggatgttaataaacatacttctgagtagatctaagattctggtaaaataatttccaataggggcaacaccataaattctgtttaataaagtccaagtatcacactttgaagaaacataagacaaaccataaaagcaagaaagatgccaagttatataatcatcaaaggttacaaaacagtctatgtgatcaggagagtaagtcaaaatattaactttaatcacattgttccaaaacaaaagtaaacccccccctaaaccacttctaagaacgtcaaaaatattatcaaaaggaagcttaatcctaatactagaactagatcctgaagtcaactttgattccatgacaaaaaagagttagggctggtgctgcttcacaagcagggagaggttgcgaaatgccctgggactccctaatccctaggcattccaacttatgagactcacttttccaagtgaggttgttgagcaacacccgccttgaccataggtatgataatctacaacatagttgttgggttttatgcccta

SEQ ID NO: 132443 - DNA, 1011 bp, Cannabis sativa
  modified_base (359)..(370): a, c, t, g, unknown or other
aaaagcataaaaaaaaatgtgaaaataaagatatattcaacaaaaattaataatataaaataaaaattctaaaaatatatattatttatatttgttaaaaaatttaaggacttttttaaacttaaattttgacaaaaattaaattgtgcgtaaatatgtgaaaataaataatattaactttagaacaaataaaatatataacatataaatttaacataaagttttaattatttaaatacattaaaataagaattataagaaaatactttttgtaggaaaaaaattaaatattttttataattattttaaacttgataaatattgaaaaatacaaaaatataatttgcattcacttgaannnnnnnnnnnnaactaattgggtaagattaagttcattaatcactcacatagaaaataaattatactaactttgtgataaataaaaataaaagaatattgatctatttaatgtaaaattatatcacccacaatagtttctaaaaatatgtgaaaataaataatattaactttggaataaataaaatatatataacctataaatttaatattcaaaatagtgtcatctcaccaaaagtacaaataaaaatataaatttaaagaatcttattattctaatgaaatatcatgtattaataaattaatataattttaattatttaaataaaaattaaaataaataattgtaagaaaataacatttctatgaaaagcaattaaatgattttattaataattatttttttaaaaaaaatataactaattgagcaagattaaatttatcaatcacccacataaaaaataaataatgctaagcaaaagaatagtgaactatataatgtataagtatatcacccacaataatttttaaaccatgtgggacttgtttaacatgattcttatatattaccaaaaacataaaaaatattagaaaatgtgaaaaaatgagaaaaaaaaaaaaaagcaaaagaaactcacataagatgccacatca

SEQ ID NO: 132444 - DNA, 904 bp, Cannabis sativa
atgtagcctcgcagatggtgttggacgctgaagccaatggagccgttctttccaaatcttacaatgaagcctttgagattttggaaaggatagttagcaacaaatatcgatggtcaactaatagagctcctacaagccaaaaagtagaatgtgttcttgaagtagatgctttgaccgctctaattgctcaaatggcctcaatgaccaatatttggaagagcatgaatatgggaagaaatccacaaccagctgctaccattcaaagggcagagatatcttgtgtttattgtgggaatgagcatacttttgaaaatttcccttcaaatctagctttggttcgctatgtgggtaaccataatttcaactgcaactacaatccatactcaaactcctacattctagcatggaaaacaaccatttccaccgagattttctcaacaaccaagacctcaacaaccacactaacctcaaacctctcaaacaagttccttggagagtttaatgagggactatatggccaagaatgatgctataatttagagccaggcagcttctttttggaatgtggtaatacaattggggcatttggctaatgatttaaaaaatagaccacaaggtactttccctagtgacaccgaaaacccaagaagagatggaaaagagcattgcaaagcagtaaccttgagaagtggaaaaattctaaagtcaaatgtggcagagacaaagggcagcaaggagcccacttcaatccaaacataggggtaaatgaagaaaaaaccagcaagtagaactgctgaaattcccccagtaattacagtatcagatcagcattctgctgcagaaaagcctttgcaaaagccacctccaccatttcctcaacgattcaaaaagcagcaagaagatg

SEQ ID NO: 132445 - DNA, 710 bp, Cannabis sativa
ttttttttaattgggtaggttgtatgcagaattttacaaaccgatctttacgttgggttagaaaatatgtagtgtaaaccgactaaaccgaccgatgtacagccctagtatattctaaagaggaaattataatatctacttttcattacttattttagtttttacaatttttattactctttaagttatacttagttttgtaggtcatatttctattatgtgcattagagactctaattttgataaattgagtgaggttatacttgatattttaattataaaagagaatatttatcaattaaaattattttacagttatatttaattaaaatgtaataaaaaaagatagttctcaacttatcaccactctagagggacttctcaacttaatcaacaattgcaaggcttcaaaattcaaaagagaagtcaacatttccattcttaatgctgctgtattaagggtgttcgcggtgcgggtgttgtagtttttgaccatttttttaaactaactcgtacatgcggtttttctaattttccaaaccgcacccgcatcgcgaaactaaaaaactgcagaaaccgcaccgcaaaaatggtgcagtgcggtgtgatttttacggcttggactatcaccaataattaaactatcataaatacaacaaagtttgagcaacacttgttaaaaatagcataaggcttgaaaataaatataa

SEQ ID NO: 132446 - DNA, 558 bp, Cannabis sativa
gactcctatcatgtcaactaccctcacaacgatcctttagttgttgaggtccaaatagctaatatgatggtggctagggtgatgatcgacaacatagcatcatcaaacatcatgttccagcaagccctaatcagaatgagtttgacattagaagacttggaaccatgcaggcagcttatgtatggtttcagcgtagctgatattgctccatatggtaagatcaaactgtcactcactattggaactaccccaaagcataccaccatcatggccacactcatagtggtggacgtgaagtcttcgtacaatgtgattcccaaaaggcctaccctctacgacctttgagtcatctccttagtatactatttgtctgtcaagttcctaacggcagctagtacgagttgtcagcttggcaatcaaggaacgaccctagaatgttataaggcatcgttgtcattcgccacaaagacctcctatgctgctatggcaccagggggacgtgcaatgtgaaagtcagtagtcccgtgatccgtaaagggaaacaccgggtaagctgtg

SEQ ID NO: 132447 - DNA, 620 bp, Cannabis sativa
agcctctcaacttcatctttgagcatttgggtgtgttctttatccaacaacctctgcttttgttgtataggtcggatatttggatgaatgttgagaaggggttatcacggaggggtagattccgaccatgtctccatgtgaccatgcaaagagattcaggtttgcaattagaaatttaatcaataatgattttatttctcgatcaccaatcttctggctggagaaaagggatcaacttccacttcctccaactctactacaggtctgaagctatctgcatgatcctttatgtaaggatttatgtctgcgtccccgctttgggctggacttctttgtggtttgttgagctcttcatcagagctcttgatgggcatattctctttcttggctttggacaaggtcaagttgtaataatgttgggcatattgctaatctcctcttaaaaattctaccccatgccttgttgggaatttcaagcataggtggaaaatggacgttatcaccttcaagtcgtatagggctggttagcctatcatggtgttaaaatctgagggaatttcaattacgacaaactgtgccatcagagttttagtggatggattttcttcaatagttagggg

SEQ ID NO: 132448 - DNA, 804 bp, Cannabis sativa
aaaaaggggaaaaattagggttcccaaaaatgccccaatcggtagaccgtatcccaactggaatttcggttcttaggggtttcctgggaatcaactggtcgatcggttcctacaagtcccagtaaaccggtcgatcggttcaatgcaggaaaaacacaaaaattcattacactctcaatttgacccccaaacttaaccataacttcctgacctacttattgtaccataatgaacatattctaagcaataaaacaacacaaaataactagaataaaacttttccattaaagaccaaagtttgaattctaaaactcaaattttgtctaacaaccaaaccaagccacaaactagcataattcaattcaaataacataattataacctcagaatactaaaacaaacaactttaaaaactacagaaccctaatctcaaaatcatacaataaacattacaattttctactaaaaattcaaggagaaagaaagaaggaccttaccttaaccaaatactagaatcaaggatgctgaatccttctagaaatgatccaatctgaagagaaaatatgatttcctccttgggtttttttgtggctgactcaaagcaaagagagagggagggatattcttattttttttctaatcttttgaataataaagtatattagggtatgatctaactaataaaagggatatattcaaattattatgcttgataaaattcactaaaaaaactaaactccaattagggcaaaagatcattttgcccccacttaaccaaaaagtcacaaaatcgtctaggggtaa

SEQ ID NO: 132449 - DNA, 694 bp, Cannabis sativa
gcctatggtataacatttagatttagggatataattttaggattttttaagcatagaaaatcaaatttccctttacaaatgcacatatatagtgtatctttattttccttatatatatatatgaatttatagaattatatatatttacctgactttgttatcactggtgttgacagagatgatcagagtttttgtttaattgttgattaaaatctgtgtatggagcttgattggtgcttcaagattatgtttgtattgctgttggaagtggagcttctgtttttttcggtgccgatcttcttttattgctcttacctttgtcggaatcggtggattttattctgactgagtttttcagatcgtttaatgttgaatcagataaagaattgcagtagatagagagaatcgtaatctttcagagaagagagagagagagaatcgtatatatttgttgagaatgagaaaaataatgaatcataatttcagattctatttttaatgttttatatggttttttttaaaccatattttttatttaattggttagataatactatatttaatgataattactttttatgccatatttatctaaacctcaataatttttcacatattatttaaaatagcccttccaaaaaagcatgaatttgataagggataattacatcacatactgaaattttcaattttt

SEQ ID NO: 132450 - DNA, 987 bp, Cannabis sativa
gatttggtaatggggttcaagctatttctttagagcaggtaaaaggctctgatttcattcctcatttatcgttgagaaaggctgttgaccgttcctcatttaatgtgaaagatttaaatctttcttgtggtcctgaggcggtcaatgtagggaaccatgtgattaatagtgatgggccgggttcttctactcttgggcctaatctaattaattcaagagaacatgggccggtttcctacgagactaataaggtgggcctcccacttgtctctgctgggccgagtggtagtgggaaagagattaataagatatatgctggttcagtgggtcctactctctcagttaatggatcaactatgaaggagttgaggcttggtgggcctgagaatgttacccgtggaccaaaggatttgatgagtaatattaatatgttgggtgggattgctagatatacccaagatggtcacggtcttcatgcagctttaggctctaatggcccatctcaagattcggttgaaggtcaagatgtgctttcggggttagatgagaagcaagctcttacttctttctttcaagcccaagagactatgttgcatgagcttaaacattttgggaatcttgacttatatgagattagacaattgggtggtgacattggtatcaagcttacgtccgagacaaatgagagaaccactcctttcaagaaaagtaaattctttgagtcttctgcttctctctgctcaagaccacataaaatcatttgtaggcatccgggagttatcagagacttccattaggactctgtggaaaatgagagggcggataaagtggctgtggaagaaccttctgaggatacctcttgctcgttgtcttgttctgagggtgttttgaagaactcgttggttggctcgttccttattgatgatgctgattctagcgaatccgttcactttggtacccctgtggaggagaatgaggtctctcctc

SEQ ID NO: 132451 - DNA, 825 bp, Cannabis sativa
  modified_base (134)..(138): a, c, t, g, unknown or other
agagagagagagagagggaggaaggacgatgaaaatgagagagacaaaatgaggtcttcatcaatggtgagtggtggttttgtccagaaaataggatttggggtttttggcaaagagagagagagagagatagnnnnngagagagagagagagaaagagtagctgagtggtttaggattttcttcgtatgaaaagacaaaggagtagctgttaggggttttattatactcagggtatacatgacggattaaaactgtcgtagatttttctcacgagtgttctaaaccatcaggaatatctaatttttttttacattctaaaaccctcatttaattttattagcgatggtctccaaaaaaaaatattttgagggtaccgatagaaatgcccaattttgtagaaatgtatatgtatttacaaaaaaaaaaataaaaaaaataattgagaaccaaacaataaaatagaatgttaagtatatcatacacatatttaaataaacttagatttaaaagttatgcctaattaaaagaaatttagaaaacaaagatgacgatgtcgactgtggcaataacatcatcttggaaacggcaaatatctcaaggacaactatgacgataatgggtacatggagatgatgatatggcagtgaaaactgtgagattgaattttatgacttatggtattaatttacatatatgattaaattttctaatttattaattcctcctaactccacaattaatagatttgaaattgaactctcgattacatagaacgctctatatactaaatatataaatactatgaattatccattattataat

SEQ ID NO: 132452 - DNA, 544 bp, Cannabis sativa
agatagtgtaagtgatattttagtgcataaaaacttattaaagacaaaattggtgtccacactttataaaagtatttttataaataaaatgtcaattaatatttttcatgtaaaaatttatatattataatatatattttatttatttatttaataaaatcaattcagtataatacaatagaaattctattgtgcatcaaacataatatattaaagaagaaaaaaaaaactaaaacaatacaattaactacaatatctataccaaatgtccttatgtttgagtgttcatcatcaaatcgctcacaccatacaaactttctacaccgcatcacactgcataaaaaacgtggttaatttgaaattttttggaatacagttgtggtttatattttcgctaaactgcacggtgcaatgcatgttgcagttttaaatttaataattacagttcaaactgcactgcactatattacaagttactaatttttacaatataatttttattttatttttttatataaggaaatatatatatatatatctattc

SEQ ID NO: 132453 - DNA, 741 bp, Cannabis sativa
aactcagctgaagtagaagagttttctccaccactttcaatcaaatcacaaaactcattgaatttactctttacttcactatgctgatggaaaattgaagtttcgccatatatttctggatacaagaccttttctttagcaacgctacaacaaaagatgcaatactttcaaactactagaacaaaattcatagaagaaatcccaatccaacaatcctcatcttaagcatgtacatatacaaataaaagaatacctgtgacaaatgcaaatttcagcaataaactttagccttccatcgaaaactgatcgattagaaaaatcgccagaaacatacatcctcttgatcttctccaatgtctcattcaactctcttttgatagccctatgccagagcaataaatcatctactggatgtgaactagtttcactttcacagtttgctttttccattaaagtattattattcaaaatggtgtcatgatcaaaatcttttcttttaatccagttgaaaatggccttcacacaaaccattaatgtacataattagctctttgctttaataaagaatatgaaataatttcatttatttgtaggggataattttgaaattttacctgttgaagaagcttttcctttgggataattccggttaatgagttttgcagatgttggtattcaccaattgaaagagaagaagatagccatgaaagtaccttcgctagcacatatgtgggcatgtca

SEQ ID NO: 132454 - DNA, 640 bp, Cannabis sativa
  modified_base (41)..(84): a, c, t, g, unknown or other
aactttatatgtgtttatcttcattgttttagaattcatannnnnnnnnnnnnnnnnnnnnnnnnnnnnnnnnnnnnnnnnnnngtaaaataatttccaacacctggaacagccggttcatggtgaggatgttgatgtcattttgtttagtgatgcttcttggaaggatggtgtaggaggctttgcggtagtagccattgattgcatttcgaattcgtggatgttcaaagtggagtgtggaccagctgcgtgttccatggaagctgagactcaggctatctgtttggccttggatctggctgtccaataatcctggagcaaaattcattttctgtcggattgcaaggacattgtaagggctttggcgcagaaggcttcttcaccccactggagttttttttacatgtttatttacatgccatagacttgttgaatgttttttttcagatagttgtatcttttatgtttctagagagtttaactcggtagcagatggcttggccaagagtgctagaatgtctagacatgagccaggtttttttcaaggggagggaattcccccagtgattcccaactacttttctatggtttaattgaacttgtttctttctgttagatattagatgtatattagctgtaa

SEQ ID NO: 132455 - DNA, 1037 bp, Cannabis sativa
tattagtttagagaaaaaatattaggtatatgtaagtataaaaattcaaatttcctttcacaaattagttttagaattttattcttttggtatttttttttttttttgaatgaatgatatttattattaggtcaatgccaaaaacaaaaacaagtgaaaggacttacataaatgtcggtaacctcgaacttacataaatgttatgagcaataatattcgaagagcgagtataaaataaaaagttagacatattaatgtttctacaaattaaactaatatcattcaaaattgaaccataagttgtcatacaaaaatccttttttttttagtcaaaagcttcacaacaacttgacaatctaattcaacctcaatattatggtaacccagccgataacacaattgaagtataactaaaatagtcatcgcttccactacctgtggagtaagtagccctactgtcggagaagtcgccaaagcaacacacctgccttcgtgatctctaataacgaccctattgcatgttaaaatattacatatatgatagtattaaaatataaagttaataaattttaaataatattttcatgaaataaatacaatatattattatgttgaaatattttatttaaagttaattttatctttatttttaaataataattaatatttatgtcataatggaaaaaaaataaaaagttaagaaaatatattgattttattaaaagaattacaaattaattgattttaaataaatattttcattaaaattattgtgatatattttatgttgaaaatattttgtttgtgtttgattgagaaaacaataattgtgaaagaaagaaaagaaagaaaaaagggccaacatgcaaaatggtcctaaatccaacaattaagttaataaatgtccattttttaaaaaaattaagaaaatctccattctgttaaaagtttgaaaatgaaattacaattataatcttgaataattaagtgtttggtatagttattttgcacaatagtatatcgtttttatgtgcaat

SEQ ID NO: 132456 - DNA, 952 bp, Cannabis sativa
aattattgtttctggagttgtctcgacaggagcttggttccaatgatctcaataacgagctgggtccatttttccttccgaggtcgacgatgcatgtcttgtgtcgatcgcggtttttatttacaaagagttcttcaaagctcatttgaatgttagcttcttgacttgccagggttgtaagccctcgctaacgctaaggggataaagttatatgaggtcttcccctaatgagacgggcatctcccttacttggtcttgagccgatctgcctgtaacacttagtttgtacactaaggactttcacaattgatatatgtcgttttcgtcttccaatgtatactgtccttgatgcctcacaatttgcattcaatgacatatggtttctcgttaatatgctaagtaccagtttgcatattagttcatcgcctaagaccttacagtctacaagttacaaatatactctgatacttacgtaattaatgagttattccataaaaagcgattgcaccaatccatattccctttatcttgacacgtgtcctccactgagatggcaaccgagtttcaggtttaacacatataattttaaacataacactagaagacaccctataagttgaataagatgctcttattttctaagctgatacttgataacctaattgtctctctttatcagtaaaatagaaaatagaaaagagcctcttgtaactcgaaatcctcttctcttcttctttaattttcaaaccctaagtgaattgaggaattaccgacacaattcaagttaatactcagacctttgtggaagattgttttgaacagcatcaaaggagaagaagattcaagttcagattttgataatgttctgctacagataggaatcaagggctagagatctaaatagaaggagtcatattatttcgctgctattaatgtaaggatttcttaatct

SEQ ID NO: 132457 - DNA, 680 bp, Cannabis sativa
agtagaattgagccagagaatcggcacccgccagtttcagccaatccgagctaagttatggtttggtgagtaaattgaaaactcttttggttgaattacataattgatggttgtttgtagactactagtgttttgatacactaaaatgatgctcaagattatcaatatgactcaagtgtggtagctgagtgataaatttttagtttggatgatttgaattggaatttggtggaatttttgaagaatagtgggctgagaaagattggtgattttgggaagagcagtgattgtgaacaggttgttgcgtggaaaattgtttatttggtggaattgaattaatgtaggtgagttgctagtttgaaaactttgttgtggttgtggaatttcctgtgtggtaataaaaaaaatttgattgattgtggtggtgatagttagtacaagtgctttgaattttagttggtgtggttcggaaagagtggtgatttttgaacaagattggattgtgggttgtgttggggtagtgtgcaagtaaaaaaaaaaagaagagaaaatgccgaaagttaagagggttgccaacaagaaaaaaaaagaaatcacttcatgaaattcctaagtttcattgcaaggcagccgagacaaagtatcacgataaggtggacaatcgagaattttatatggag

SEQ ID NO: 132458 - DNA, 660 bp, Cannabis sativa
aaattaaaaaaatagtatatggggtaattcccctattttttattgtacttttgttgacgtgacatataattttagagaaatttacggtcaaactcccttataattcaaatgttatatatttaacctccttttttttgtttttatgtagtaataccccgttatattcaattctgtttgcaactttgatgtttctgttaaattctgttgttaagtaccaattgggtctgccactgtgtacacgtgtatacatgtagcatatttttattggtccaaataattttattaatttaaatattataataaattattttaaaattaaaaataagtaaaactaatattttttttctttctttttttactgattggattgtatttttaaataaataataaaaaaactcataacaaatccctcatcaaatccctcactctcatcaactcttgacaaagagaacgatttaactaaaaaataagagaaacaaagaataacccaaactcatctatacattctctctaaatcaagcttcttcagtacccaaatcattattatcaatttcttgaacctagtatgctaataaaattatgagaagtttacggccaaacccttgtatatttcaatttttatacacttaattctcttttttttttttggtggcaatacac

SEQ ID NO: 132459 - DNA, 885 bp, Cannabis sativa
aaaagttcagggggcattatttggtatatgtcgaaattcggggggaaaaattgctaattagccttaaaattattacacttatttatttagtttatttttatttaaataggttgaatgtattttccaaaaaaaaagctaaactcctccctctttctttttggataaggagtcaattattgaaaaaaccaagccatagtcaaaaaaaaaaaaaaaacaaagccaagttcccccagaaaacaaaacaacctcaaactcgaaaagaaaaactcctccctccttgcttcgacttgttttgtacaaaattgaaggaccctttcacttgaagacccttcactagtcctctattatatttatgaattttttagaaaaatctaagagcaatttctaatttaagaaaaataaaaatcaaacatcaaaaatagagaaacctatcttcgtccctatcttctcccgttgctttctttgattttcgtcgttgtcttcaatttctcagcaacaatataataccctaaggtttatgaactatattattatatagtatgcttactctgtcaatttgtaggtattttctaacaagtcggtgtagtatagtcacaaccgggtatttcggactgaatcgggttcagggcacaaaatacatttttgggatttaatttttgcattaatataataattgaggaaatttgaaatattgtgttatgtttatttgattgaaatgactatatttcccttgtacatatttgtgtggttagttttggccttgagggtaatttggtcatttagccacctattctattttcaacaaagggaaaaatcagatttttgttaattggaaaatcacaatttctaggtttgaatcccataacctctctctctctctctctc

SEQ ID NO: 132460 - DNA, 988 bp, Cannabis sativa
cattacttgtttaaactaacaataaattttaatcacgagtgtctttcaagtcataatagggtgagttccttaaaactctcccactacgacaaggtactgtgactttttgtgtaagaagactaatggtatggacctcattggttgtgtcaatacaacgtaggcagtgagaccatcttatatagaataagatgataaaacacattggaatcaagaaaaaaaatatgtcctctactttgctactttattttcaaatttagtcatattcttagaaaagtagtatttgttgaaacaaacatattagaacgcaaacccgagctttacatagtaacatttcattatccgagattgaaaagtccttaggttgaccggccatcacctcatctcgaatcttgattagctcaggatcttccaactgtgcccttctgattctttctaacaaatcagattgaagtgtcaagttctccagctttccaaatacaaattcaatttcaattttaaccatttctgaggccagttgaggagctatcatcacagtagtgaaaacctgtctgggacctcttctacttaaaggatctaccacgacattaactttctcgagatgatgcagaatttcgcagtcataatctttgaccaactccagccaccgtctctgcctcatatttaaatttttctgtgtaaaaaagtacttgaggctcttatgatcagtataaatctcacatttttcaccataaaggtagtgtcaccatatttttagagcaaataccactacaacaagctctaaatcatgtgttggatagcgctactcataatcttttagttgatggaaggcataggctataactttgttagcttgcataaaaacacatcccagaccctggctagatgcatcacaattgataacatacttttctcgatctgatggcaaagctaacactagtgctgttattaattgttgtttcaacttttgaaaacttgcttcacacttttc

SEQ ID NO: 132461 - DNA, 1003 bp, Cannabis sativa
  modified_base (960)..(964): a, c, t, g, unknown or other
acattgcgatgtggctcctttttttttgaataaactgtggaatagcagaattatagagcgtcataaagttttatggtggtgtattttgtctaaagcattgtcgcttcgttcgatcgtcaatagaagattcaggttagaggacacgagttgccctttgtgtggatgtgaggaggaatctgtggaatatcttttcctctcctgtaacctggcttttcatttatggcggtcttcttcgtgaggtatttttctgatcattggcacttgaattcgcatgtgggactgggtaaaattcctttggggcttaaagagtcagggtatcaattctgatgaggcctttctttatgtgtcaatggtcgtcgacaccatatgaagggtgcgaaatgacaatgtacataataacaaaagttgttaatgttaaccattgcattgattctattgctatatcttatgcagattactgcgcaacccttcttccctccattgcccctgctatggtggatggttggcttcctcctcctaaggattgacttaaacttaattgtgatgttaaagttgggttggatagcatgtgcattgctgtcgtggctagggattttcaaggtgtggtggtctgggtgcaaaccaaacttttgaattttgcagatgctttgtgtggggaagcagctgcttgttatttggttttggaagtcgcaaaagagagaaatgtgttgtggtattttgcacacgcaagtgtacgtaccgtaacaagtagtaaactcaccaagagtgaggtcgatcccacagagattgtagttaagtactttaaaattaaacttttacttctatttagttgaatacaaattaagaaagaaaactaaagtaagaaaactagtggaagtaggaagcaaataaataaaggataataacagttaataaaaattagggcttcgattttgattgtttctattgattatggcctannnnnattatcttcctattatcaatttctatgcaatagcaggtt

SEQ ID NO: 132462 - DNA, 1210 bp, Cannabis sativa
ctatggacatgcatgcctatattaattaacatttcactttattatatagtcagtcatgcctaattatgtttcactttaatatatatataaaatatttagtactactgactcccattaaatttagacaagtgtggggtttgacaagtatcttgttccaacttgcttagagctttttcataatttttggctagctatgattactatcactagactggtacatgtaactatattatatctatatacacacatttatatagtagcagaagaaaagttgcaaactaggccaataatcaggtaattatttgttttgacaagtcaatgtttgacatattatctttttggtcctcgactcaagagatactacttgtatggattcttcttaatatcttttagctaagagatactaacgtttttgggttaatttatgtatgtattaatgtacgtaggtaacatttaatttaaattcattagctcaaatagtatttgataattgtgacttaatttgttaatttatataagaggacataggtctagctagtttaaattctaaaaatgtattacatctcatatgtgagtgtagtaattaatccacggctcttataaattgtataatgatattatcatatgtatgcattttaaataatttatggtattaaaaatcaggttcgaattaaaccgttaataacatgacttttcggctcaacaccagtaccatcaccaccaactgggttactctttgccaccacaaatggcggagccagctgagaaaattatggggggccaatatatgtcataaaaataataaaaaaaacttatttttatttttaattattttttacattcatatttaaaaaattaaaaaatttgggggccgggttaaggctaggactccccggcccccttagcttaccaccattttaacttatgttttttttctttatgtatatatatgtataaatgttatgattgagtatatatattcattatattgggtagttttcttgtattactcttgcaatttcttggtcttgaggaagatatgtagagtaaaatgaaaatattttttcttagttgttttaatttgctttagttttagggttttttttttcagttttaaccaaaaaatataacaatattacaaaaatacttctagctggccaaataaacaaatatacaacctaaataaaagaaaattacacaaatactactt

SEQ ID NO: 132463 - DNA, 899 bp, Cannabis sativa
atgggattatatttctatttataggactctatagattaatctagaaccattattaatggttagcttctagattgttctacataatttcctctactaacacaagtgaaaaataattctagaaaattcaagagtacttaaaaaacaagaagattaatctagataatttagtaaatataagaataattcttaggtaggttcttacatattaaagattattttctgtatttacaaagaagttataataatacgattttttgttatataataatataaattttatttatacaacatccaatttttaaaatgaatagcattactatggaatttttttctaaaattgttattttccaaccaaacaaaagaatcaggcccattagtattccattccattcttttctggcccattaccatcaaccaaacgggccctaagttctctgttagtcatttggtcttgtggggttcggatcaccaccctacttacttgtcttagatgttaagaagacaaggttatgacatggggtggtgcgtaaattttttttcttcgaaatggcctggacgggaggaagattgtgccaatatcgtttcttcatacaaagggatggagtgtgtttttacttcttattttaaaaacttgtttgcttctgattctctccaagaaataatgtacatagatgttttaattaattaagttttatatatatatatatattgtgtttaatataaattttaattaaagaacaattgatatccttaattattattattattattattattattattttggtaaatcagctgaatttcattaataaaaaaccatttacaaacgccaatcaatgtaatataaacccacccatatacaactctataattacttacaaattaaattccccaattaa

SEQ ID NO: 132464 - DNA, 542 bp, Cannabis sativa
aaatataaatatatttacaaaattcattatccaatcaaaaataatgcattgctatcatgtgctagttctaaagtgagtgaggtagggtattgtgttcataaaatagtcagttcaatctgcatgatttgatcttatttaatctgtaatgtacttatgcggattgaatttgattagaaaactcaaaatttacacttatacagattaaatgttgattggcataaaaaagtaacagacttaatctaatttatacatatttatataaatttttaaaaaattatatatacaattaatattttaaggtaaaaaaaaagtaatttaaaaattggattttattttttatttttacactttaataattttgtatttttacgaaaatttacatagtaactagaggtgttcataaaatagtcgatctaattcaatccgcacgattcaatccaatccaattcgtaaagtgcagatatttgtacttgtgcaaattattagattggaaaattcaaaatccttacttatgcggattgaatgttgattgatatgtaaaa

SEQ ID NO: 132465 - DNA, 582 bp, Cannabis sativa
tgcaacaaccgcggtgttgattttattgaagcctacgcagatgttgaacttgaaaatctcaatttgcataactttgacttgagctttgttgtgggcaagttggtgcccgagaagaagtcatgtagtatttttactgtccaagtaagtactattttagcatattatatactaatctactcctaagtgtgtaaaggttaaattaatatgtacatatatggtaggaaattctaataaaaacatccatataaataagttctaagctgatattttagagattttttcatttttattacacttataagcatgttttgttgtatttttacgaaaattcacagaacttcacatagcaactaacggaacaatttaaatcgcaaccaaaatttaaataaaaatcctcataaaaactaccaaaacaactcaaattgtaaatttagaaaataaaaaataacatatagagtaattcccttatattttaattatttttataagaaaagtctatttgtagttatgggtagggactcgcacaaaattttgcgaaattttttaaaatattagtggatgtttggcatcataactaaaaaa

SEQ ID NO: 132466 - DNA, 663 bp, Cannabis sativa
atatctctaggtccacctataaaggaagctggtaaaataattcgtttgccaacttgtgaacctcgattttctccaacttgtatactatcaattacaccttgatataaatcacacctaatttgatctattttttgcgaaaaacatctagtctagatatttcaagtttaacattcatatctacaacatattgttgtaagagtcgacctgcatgaagtaatatccctttatcagttgttcgaatttgtaatttatagtagtagtattctctacaagaaacaaccaacccctttttattattgttagttaagtttttctctttttgtaataatttttcagcaaaggtggctctagttggatcaataactatttcactatcatgagaagattgatttctatttttatcagctcggttaattttctcatgccaacgagtttctccataaggaaataacaaaggatattgtaatggatcgtaacaaccataataatactgcactttatgactaaagcctgaatggctatacacaacaatctcacgatctgctgttctctagaggagttatcatcaatccatactgcagctacttgtgaagctaaaggagcgttgtatactctttgatctaatcctacattagactatatgtggattgtgtagttttgtaa

SEQ ID NO: 132467 - DNA, 773 bp, Cannabis sativa
atgaaacaatcacaaaggattaggtaaatctcactctaaaggcagattagcacaaaagggattaacctcaatccatagcacgagtttgttgaccaagatataattggctaagagcaaccacattacattcccctaaacacaaatgaaataccagccacattatcaaacaacaataagtggtgaacatgatcaagtataatattaacatctacatctcgacaacgcttcttctttctgtggattaatttgatagcttcaagacagttagatttaattaatactaaatcgtggtaaccttctttagattcttacatgtaaaaaattctactttaaaatataaaaataaaaaaaaaaacttttttataaaattaaagttcatttatagaactttaaaaagtcaattaaatgttaaaattatgaaaatcgataaattagttggcacacattcgattcatataactctcactatacaagaccggtattatataattaaaaggtatattttaatgtacatttttttttttttgagtgtaagcatgtggtatattaatgcactgttacattttctgcctcatgagaatatttttaatctatttttttcatgattagttatgttaattgtaatttaaaatatttaataaagttttgagaaatttctaaaaaattacacaggctgaaaattgcacacaaaacttttttatttgaaatatgtttgaatattacttttatattccaaatttttaaaaattttacacaaaattttaaatatttat

SEQ ID NO: 132468 - DNA, 1049 bp, Cannabis sativa
acacgactacactacttcctatagaataggattatattatggttaagttaaaaattaattatataactccacatccagtttttaaaaataatttaagttattgaaataagtttataccaaaagctagcccatatataaatggagaatttacacctgttactattacctatttttattatatttaattttactgctacaggcatgtaataatttttatggtgcttaattttttatattgtgtactagtttttattaaagaaaaaattattcgattttattgatacgtgccactatagtttctattgtaactctttttattatatttaaagattgtaaaagttataatttgattgtttatgtcacttttgtgatttcttttattttaaataaaataatgatgaaaagtttagaaaatcttctcttacaagtttgcttaatatatttgtacttatattttttttttgtttttgtttttcattttaattctcatcctctctcccccttcatcatcttcttcattttttcttttttattttcttatattttgtgtttaaaaaatcacacatgtttctagtttttattttttatttttttctttgtatcagctatttttgtttcaatttcttcttcttcttcttcttctacttcttagtaaattagcaatgggaaagaaaaatttaaaaaaattccctatagccctacatcttttatagcttataaaagaaaataagttgttcgttcttcagaaaagagaaaattaaaacgttcgaaaccaatcattaaaaattcagactcttcttttgaacttgatgatgaagattttgcgatacccaaagtgctgaaagtatttgtgttatttttatagttattttaggattttttttttcttttttgttgtagatgttctggatttgttttctctaatttatgtcttttgcttattttgttattgttgttgttgttttatattttgtatttttttttattgtattcatattattgatatttttaacggctattttgttgttgttctggcttgttcttttgag

SEQ ID NO: 132469 - DNA, 769 bp, Cannabis sativa
tggtactgtcgatgatcttttggtggtcaaccaaaaccataccaagctcaaaattgcaaaaaaaaaaaagaatgagaatgtgaagatgaaggtgaagcccataatatatgacgttatttaacaaagtcattgatgtaatgtatgttggtgttcgatgaaaattagtttgttgaaggcctatttatagtctgaacattcattgattattgcttgtatcatcatcaactatttcttagcacgtatgtagaaattatatagatatcatacctagatatcactgtccataattttttggcgaaattataaataccaaaaattaattatagctttatttgtacggcaagtcctaaaattagtttctcgaatgcctatttattgtctcgacattcattgattattgcttgtatcatcatcaacttgttagcacatatatgtagaaattgtatagatgtcatacctagatatcatatagatatcatggccataatctttataaataccaaaaattaataatagccttatttataaggcaagtccttaaattatacatgttttaataagttggtttctaaattttattatttggcaaattggtcccaaactatataaattttgataagttggtcgtcaaacattattttttagtaaattagtccctaaacttttttttttttcgaaaataaaatcgtcactcttaaatgatggtattttatttatttatttgtatttattttaggctaattaggaattttttctccccgaactttga

SEQ ID NO: 132470 - DNA, 581 bp, Cannabis sativa
taagaaagtgaaattaaagattaattttgcatgcgtaatatgtactataaataacatgtctacaatacacttttaaaacatatttcagttgatctttatctatttggttatataaaaacgttttgaagtgaatttttttttttgatgatcatgtatgttataattatttaggaccacttgtactttaaaaaattcaaagtattttacatgttaaaaataaaatttatatgtgttatactcgactatttttttcttatacgtgttgtaagtaagtatttaaacctgattctaagcacagtaaactattcggaattcgctgccattggaaaatatatttgggcaatctcatctaagcaagataatctatgaattagatgaatccatagtatattcttataaggaagagatttgtgggattataaagtccaaccttcggggagttggtattagaagtatattgtggttcttaaagaccaacttaatattagaatattttatttatggaaattattttctaattaaggaaattattttctatttaaggaaataaataaataattgattttctgttaaatgaatat

SEQ ID NO: 132471 - DNA, 611 bp, Cannabis sativa
gtgtgttatattttaagtttgtattttaatttttattttaaagattgtcattttaatataattgtattttttagtttggtgttgttatgttttttcagttttgctatctctctgacgacaactattataataggaaggtttttttttaatgtgacggggtatttttcgaagacattgtagttttattgtctaaattttcgggggcagttttttcccatgttgctcggaataagaattctgcaactcatggtttggcaaaatatatccttcggttagacgatgagctatcctgatttgaggaggttctaccgctgattgtagtttgctatattgttaatcatgtgtgactttgttcaccgcgtcaaaaaaaaaattagtttattatatatataaaataattaaaaaaatggttttttttcattagtgtaaaataaaaataattttattacaaaaaatgtgcacaaaaaaattaattttaaaaatatacacatttgaaaacatatttacatcaaattatacaaattgttaatttaattatattagatttattaatgagtcaaattaccataattagatttttgtaacacaataatttgtttaaaatgtttatt

SEQ ID NO: 132472 - DNA, 536 bp, Cannabis sativa
gattatttgtggtcactctattttttatacatgataattatgatatactttttatttctcaaagttaaccatgcagggatttcattaaactaagggtccatttatattagctaatcagcttactcctcttttctcccatttgaggaactcaatttgatgtcaatggttgaggagggtactgctaaggaagaatgttgttaatagtttagccttaattctatttatgaaacttttctttgaaattaaatttatattttaaactttaacggttgatctgaatgatctagatgacttaattaactatgtactagtcatgaatggaaaataatggatggtaaatgttattttagtattttgtaactacataattgtggagttattattatttttttatattaatttgtggtcttgatttgttactaatattttcttcataggtatatgagttatcccattatttttaaggctaattagtaattttttcccttgaactttgacatgtaccaaatcgtgccccctgaactttttttgccgtt

SEQ ID NO: 132473 - DNA, 752 bp, Cannabis sativa
tttggcttccatcacattggcccggccaaccagaattaagtcatcagcaaagaataagtgcgagaggaccgaccctcccctgcttaacttaacgcccttgaagtctcccttcctcaagccttcttccaaaagtcttgacagaatttcagcagcacaaatgaagaggtagggggagagggggtcaccctggcgaagcccacaagagggtataatctttcccactgttccaccattaaggcatacattcagcgaagtggtggagatgcactgagtaacccatttacgaaatttcagggggaagccgaaccaatcaagagcgttgtcaatggacttccagtttaacctatcataggctttaaccagatcattctttattgcaaaatatccttctttgcctttttttctgttaaaagagtgtatgatctcttgcaccattacattgttatcctgtatattccgccccggtacaaaagctgcttgagtagggcaaattatcgaagggaggataggtttaattctattagcaaatattttggatataaccttgtacatcacattacacagagatataggcctgaaatggttaggaatttttgggttctgaatttttgggatgagaaccacatttgtcgagttaatacctctatgcattctgccagattcaaagaaatcggaaattgtattgcagaagtcatcacctacagactcccaataatgtttgaaatcagaatgaaaataaacttgtaatatat

SEQ ID NO: 132474 - DNA, 791 bp, Cannabis sativa
aaggttttccttgacaagaatcgggtgcaagtatcccacaaatagtgacgttgcaaagaagtaaagagaaatgggaaaaaaaggtaaaaccaaaagtctactctaagccctaaaattgtcattacatgggataaagatggttcctcaacaaaattgcagtaagaagaaacgatctaagtgcgaaaagaggaaatccaatacatcatacagaaactcacacgaagccattcccagaagtttaacatccaacccagaaaaagtaaatgaacagtaaagcatgctatgtgaacaagcagtgaacaagtatacaagatatgaagaacttacgaaaagtttgaagactggaggttggtgttgatcgccggtagaacgtagactggcaacggtgaaggaataaaagcaggaaatctatggtgtttgaggtttcttttctctctgggaaactctgagaaaattttggtaaaatgctgaaagtaaccaaaatgaagtaagaaggttggcttttataggccagaacatgtgtgaagacagctgtgatcagccaccatcgaacggttgggatggcaatcgattcgaattctataaatccaacggttagattaaatcgtcttcaaggcggtggaaaacgtttgagtacccgtctgacacccatttaatgcgccgtatcaataaatggacaagaaacctatcgacgcctgcaaaaaagcgaataactgcagtaatgatggtcattaatacgccaccacgcgcccaaagcacgtgccaggaagctgataaggcaaccggaggca

SEQ ID NO: 132475 - DNA, 705 bp, Cannabis sativa
  modified_base (614)..(640): a, c, t, g, unknown or other
gattcacctaccccatgacaaatcggacacagcaaagaaacatccacatgtttagtattcaactgaactctcgtcgaaacacacccattagtcgccctccatacactgtttttttgcctttggaggaagttttagttgccaaaacttcttccaaacaccacaacctccccctccacactaccatttcagtttgcctgtaacaatttaaaagcactcttaactttatacttgccaacaaagtcaaaaccccaataccaatagtccttagaaaccgaatagaaaatggattaccaagaatattggttgccactttctcatcaaacaactctttgacaacatcaacatcccaagttttctcacccaccacaaaaatactactaacctttttcattggccaagctaggatccaaaactagctagacttggaattgaaccatttgaaatccatcgagtatcctttaaagcaagcatagaaaaaaaaatgtaataattcaaaataattgaaaaaaaaataaatttaaattaaactaatattctcacaaatatttattatgtcttcataatctataaaagataaaagacaaatctgtctcaaagttaaaaaaaaaaaaaannnnnnnnnnnnnnnnnnnnnnnnnnnaaaaaaaaaaaaatttttttaaaagaaaaaaaaaaaaaaacccctttgttgtatccctttttttt

SEQ ID NO: 132476 - DNA, 1763 bp, Cannabis sativa
  modified_base (74)..(74): a, c, t, g, unknown or other
agtcaaataacaagtttttcaagctttttgtcagaaaatcaaagattgccttttttcaaaaaactgagccttcncactttctctctctatagccgaccgtaccgctctctcttttcctcttcagaaaaatatacttgtgagtagatctatgaccctagtataataaattccaacaaaatcttaccaattatagacattgtaaacaaaaggggaaccttccctcaagcacataacattataaatagtgatctattctccctaagcaaaacggtcgaaagaattacctaagagagcatactcaaagatgtcattgttagagcttcaaggatcattgtattcgttgttcttaagttaatacaaatcaaggggagtaggctattaccaaactgctcggggccgaagctctttaaaaaactctgtgttctttatttatcttttcatattatatctaaattatatcacttatcgcttacatataagactcattgtcgttggctaaaagcgaggtcaacaggaaaaatggtgatgtagattctgaagatgaagaagagcttgctaatatgccacaattagaagatgcttctatagaagattaagattatgggacagaatacggtgacatgcttgcactagtcaccagacgagcattaaatttacaagcagaagaagaggaagaagaggtacaacgtgagaacatttttaatactcgttgtcatgtgatagacaaggtatgtagtgtgaccattgaccggggtagttgtactaaaattgcaagttcatccatggttgagaagctagcacttcaaacactgaaacatccacatcctaacaagttgcaatggttgaatgatagtggtgaagtgagagttacaaaacaagttctggtatctttttgaattggcaaatatgaggataatgtattgggtgatgtggtcccaatgcaagctagacaccttcttctaggaagacctttgcaatttgatcggcgagtccagcacgatggcttcaccaacaaatactcattcatgttctgtcagcgaacaatcactctagctcctttgagacaaaaataattctatgaagaccaagtgagattgaaaaatttgagtgatcaaaagaatttgagtgataaaaagaaattgagtgatcaaaagaacttaagtgagtaaaggaaagagagtacaaagatgaatgagagtgagaagaaagagagccaaagggagaaaatgattgacacaagtgagagagaaaagaaagagaagagttcgactgatgagattaaaatagagagaaaaaaaaataatttttttgctagaaaaagtgagattacacgagcttggtgtacaaaaaaagcaatgattctatttgtttacaaggaggctctctcaagcactaaccaacttgattctttgctgcctagtgttgttgtttctatttggcaggaatttgaggatgtgtttcccaaggaggtacaacatggtatacctacaaccattgtatccaatagtgatgctaagttcttaagttactttcggaaacattatggggaaaacttgcgacaaaacttttgttttctactacttgttatcctcaaactgatggtcaaaagaagtagttaatagaactttatccactttattgagggctatcataagtaaaaatattaagacttggggggattgtttaccacattttgagtgttcttttaatcgttccatgcattctactactagattttcaccatttgaaattgtttatggttt

SEQ ID NO: 132477 - DNA, 1241 bp, Cannabis sativa
gctgtactaaggccatgccatttgctaagggtcaaaaaaatttgttgggagtgtaggaaatttaagatagtattttactattctgccctacaccaacaaaacaaacaaatcaacttacaaagtcaatttcgacctttctctgttcacttaacttttcaaagtcagtccccaaaacggcttcgttttgtctttgaacaaaaccaaagaaggattcgagaaccttctcattcactccctcactctctgattgctcgaaaccctagcagagagtttctctctgagaaactcgaaccctaaccctagcaaacccagaaatccaaatacaaacacaacaataatatcagatctacaatgatctgatctaaacacactcacacacacaaaaccagaaagatttaagttagaaaacaccagatttttcccgaagttcaccaataaaattggctacgtctccgtttgagctgctcctcaaagatgagagctcgattccactatattttgttgttcagaagtacatcaatggagattccaagccacaggtaatttctgactggtaatctcttatttaatacatgtattttgtgtttaatccctctctctctctctcaatctctaactctctgttgtttctttgtgcatgtacgagcttcgatcttttgtttcttcaagtattcaaagccctgaatcttgaagaacactctcaaccttgtagatctggttgttgatgcaggtatatatagatctagggtttctggttttgtttctgtatttgttagttagagtagttacagaaattagttaggtgtggattaaccaaatccattctaactagtttctgttagggattatagaggccgaaggccaaattagggattttgcatgtatttccttttctgtcctttgtattaagtttaatatcagtgtaagtggaggtttacttcaacagtttggtaacgagggaggtggtaaaagtaaaattacaattaataaaattatataggaaaattctacaatacactccactgattcacccttatttgtttcggtattagaaaaaaaataattagtatgaatttttttatgattgtatatagtgtagttatttaagatatcctgtaaaattttgataaattcgagaaaatttaacacggttcaaagagtctgttgcacgcgtaatttttttattttatacgcgtgtgaaataggtagtttaaacattgaattttatattataaattatt

SEQ ID NO: 132478 - DNA, 629 bp, Cannabis sativa
  modified_base (549)..(554): a, c, t, g, unknown or other
agcttggaagtatggtctcaacttgcacaatgcaatcaataagcgaaatgtcagcttctcgatcatgcgatatatggactctatgcccaaaaatattttactcacataatacactagatattggactttatcttcctctcgcacgagtgcagtgctgatagcatgattttacactgccaagtagaaaaacaaatcttcccctccataggtttcaataacattagagctttggttagatgctccttcaacttttgaaaaacatcctcacacccttcagtccacacaaactttttattgcatcacaacatgttaaagaatgggataccattgtcagtagatttcaaaatgaaccgactaagagcagtaatatgccctctcacactctacacatccttatgcttttttggagagggcatgtcaatgaaggccttgatgttctctgtgttagccttgattccctaggaattgatgatatatcctaggaccttcctggaagaaactcgaaaagtacatttcttaggatttaactgttggaatatattttaccannnnnntagatctactcacaagtatattgtttaacaccttaaatatgaactttctagaacgataaataaacacaaataaag

SEQ ID NO: 132479 - DNA, 533 bp, Cannabis sativa
tggtgatgctactacatcttaagtatattatacctgaaatttggttggtacttcagaagatgacatgtgtaatcttggaggatacgaatcaacaaatatcatggcaattatattaaaagatactaaatggaataactcattaaatgcggagttgatagaacatatctataactcaatgactgtattgtcttaagtgagacaaagatgtacaaactattgattcgcgtattgacgagaaacatttttgcgtcagaagacactatcataagagtgacatcgataatacatacaccacgctacatacaaaaaggtgttgacgagatgtgttggcaattagaacacttagcgtataatatacattatactaattataacaacttaaagaacccatataacgattagcaagacaccgatctcgctataggaaggcagattcctggtaccttcactaatcagctccagacatctttcaatgagatccactgctctgtcacgtcagctctctctcagatagaagcagacattcaaatgat

SEQ ID NO: 132480 - DNA, 839 bp, Cannabis sativa
taaaaaatttaacccttaatatatataaattttgaatatcagagtaatacatagacataagaaagcatttcttacagttgtgaagtaacaataggaaaaaaatttaaaatacatactaagatttgagcgatgaaagcaacatacctgaataatgaacacaacaagaactgaaaactaacagagaaaaatgacaataattatattacatacaactgaaagctactgttgctaaatatggtttttttagttaatttaaaccctcttttctaattggtgaagaaaaagttcaatataaattatttcagtttaaaaatcattgagacaattttacagagacatagagcatattaatcataaacatgaaataaataatttaatttcaagaatcacacaaattaataaaatcacatacaaaaatattgtagatgtaggatgaagaaagtgtgtaccatagatggagagataatcttagaaagaaacctctccaacttgaaactttacaatgaagttgacattgaggagtcaccttcataaaagaatgtagttctggcttccatggccaaatgacacggaattctccataaaccccaaaatcttcagtactttactttgcagttaatttgttttttaaaatatatttaggcttaatatccaaattttacatatcaatcaaaaaattcagtaaataagttgaaaaatatatgacattttccttatcaagcttgttggagccgaagatttgaagcctcttgcttccttccatttatcatatgttaatttgtcaaacatgcattggaatcaacaaatgaaaatctttcttggtccaatttcaaaaagct

SEQ ID NO: 132481 - DNA, 675 bp, Cannabis sativa
ttttcaattccttaaagagactatctctcataagaaacccaaatttgtttttctttgtgaaactaaatgtaataagttgagaatggaatggattggaagacaattggactttgaagggatttttgtggtggaggcccaaggttttagtggtgggttagcctttttatggaaagagaaagaagagggaactttattgggcttttctacaaaccatattgatatgtgtgtgaaaggagagggtaatgaaacatggagactcactggggtttatggggacccgaataggaccaacagacacaagacctgggatcttcttcgcacgatcaccaacgattcttccctcccttggtgtgtcataggtgatctcaataacgttttgactcaggaggataagcaaggaggacacccgtatccaaggtggttgatcgaaggctttcaaaattgccttaatgagtgtggctcactgatatggaactcacaggctatcgctttacatgggagaaaagccgggggacaagctcctggatcgaagctcgacttgatcgagcccttgcttcagatgcctggtttcaactctttcctgctgcctcgctaatcaatttggagcactcaacgtccgaccattgtcccttgctgttggagccgactgtgcaaagtaagtttcttccttatcat

SEQ ID NO: 132482 - DNA, 875 bp, Cannabis sativa
gaataaattgaaataagaatgaatcaaaattaaattacaaaaaaaaaaatgcactaatcttcaccttcaccggagaagacggtcttggcaatgaagagaataatttctcgttttccctgaactaattttctattctaatcatttataattatcctttttaatactttatgtttagccaggtggaccaaagaaataataattaatcaactaaataataataattaaatgtctatcagtatattatcccactttgactaattcaaatctaattttaattcaatacactacaatctacattatactaaggatagtgaaactattaatgagtctattttataggtgtctattaaagaatttcctaataatatatatacaaaaagtttaattacaaatatattatttaaatattaaaaattaataaaaaaaaatttagtgtagcctataatgtcacactaatattagtgtattagtgagagaaaatgttatatttaagataacttttaaagtgtggttgaaatgaatttagtgtgaaatcataacaaatttgatattttagtattttattggagcttgccttacaaaacattcaattgatatttttagagaaagtgacctaggttatggcccacatttttctagaaatatgaataaagaacacaactagcatccataatagaaaataacatatggtatttatagtggggaccacgtacaagtaaaataagcaatgataattatttgaagatatttctttacatattttttatatgagcattgctattaggcaccagtagtgtctagcactttctcaacatgtcgtgttataattggctagcgatactttctaaaagctactatattaaattatatgggac

SEQ ID NO: 132483 - DNA, 707 bp, Cannabis sativa
aaaacaatcaaaagaaggcatcaaaaatgtaattttgggggtttcaagggttgggaatctcgaatttagggtagtcgggtcctttcgtcgtcggtctcaagattttacggttttgaggttctaggttggggcttcgtcgctctaaggtcttggggttctctggatttttgggttctgggttggggcttgtcgtcggttggtagtgctgtaaatacaggtcagacttctttacacgacacgaaattgacacgagcataactaggcacggaaaatacgagcttgggcatgacacgacacgatgctacaaatcggtacgacacgatacaaaaaatatgtccttaagcacgacacggcacgagaagtacaaaaagcacgacacttaagcatgaatacactagcccgaaaagcccgacacacgacaagcccaaaaaacacgacatgacatattataaaatcttataatttattattaataataataataaaatatgaatttatcaattatagataagttaaaataataataaaacttaaatataatactgaatattataattctataattaaaattattaaaacatgaaaaactaatattatatactaatttatttatagggtgtgatataaaaatttaagtatttttaggtaaatatttaaattctaatgatattaataattttttatatgattatctgtaaaatattgtt

SEQ ID NO: 132484 - DNA, 551 bp, Cannabis sativa
ttacacgttcaccgtcagcttattttcctttttaaaataattaaacaaaaattaatatggtaatttgattttacagccagataaggttttttaatacctctaatttttatattcaataatctatatatattaagtaagttatattattaatttttatattttatttatttatttatttattttttgttgtacaattatttttttaatatttattgttgcggtttattctcaatatacgtgacagctgttgtgtgacatgtggatgatatgggcacgtcacccgaagatgagttgaagatttaactaaaccaccttaaggaacaataagtatagttcatgatgctaactttcggacatgagcaagaaacccatcttctctttcgagagtcaagggacggataggcgtcttcaggccaaaaaggctggagttgaacagtcatttcacatttaatgcgacatggagaaaacgtctgggaacacccataagatgacgtgtcaaacatcataaacctgatttagggcgattacacgataatcaagggagctcgtga

SEQ ID NO: 132485 - DNA, 590 bp, Cannabis sativa
  modified_base (26)..(26): a, c, t, g, unknown or other
tttactctcttttttttttttttttnttttttgtttgtttgttttttttgtttgttgtaaatattattttagactttatattttacaaaaattattaattgggccctattttattaaaggtttatatacactgcaagttcttaaattatatatattttaataaatttgtcttaaattttattttttttgactaattgctcctcaaactatataaattttaatacattaatcatcaaactttattttttgatagattagtctctaaattttaatttttttgaaaacaatatatttttttatttatatgtaatttttttaaatataccaaaaaaaaaaaaaacaattaaaaaaacttaaataatagtaatattaattttttataaactactgaaataaattttacttttaacttatgttctgcggtgaactcataaaattttaccaatcttgatgcaaaattttaaataatcaataaatatgtatacaactaaaatatttttgacctctaatcgagtctccagagtcgtcgaacatgaaaatatttttatttcacaaataactcatattatatctacgtatttcaaataaat

SEQ ID NO: 132486 - DNA, 604 bp, Cannabis sativa
  modified_base (32)..(46): a, c, t, g, unknown or other
ggttggttgccaagggttacaaccaacaagannnnnnnnnnnnnnnaaacacatttgctccagtaactaaattggttttatcccttgcaacaatcaaatgttgcatctctatcaattagatgtcagcactgctttcctatatggtgatctccatgaatttgtgtatatgtctctacctcaagggtataaacctaagggggagttacctccaaatgcagtatgcaaattgcaaaaattattgtatggtttggagcaagcttcaagacaatggtttgccaagttctcaagtgccttaactgaagaaggatttcatcattcaagccacagaccactccttattcatcaagcagtttgatggtaattttatttttctacttgtttatgtggatgatgtcatcctaacaagtaataatttggatgaacttgaagcattaaaagtcagaatgcatgctcgatttcaggtaaaggatttgggaaaattaacgtatttcttggggctggaagttgcgagatcaaagaaaggaatctttatttcccaaagaccttatgcactacaagtgttagaagaccttggctatctaggaagtaagcctatgaatacacc

SEQ ID NO: 132487 - DNA, 1168 bp, Cannabis sativa
gaagttgtatgctagtcttttcttgggttggtgtttttcgaataataactcttggttggataaggggagaataatattggcttggcaaccaagtgtttacacggttcacattcagttctgttcaagccaattgatgcactgctttgtgcaactcaaacaacatttgggccaatttcaacttaccttggtatatggatttaatgatgaaaataaaagagaatagatgtggattgatttggaaggattaagtaagaatattagagaagcttggctagtattgggggattttaatgaaatacttaatgctaatgagagggttggaaaaagagttgggagtaatctgtcacagcgttttagggactgcactgatctttgtggcttgagtgatctgaaattctcaggtaatttttatacctggaataataaacaaaaaccagatgatagggtgttttctaaaatagatagggcattggtgaactcagattggatagagtcctttgaggattccgaagcagtgtttctgcctaaaggtgtttttgaccacagtccgatccttgtctccatttacatggaaaggcatcttggaaaaaaaccctttagatactttaacatgtggaaaatggcaccaggctatgaagataaagttgctgggagttggaatcagttggcagagggatccaaaatgtttcgaatagtcaccaagttaagaaggctaaaacaggtgctcaaagacataaatagggaaggattttcagagattcataaagctgaaaaaatttcgaaagaggcattagaagaagctcagaaacagttgagtacagatcctcttaatgaggaaaaaatgctagcagaacaggaagcatgcaggaggtattctgaggttcacaaggcctatattcttttcctttcacagaaagcaaagatgtgatggctgaaatatggggatgaaaattcagcattgtttcatgcatctctaaaagttagaagagcgcataatagaattctttctattgaagatgggaatggtatctggtgtgatagcgcggatggggtgcagcaagcctttcttgattattatactggattgttggggaattccatggcacaaaggaggaaagtcaatcagtgtgttgttgatcttggtcctaagatcaatgagattcataga

SEQ ID NO: 132488 - DNA, 1229 bp, Cannabis sativa
  modified_base (28)..(36): a, c, t, g, unknown or other
cataattaaacataaacaactgctaatnnnnnnnnnaactaagcgggctttacagaaagtctcttctttctattgaacacacaactttaactcctccttttgaacatcaattatagttcttcccatagccaagaatggtcttcccaaaatgatgggaatatttcatcttcctccatgtcaagtattaaaaaatcagcagggaagacaaacttaccaacctttaccaaaatatcttcaattataccccgaggattagtcaaagagcggtctgccatttgtagagtcactgttgtgggcttggattctcagtctttgaaacataaacatggacatcaagttaatactcgctcccagatcacatagagcttttgtttccattgaaccccctattgagcatggaatattgaaactacccagatctttaagcttgggtggtagtttcttttgcaggattgcactgcactccttagtaagtgccaccatctcaaactttccttttcttggatagaatatctttcacgaacttcaggtaagctggcattttttccaaggcctctcaaatggaatgttgatgtgcaatttcttaaatatttcaaggaatttgctgaattgcttgtccatgttattcttgaaaagcctttaaggatagggaattttgatatgatgatcaatgctggtaggaggtgaagtttctttttctgcaaaccttcaatagtctttttcttgtcttgagttggtgttggtgcttgttgatccttgtcctcttcaaccacttgtcgctctgcccttggtccctcatattcttttttcacttctcaaggaaattgcttgacattgctctttcagattaatctctgtagtactaggcaaattaccttgagtttggttggcaatttgagtagtcaactgccccatctgagtttccaagaccttaatggaagatttaatctctattatgaactgaaataacatatctgtctaaagattagaccctccattagaaccttattattgttaattctgttgttgactctgttgagattgatttctctattggtagaatccttgttgctgctgatttggaaactgtccttgaaaattctatcgatgacccccttggttgtaaccatagttgttgatctgatatttccaaatggcttgagcttgctccattggcaaattgtttgttgggaattattttaccgggatttagatttactaccatgtat

SEQ ID NO: 132489 - DNA, 548 bp, Cannabis sativa
  modified_base (477)..(511): a, c, t, g, unknown or other
aatgttacaaaattaatgtgcaaaattaatgcaacacatctcttattttattttgttggagaaaatgtcaagcttttaaaaattaagaaaaatagaataaaaaaatgtagggaatgtcacttgaattttttggtgctttcctttatatatagatattgatgatattgatattgatattgattgtttactttataatttttgctgttttaaaactttataaaaattgatgtgtagtcataaattggtacaatatatacgattacaaaaaatagactaatttttttaaaaaaaaatactaaaacaaatagagaatataaatgggtctactacaaaaccttcatagtaacactcactgttatggtaaatggacaataattggagaaagttcaattcttataattcatattattatgtagtgtccgcagctagtacagtgtgggagggagtcgtgtgccatatatatatatatatctattnnnnnnnnnnnnnnnnnnnnnnnnnnnnnnnnnnntttatgagaaatttatgggtaactttttatttatatt

SEQ ID NO: 132490 - DNA, 617 bp, Cannabis sativa
agaattagatagtgtaatggaaacttctccattactctgccattacacagttatagcataattgcatggttagacaaacacataaaattttataattacgaattgtattactttcaattacgaattgcaattttttttggtctttctaacgtaccttaaaattcacatttgatttttagtttaattacttgatttataaattttaaaatactgtataaaatatttataaaaataaaacaatataatatatttttctcaattaaatttataattttcgtatgcacctgttgatagctcccaactatctaattttggctctatcctgctaataacaatatccctaagagaaattgagggagagagaaaagcttgaatatatttctattgaattgaattgagtacaatggctaagttggtttatataggttgaggaagtgatcaagttagttggaacaactaacttgtgtcagctcagccttaaccgacttaataacagaaaaaataaaacagaaattaaacaacactaattcgaatttttaatagccccctcaagttggagtgtaaatatttatgacacccaacttggatacaatgttggaaaaaggagaaggcattag

SEQ ID NO: 132491 - DNA, 633 bp, Cannabis sativa
acagtcaccaattcattacaatggcgaataatgatctctttcaaagatggaaaaataccaataggtagtgccactttgagcttcccacaaccatctaaatcaaatttcttcaaacaagggaaaatctcaacctcttgatcatttgtattcacaaacgaccaatctgatgcaggtgagaatttgagacttatttcttctaaaactcgaaatgaattatttgaagaattattacgaaatttataaggtaaatcaaatccaagatatttaatatcaagctttttcagtgagcttagttgatgaaatgacaataatgacaaacaacaattttcacagtctagataaacttcttccaaactacaatatgatggatctactacccaatcaggcaattttgtatctttataaccaaaaattttgagtgtcttcaaatttgcatgtggttggagtgcagtaagtacttctctttccctaatagaatcatctgcctcaccattccactccaaaataagctctttcagatactttttgttattcaagttgacttccaaaacatcactcacttctctaacatacttaagccctgaaatacgcaaacgtccatggagattatccaacttacccaactctttgatc

SEQ ID NO: 132492 - DNA, 876 bp, Cannabis sativa
tcatgactactactacttctactaccacactgttagatcattgttaaacggttgtgaacaaaatatgtaactacggtagttacatttattgtagttcttgaattattgttaaacaattgtgatgaaatatgtaaccacggtagttacatttatagtagttgttggattattgataaattgttatgattaattaataaattttctataacttgatactaacctgattttatttattttcttatatttataaatattagttgtgaaaaatatcttattaaatatttaaattaaaaaattaatttataataagtatataaataattacaattaatttgagtttaaaaataaaattcttgtccgtgtcaataatttattataacaagttataaaaaatgttattattatagttagaatggaacaatagaaatttgagtgtaattaataaatgaaaatatgtagaataaggttggaaattttgactctagataaatatttaacagctttttattagtgtaatgaattaaagatcaaatcacatgttacatcaaaatttatataataaaaccctaaataaaaaattgttgaatcttaattaatttgtaacattattgatattgaaggtggatcgggaaaagatgaagataatatgatttttttttttttttttttggaaagggaataaatgagcatgttagctgtagacaaatgaagttgatttgctgattaaatgaaggtaatccttttccaataataataataaagttaataaatatttttttttcccgaattttgatatgtactaaattatgttctctaaactttttttgccgttaaaaattcctccagaactattgagattgttagaattaaggactt

SEQ ID NO: 132493 - DNA, 649 bp, Cannabis sativa
  modified_base (26)..(35): a, c, t, g, unknown or other
ataaaatggattacattgaaatggannnnnnnnnngggcataaaacccaacagggtcgtcatccatgattaagatatggaaagagaaacctaggggtttttcaggtggaggtggtggacgacgaacggagagaaagaacaatgggtctggatcaaaatggagaatggcacatggatctggttcgaaatggagagaaatcatgggtgaacccaattttaaattgggactttataaaagaagacgcctttagcatcagttagtaatagaaggtaaccactttagtgtcagtaagaaatagaatgtaataaattttgcatcaaatgctatttgacgctaaattcatatttataatttcttatttgaatccattttaaatgttaattttcattttagtgttagagatacaactgacgcaattcataataatttgtgttggtgaagaaccgatgtaaaaaagactgttaattttgcgtcggttaatgactttgaccagacgcattgattgatgcaacaaatcctttttgtagtagtgatttaacaagttctagccaggtcaaatgctctacatctcagttgaatctttcaaattttcacagagattacaagacaaacgttccctacacagctttgactctctctctctctctct

SEQ ID NO: 132494 - DNA, 749 bp, Cannabis sativa
atatatatatatacaatacataaaaaatatttatttgttagaaatcatgctaagaagtcaatttaaacgaaaaaaaaatggaaattgacttttaagagacaatttttttaaaagactttattggctaaaaaaattagataaatattattttagatcatgtattttgtaaaagttattgattgaactatctgttttgtaaaatgacaaatttgatcttgtattttctaaaatagtacaaatagtaccctaaattgattttttttatcaaaataaaagttaataataacccgaaatctagaattgttatgacaaaattaggtattttttctacatatatttatgctaaaaattttcttttcaagttagttatattaaaaaaaattatcgaaaattgagctcatggtactattttgtattattttaggaaatacagggtctaatttgttgtattacaaaacagaagatccaatcaataacttttgcaaaatacaaattctaaaatcgtattaaccccaaaaaaaattatagaaatttatataaaaagaactaagacttcaattttatgtaatttgtgatgtaattacgagaacttactatctaacaaaattcttagaaataatgctctagaaaaaaaaaatagaataaattacaaattttaggggtttttataaaatctgtgcaaaaatatggattttttttttcagaaaaattattttatgagaaaaattgaagaaaaaattgaaaaatat

SEQ ID NO: 132495 - DNA, 790 bp, Cannabis sativa
cacagtacgtttaaaatcacgtcaacacgcctatgctagttaggttgttacagcataccaggcaaaaaaccaacacttggttagacaaggctgctcgacagacaagacaatggctagaaagtccctatccaatcagatattcaaacagggacatgggggcaaattttatcccaaattttgtccacctgacctggcatgtccacgtaacatccctggtcggccaagagaagcctataggctggctagagtgatcttataggccggccagaatctatgcacaaactggtcgtccaagagaacctgaactctacaagaaaacggtatacaaagctgtcctcaacttgcaaaaggctggcctacacactcaaagactggcctccacactcaaaggctggtcctcctcttggtggagctatagtgtcttaccagatcctgcaggccttgtcttatcagatcctgtaggccttgagcggccagacatcccctgtaagtctatgggcgactaggattaacctagcaagactctatgtacagcccaaaacctggacacaagcatgggctatgaattgggccctaaaagtccaacagaatggatgaataatatctagactcaagagcactttagtcttttgtaattatctaaaaacctatgcaaatatctagggatttaaactgtaatgtaggctttaggcctcatatataaaagcttttagaactagcctagaaatctaagtcacttagccttcaaattgctctaagtctgaaaccttattctctctctctctctctc

SEQ ID NO: 132496 - DNA, 624 bp, Cannabis sativa
cattgtcgataattggatacatgactttttaaaaatgttggtacaccctcttatactttatttttggtacactttaggtgaatttggtaatgtatgtagtggttttttttaggattatccataaaattttttaaaaaattttacaatatcaaaaataaattccacccatatatataaaaaaaaattagtgcaataaaatatttaaattttattttcaacacaataaattatttcagtatctctattattaataatgattttactgtgataattgattaaattaataagtttcattttaattttcagtctattttattaaaaatctattcttgcaaggccattctgcgaacagcaagtagtattgtccacgtactggcaatctctattattagtttaagagattgtccataattttttaatttttttgtaacaacaaatttatcttaatgaaatttatctttctttaaaaaaaatatttaggatcttaaaaaaaatatgaactaataatctctcctcgatgtagaaaaatgtagtgtataatagaattagttcataatttttatttatttatttattttcatgtgataagcagtactatacttctatgggttttttttttttttt

SEQ ID NO: 132497 - DNA, 610 bp, Cannabis sativa
gcatgcaacgcaactatctgaggccatttgtatgcattgctcacacattaaactattgagattcttccaacatatagcagctgcaaaaaaaaatacttaaccagctttcttatacactgctccaaacctcaccaaatgcaaatatgtgtactcctttctcacatcaagtccaagttatcactacaccaaataatatgtattatattttttttcttatttaatattttatctatatattaataattttttttcacaatttcagagcgctgagttgtcgggggcctgaggcgcacacctagctcgtctactcttagggccgaccgtgccaacactgcatctatgtacatgcatatataatactaggttaattttaagcggacatgtatacttaattatatttttagtttttattttgattaagtatatttttagttaaataattagttttttttatattattcaataaacaacattactttttattaaaaaatatttaaaaaagtactatttatatataaaaaaaatataataattaatatttaaaaaagtttattaaatataattttaatttaactctaagatcggaagagcgtcgtgtagggaaagagtg

SEQ ID NO: 132498 - DNA, 630 bp, Cannabis sativa
  modified_base (569)..(599): a, c, t, g, unknown or other
ccttcgccaagagagcaccatcacaatcggcctgcagtgaaacatcagcattttcataagaagctttaggatgttaatgtgttgaaaggttggtggaatcttctaaaggagtcattcttgttcgacatcgcttcagcacagtacgcacattaccactagtagaaacatgctgccttttagtgaaaatagaagacattctattctcagagtgagtgaaagttggtgaagtagtggtagtagtggaaatggtagcagccgagaaatacagagggatagatgtaaccaatgtggaatttgttgttactggagtggagtcttgagaaaaggggcgactgctattctgaggagaaacatgaacatatgctagaggagttgcaactgaaagcataattgatgttgtggcagagacagatccgacttattgttgttgctttgatgaacatttttgactgtattaaccgtagttgaaggagaaagacatgcaggggtagttgaacaaatgatcggcttatcatcacaatgtttgtccaaattaacaatcgaagatgtacctgttggaaattattttnnnnnnnnnnnnnnnnnnnnnnnnnnnnnnnttattaacatcctaaataagaactttctaaa

SEQ ID NO: 132499 - DNA, 617 bp, Cannabis sativa
ccccccagccattacgacaagttttgcagaattttaaagcatctagcaaactattcaaggtggccattaagctcgacaaatttgagatcacttatcaattgagagtggccataaaaggccaagctcttgccaactttgtggctgaatgtacaagcatatcccctgaaatctcttaagatttgggagaaaagcaaaacaaaaaataagcaagagcaagggtaggagcaaaaacttaaaagaatcaacatggaaattacatgttgatggaagttgcactgatcaactatccagtgcaggaatttcccttattacacctggaagaaagtttcgggaaatcaagtttggcttcaaagcctctaacaatgaatagaatgcaacagcctatgcactcgcttgactagcaagtagcacgattgacgacaaggcgaatttagtgccagtttagttcttgaaagtacaaaccattaccattccagaggaggttgacatgttggatgatagtccaacctggatgacacctattgcagcttacctccaaactaaagccttgcctaaaatcaaaaacaagggaaaaaagatgagaagaaaagttgctaggtatctaatcctagatggag

SEQ ID NO: 132500 - DNA, 628 bp, Cannabis sativa
ttaatattatacaataaaattattgaatgaatgagtgttacatatgaacatagatgggtcaaaatatagtcatatatacatgtatagaggtacacaatactaataagaatatgtatatataaataattattttagtacataaaaaatattaatgttgaatgaaaaataataatctcaacaacaatatgaatcaaaaagattaaaataaaaaatatttctttccatcggccatgaacgaccatgaagaacaaatataaatatatatacacacacgaaaatactagaattgaaaaataatcaagatatagataaagccgctatgatattaactgttaaaaatttatatgaatgatttaaagcatatatgattatgtatgaagtgtagaattaatcgaatatatatgcactatgaataaaagatcgaaatatctgcagccattaattctttgagctttaatttcacactaggatctgcaaaagaaaagaaaaatgattagtgtgagtaattggacttccaagctctctctactctagtgttgtaaataccggtcgaattttttgacatgacacgaaaccggcacgagcccagaaggcacaaacacgactaggcacggaaaaatataggctt

SEQ ID NO: 132501 - DNA, 852 bp, Cannabis sativa
  modified_base (733)..(739): a, c, t, g, unknown or other
agtcacaaaaaatatctgtacatatagacatttttttttattatgtgtcactttcatatttaataacaatatttaattaaattccttttattctttttaacaatatatttaaatatttttattgaaacttatattaataataaaataataaataaaactagatagcataatcgcacatagttgttataaaaactgaaaaaaataatttaatttatgattattttataaatttatataagtgtatatacatttagagtgaaaaattcatatcttaattagttgtcaatgataaaatataaatactcaaataataaaataaaaacaaaaaatactgatttatagttttctcaacttttttttacaaaaataggggtgatagtttttacaaattattttcacaactatactatgttatttcatgcacttttatttatgttatgctgattacatgttgctttttggtgaggttctataaaaatataattagaaagatccataaaaaaaatactagatatgtttttagtaaaaattcctaacataaaccatgatacaaaatataattaattttcaaatcaatgcaagtataactaagaaatatttataatttgatttgattatattaaaaaatagaaagaaatatttaataagtaagcaaggtagtaatcattaaatagagtgtttgtggaaaaaaattaagaggaaattaaaatttataccctttttatattgtccnnnnnnntttttaccttcttttttaaaatctataatttttaactctttttttaaacattataccagttttgcccctgtcacttcaagataccctccatgtgattctcttatgtaagggta

SEQ ID NO: 132502 - DNA, 501 bp, Cannabis sativa
cttagctattagagaatgtgttaagaaaataaagtggtcattcaacacattaacaatgaattaatgattgttgatcctatgacaaaaggattgataccttataaattcaaaaattatgtagacaacatgggattattagtaaaattcttatatattttgatgttatcatatatttatgcacatcttaatttttattagagaaaattttaaaggacaagaataaacataaagtttagtgtttatttacttaaatacattcccacataaaatacattcttatgtaataaatatatcgtaattaatacatgtaagataataatcgtcatataatgaggatctactgctataattcatgtgcttattatgtaatgaaaaatgttatgtttaaatagtaaatttaaatgctaaataaatgggagaatataaaatattttattcataatacacattatttgggtaaatggatcgaaataaacaaaaatcaataattgattatatttg

SEQ ID NO: 132503 - DNA, 589 bp, Cannabis sativa
ttagcgagaccaatgtttttacctcccgtcattgttgcatttcaccaggtgacttagattttgaaattatggcacagaaagcacgcaaatcaaagaccttttaagaccatacagtcacctttgaggctgaactgatcgagtctaaagttagatccataagatcatatgttggggaagtattaaaatcatgtggcatcaaatatgagcaaggatgtcaggttaggtctgtcgccgagggggagttcagttgttatcaccctaaacgtgtatctcgagaagaaggttgtagtactagggagttatctaagataggcgcttggagccttgaacatataagagctggagcagtactccctcttaaggattatttcaaggaattttgcaactacctcgacattgctccattccaactggcaccaaattcttacataatactggctagtttaaaatttctatactatattctgaagtgggagtgtttgaccccactagaaattctttacttctactatgtgacggcttatcccgcaaggaagctgttaggttatttttagtattaattttagattaagtttagtatatttttaat

SEQ ID NO: 132504 - DNA, 644 bp, Cannabis sativa
atgaagcctatatgggttcagatccaaaaacagggggccaaaccagtcagaaaaataatcaaggaggagctgctgcctacacagctgcaccagaagtcattgacagtgaagcttggttcgtggatagtggagctagcaatcatgttactgcagatgaaaacaacatgatgcagaagaatgagtatagtggtaaggaaaaactcattataggtgatggtaatagccttaacatctcacattttggttatggcaacttgcaaaccaacaatgaatcaaagtcactgttgctgaataacatgctattagttcctgatattgcaaaaaatctgttaagtgtgtcaagtctaaccaatgataatgacatatttgttgaatttcatcctaactgttgttttgtgaaggacaaacacacaaggaaggtactgctggaaggagcacttagagatggtctctaccaattcaacaacaaatccactcacaaacaaaaacagccacagtatttttctggtgtctctaatgtgtctaagtctaaagttgttcaaacagctagtgttaagctttccaagaaggatatatggcataggcgtttaggccatccatccactagagttcttaaactcatttgtgattccaacaatgtaaaa

SEQ ID NO: 132505 - DNA, 670 bp, Cannabis sativa
acttagaggtatttcctttttgtcattcttcgtcacttgtacacgacacgataaaatgatttttataggcttagatttagatctgggcgtacccaggacccgctagggtttctgtgttaaatgggcccactattgggataaatacatataatacatgactttgagacccagggtaggattttgtctcgtggggcaaaaatgtctgtacggaaggaggcccacgcgttctggacaggtgtcatacgagagtactgctacagtagacgagaatttcaaaaagaagtcactggacaaagggaatatctcttttttcacaatttgcgcactaccatgtcttgacttaggagaaaagatctgatttggtagggaaagcgtcaaagggcagccctatcatcctataagggcttccaacgtacctcttgggcttcccatctgggtgtgtcttgttggtattcaaaggccttcatttgttttgtctcttggaaggctggatgggctttcaggagtggaaggattgtggctacagaagtaagactctaagaggggataggccttgggcctatatcttcttcttagacttggccttcgtatgctggaaggtttgggcgtggaatcatgaagactaatctgttggaattattttactaggatcttatatctactcacaagt

SEQ ID NO: 132506 - DNA, 726 bp, Cannabis sativa
gatttgtcgacattatatcgacattttgttgatatgatgtcaattttaagatatttaagattcatacatcttgagattttgtcgacataatattatcaacatattatcgatactttatcgacacctatcgattacatcacacatacttaatatagtaatcaatcgataataatgaaccatcacaacaaagaacacataattattccattctaaaatcagtcgataatcagacaacaatcaatcgataataacttattgcaaaagataaaggcatcggtcgataatgacctatcacaaaagataaaggcatcagtcgataatgaccttcattttgtgcagcattaattggtgcaccaaaactggagagaaagcaaaagttttagccttctaaaatgggtcaaaaggggttctcttcatcctttcaattaatccttcatattttttaaacttttgaatgattgaagtgaatattccactccctctatatgtcacacgacctgaaaagtgggctgaaatgggaatagtaagttttggagccatttgtaaaagataaacaatacaataataaaaaaaaacataaaagaaaacataataaaaaatgctaaatcctatcgagaacttgttgaaaatccatcgataatcagtaaacactcaccaaacatgacaactaaaagactaattaatactatcgataacctatcgacaacatgtcgataatcaagcata

SEQ ID NO: 132507 - DNA, 822 bp, Cannabis sativa
aacctgaaacaacaacccagcagcctatacactcacctcaacagcccgaaacctcaaaccagcagcctgttcaatcacttcagtagcctgaatcttcacaccagcagtctgaatcattacaccagtagtcccataactcatctcagcagcataattctggtgttttgtctccaacacatgactcaagcatgttatcccgagtgcaccacatgaaaacaaggtctcaaagtggaatctacaaacctaaagcatacttatctactagacatcctttgcccgaatctcttgttcctactgaaccaagaactgtccaacaagctcttaaagaccccaaatggttttaatctatgcaaaaggagaatactgccttgattcgatcacacacttagactcttgtcccttatgagccgcatatgcatgttattgataataagtgggtgtatcggataaaacttaatgttgatggctccctaaatacatacaaatccaggttagtagccaaggggtatttacaaacacctgggattggaggacacttttagccctgtggttaaaccagttacagttcgaactgttctcactcttgctgtcacttcaacatggattgttaggcgattggatgttagtaatgcctttttaaatggtgatctccatgaaacagtgtacatgagacaaccaagaggatttgatatccaaccaacccgactcatgtctgtaagttgcataaagctctttatggtttgaagcaagctccacgggcttggaatgagaaattgaggcacacgttgttgcagtggagttttcatgcttcaaaatcagaca

SEQ ID NO: 132508 - DNA, 552 bp, Cannabis sativa
catcaccaaagctgagatggtttaaaggcagttgttcacgtctacattacaagaatgacacattacaagaatgacatcgatttaagagaagaatcacaacaagataaaaataatgtctacatgaatgagagaaactatattttttttagttatgcatacttttgactcttcacttattaatttgacatattaattaatactttgagttttattattttgtaaataggggttaagttgacgtttgtacaccttctcatactattcaaagaataattataagaaaaattagtaaggttaaaatttagtacaattttaatatatatttattattaaataaatagtatgataatttattttatatatataattaaaaaaatttaaacatccgtcgcgaaacccaagttctttactaaagataaaattttattaaagtatttgggtaattacttttcactgttaacataattagtatagggaaatttgattttttatccttacaaatacctaatatttttcccctaaacataaaacatttaatatttgtgggatatg

SEQ ID NO: 132509 - DNA, 504 bp, Cannabis sativa
ctctaataacgttaattaatggaaagatggttcagagagtcaagtttctattgcaatggattctagtctctcaaatgactcatttgcgaaggtttctttgcaatctcgcaactcatgatgaaaatcataagcaaaactgcacggggtttggggaacccgagtgcattaagacatctctaattgcttgttcaacaacaatcaccccatgttttgtttttcgtggaaacaactaaaggctcgtgattctcactcaccagattttaacaaacaacatcaactacgtaccctaactgaatttctattattataacagaaattcctctactcagttatagcagaaataaacaactataaaagcaggagtcctcaccaattgtcaaagagagcaacccagatgtgtgtgagacccagttgtgagagagaggagctatcatggtgagttcagtgagttcatgtatgtaaaagtaaaagagagttagtgagagaaaaatatcagagaagaag

SEQ ID NO: 132510 - DNA, 506 bp, Cannabis sativa
  modified_base (221)..(252): a, c, t, g, unknown or other
gcataactaacttacaaccgaattggctccagcatttaacaaactgatttaacataataaaacaaccctaacaactctaactaacttaagcaagtggttcctaaaaactatcacataggttatttaaagaaaattgatataaaaaataataacttaaaaaattatctaacaaattataataattaaaattatatttctaattgtttattattattattatnnnnnnnnnnnnnnnnnnnnnnnnnnnnnnnnttattattattattattaatctattcaccatataataataataataaaaataattatagttattgaaaatataaatctattcaccatattattaagaaagtatattatttttatcaaaaactttaaaagttatacaattgaattatataaaaaatttaaattgcctgttccccatattatagagaaatttacaaaaatattagaatttgaattaacttttacaaaaatactgtcacacggaaatcttttcaaaa

SEQ ID NO: 132511 - DNA, 588 bp, Cannabis sativa
tcctcgctccagtttgtcatcaatatatgtttcaatacctcccatcttaagtttttcgtgaagatgactaataaaattaaagcgagtatcttctcctctaaaactaataaaaacatcatattttttctgtgaataagagatggtggggagctgattatcatcatccatagcgatctttaacatgtgaaatgtattttcatcatcataatctgtggacaagatttgtgaagaatgagaagaaattgatcttcataactggttatatatatagtttgttaatttattatattgagagttgaatattataaagaaaaaatgtacaatttggcaactttttggaagtttcttcgaaaatataaggaaagagtagaatatagctttttacttaataaagagaaataaatataaatcattataaaaatttttacttttagttttaataaatgattaaaaaatttatagtaaaagttaataaaaaaataatgttatatttgataaatctatatctattctatataaaatttgtctatataatagaattcttggtttatgagaaattattgagtgacttttttattttattttaat

SEQ ID NO: 132512 - DNA, 1372 bp, Cannabis sativa
ctgtgttaacaacacaataaacaaatatcagtgtgataaggatttggataaatttataaatcaaataaatgaacaaaataacacattatacaagtaattaatgaaattaaatttgtttcttcattcatgataattgaatagaagattatattgaaatagagttttattttgggcacaaagcccaacacttttttctattatgttatgagaaattaatttgaattggatgagaaattaatttttttattgaaaaactataaaatctcataatttaatatataaccatattatgaatatattatttaatagacgacattatattaaattagattatattagataatttagaattaaacttatatattttcattttttatcatgcattttaattgaattatcattaatattattattatctcttttaattgtttgttatatttattaaataaattatttattatttttataataataattagtttataagtatataaaaagtgatttaataatttttaataaaaatattatattaataggagtgaatctaactaaggctttaacacttaacacaaataataatatattgtataatttagattatgcgagactctgatacagtaagcttgtgtgtagcacccgttgtataaattttgggatcaatgtaaggtggaaatttttttttgtaaaaaattagataattctctaaaatatttgttcaaaagtaattaataaaatgaatacaaacttatgatttaaataaatataacaacaaattatgtagaacaataaaataaataaagagttagtctaatagttaagttgctaaacataattgattttatatatatttacaaagatgattacttaatagttatatttttattataaccttaattgttacattggacctgtaatagcaggttaccaacatgcaaaaatttcttttttaaaattaaattaaggataattaactattttcttaaaataattaatttttaatttgaatatttaataagattttttttttgtaattaatattaataattttattataattttttaatagttaagccactttattataatatttacaataaaattctattactttataaaacttaaatttccaccccttttaaaattaatttttgaattaattaattattaaattctagaatagtttgtactagaatataggaattcgtggtttatacatcatatccaacttgaaaataaccaacaacttcatacttgtatattttatcagtaataaaaaatttgagatcaataaccagtaaatgatgtactaactttttgacgatacatagtcaaaataaaaaattaataataatctgtaacgtccccgcttcaa

SEQ ID NO: 132513 - DNA, 860 bp, Cannabis sativa
ttttaagttattatttattatatttataattacttactattttattattacacaaaaataaaattaaatagaagagcggctatattacctaatttatatatagatacataacaaaattaataccttttctttttcaactacatctattctatataaaatagattaatcagtaaagagaaactaaattaaaccattaaaggggatgtgacattttagttgatttgtaatgtttctattggctttggacagacataataaatgggacagaagatttggtgcccaatattaatgccttaaaattacaacattaaatatttctttatatttattaataaaaataataaacgttgccacttttgttaccatgctctgtgtccacgttgcttgaacttaaaacaactgatgttaaattttaagtaacatcttaataatgcatggatattcttgagctcacttgttattatatggcagaaaaatttaaaggatatagctgaactttatggatgtgaaaattcattacgtggcattgaagaatatcgcaaggtgaatgggttggaggccataagctcaacatgctttaaggctgcaaaaatctctgctatactcattgacgatggattaaggtttgacaaacaacatgacatagaatggcataaagcctttttaccatttgttggtagaatcttgagaattgaaagtctagctgagacaattctagaaaatgaagtaagatactttcaacgtttatcatgctttttcactctctcctaatatcaatgctatgtttatttgtaatgcatttttcttttttggagtttgtgtaggaattgcctagaggaacatcttggacattggataag

SEQ ID NO: 132514 - DNA, 980 bp, Cannabis sativa
ttttttattatttattatttttattttttatagttagataaggtacaaattataatttttcctcttaaaatttgacatatatcaaatttattgagaaattaaataaatataattaaagttaccaaatatacattcactaattaaaaaaaaaaacatataaacaagtaaaacataaatttaatctcgtacatgtaaattggctggtttgtttaagaaatatgagttgtcacgagcaaattagggcacgaattcaagtgcatcacgaaaatattgagcccgccctttaaaaatattggtacagtacgacacgatccatattttcctgtgacacggtacgacacgacctgtattctgtaaaatacgaataattatggactagactaacacaacacgcatgaatttacaacactaaatttgatataatattactcagttagactttctaaaactttaaataagagtgtgcataaatcgatcaaatccaatgataatctaattacaactgaccaccgaatattggttgtccaattgtgatcggatcggatgttaggtgtggtatccaaaaatctaatacatccaacatccaattgaactaattaatattttcatttagttttgatgagtaattagaatttatgttattatatatataaaaaatgtatatatatgaaaaataatattaattttttttatttttattttttaaattggatggatctaattcaatccaatagatggtgtatctaaaatattagatggatctgatccgattcaataaatattaagtctaaaatattagataaacccaaattaaattaataaatatacatcaaatgataaaaccgatcaaattccattagattgattagatgactaaaattaattagatttgatccgaagtaaaatctaatgtcaaatattgaatgggaaattttatttacaccccaaaaatttctaagtacaccccattttaataattt

SEQ ID NO: 132515 - DNA, 970 bp, Cannabis sativa
aaggtaattaattttgttttttttcttaattatatttttgttatatatatatatgagtgcacatttcataagtagtattaggaaaatttgagtttttatgtttaatttttctatttaattaaaaaaatatctcatttttacattatatgatcagttagaattgttccattgatcgattaaaaaaaaataaaaaaaaaataaaagaatttgacaaaaaaaaaaaagcttagtttcacttaagtacatataaacatattttatatagtagtctaaaagagatatcttttatattttttttaattaagtagctaaataaaacataaaaaattaaatttctcttttattattatttgttaatgaatcaaaatctaatgatttaatatttataattaaatttgtttagtaactattaatgaataatacccattaaaaaacatttcatttatatacatgatacgcaaaataaccttatgttacatggtaattatttttttacagggagaaacatgtacaagtagattgaatgagctagaagcaaatgtgaaagagatattgttagttgagatgaaatttaactctttagctcaacttgagttgattgatgcattgcaaagacttggattatcttatcgtttcgagactgaaataaacactattttgaataaaaattactccaataatgttatcaataaccctaattataatttgtacgccacagctctcgaatttaggcttctacgacaacatggttatgatgtatctcaaggtaatgtatttcgttatgtattgcatgtttcgttttattataatatttaagagcactcttatcaatttttctatactttatctttcaaaattaggagtgtaaatgggtcgggtcggatcttatccgactatgatccaacctgatccagatcatgtaaggatctgccccgccccgccctgttagatcagatactcggatcggatc

SEQ ID NO: 132516 - DNA, 560 bp, Cannabis sativa
  modified_base (492)..(505): a, c, t, g, unknown or other
caccatctcaggagtggctatgaaggcagaggcaccattcccattgttgctggtttgactggctttacttccactgtttgaagcattcgggtcagtacccatataagcttcatcatagcgattgtaacactatgcagcactatgcccatatctgccacacacttgacatgtaggcttagtattgctttgatttcttccaccacggcctctgaatctgccagggcctcttcctcctcgattttgattggaattgccacgattcccatgtccaaactgtccaggagtgttggatctgtttcctgcaaaaccaggattccttgttgcagcaacatttgcagatggagagcctgtgtgtggttgtttggaagttccagatagagttgtaagtctgtccaatttgctgtcaaagctaagaagaatgtcctgaagttcctgccatgaagttgaaactcgagcttcaacttgaagcacaatgggtaagtattcaatgtnnnnnnnnnnnnnnacattagagacaagttgtttttctggatatgggtcaccagcaagagttaagacat

SEQ ID NO: 132517 - DNA, 933 bp, Cannabis sativa
aaagaaaaatagagagagaagagagagaaaaaaaaaaagtcaacaactgacttaaaaaaaaaatcaaaggtgactaaaaaaaatataaagaagagaaaaaaaaaacatttttgaaactttaataagaaaaaatgcagtaaaaaaaagaaaaattatgtagggaaagtataattgtaaaaatttctttgtataagtataaatataaaatttagaaaaaagttagtatttagtgcaaattttcctactaataaagtgtttgagttctagatatataagagaaagaataataaattcaaataatgatatgaagaagaaaaaaaaattgacggtttagttgtgtatatatagaaaaggggtaaatctaaatcatacataaataataatactaaatattaataaatttagtattcaataatagtgctgtagatacgggccaagttttttgacacgacacgaaatcgacacgagcccaaaaagtacaaacacgactaggcacgaaaaaatacaggcttgagcattacatgacacaaagttacaaattggcacgacatgaaaaatatgtccttaagtacgacacgacacgagaaggatgaaagacacaatacgtaagcacgaatagactagctcagaaaacacgacacatgacaagctagaaaaacatggcacgacatattaaaaaacttttaactttattaataataataataataatatatgaatttatcaattataaacaagttaaaataataataaaatttaaatataatactgaatattataactctataattaaaattattaaaatataaaaaattaagattatatattaatttatttataaggtgtgatataaaaatttaaatattaataagtaaatatttaaattgatgttaatcattttttgaggcttttttatttttacaattcaaaaca

SEQ ID NO: 132518 - DNA, 722 bp, Cannabis sativa
ttgagctccatgaactcaaacttgttcaaccccaaaaataaacataaatagcagtacaaataaccttagaatatcatttaggacctcaagaaactaaccctagtcgaatttcacccagacagaaccaaaattacaaaagtcaaccctaaacctaacaaaacttcctatataacatcataaatccataatagagcaagcttaaggctttacctcagattgagtcttcaaattcacacctaatagcctgtgaaattgactagaaaactccaccttaggttggaggttcttgctggccgaacaaagaagaagaagaagaacaatggaggagctttttcttctatttcctcaattcctaaaaccaataactaaaaggttaattaattcacctatattctcttaagtggcagtcgtcactcaatggtaaagacacctatctaaaagggtaaaatgactaaactacccccacctttaaacgtaatgaaataatcagattaggggtaaaatggtctaaatccacaaccccaccaacaccaaccatttgagcttacatgacatattttctaacattacaaaattctatatttccccaagtgactaaaatatcatttgttgcattttccatcgttgtcgagctaaaatcacagagataacatattttacatttaacataaacattttgggttttatgccctaaataaaactcttttcaatataatcagatt

SEQ ID NO: 132519 - DNA, 641 bp, Cannabis sativa
tgccgtgggcttgggaacccgcgggccaaacaattcttattggaccttgtgtcccaaaagaagcccaactttttatttctttgtgaaactttatgcaataatgacattgttgataggctcaaagttagattgggctttgaaaattgctttactgtaccagcccaaggtagaaaaggaggtatagcttttttatggagaaattcatctgatgcccatcttctcaaatactcggcccatcacattgacttggaagttcatgttcctggatacgatcgatggcgacttaccggattctatggtgagccgaaccgcactcttcgtcatacaacttgggcgctcctgtgcgaactggccgaagacttgaccttgccgtggtgcatccttggtgacttcaacaatatcacctctcacgaagacaagagagggggtcggccctatcctgaatctctcatcaatggcttcagtgcggtgcttcaagactgccgactgtgtgagcttcaattgtgtgggggaaatttgaatttccatactcaaaataccttataattttttcccctaaatgcatagttattaaaattggtcatatatgaccactttactaatttcccaaaactacccctcacatttcaaatcccatctca

SEQ ID NO: 132520 - DNA, 1037 bp, Cannabis sativa
tacagctcactaactttataatattttattagttgccgaaaacctcagtcaacaactagcaacttcatcctgattggattttattaaatggtccttaatttttacatcgtttatctcaagttttgactgaggtttgagaattttgggtttgtatcggagggctaattccttaggatattctatttctaaggccagtagagaataaacttcagaaccagattgggacttttctacgaaaaagagcaatcccaattactagaagaaatttattaaactagaaacttataagtatgataaacctaaattttttactctgtctaagccctaaaaattgcccaaaaaattaaaccaaaattactaaaactaaatggaatgacaaagatgcaattaacagaataaggatcataacccaggaaaatagaaaagatcaaagaaaaggggatggttcacttaccgttcaaaattgagtttttgtacgacgaaaaactctgaaactgaggacgagatgaatggcgtgacaacttttttgaattcctgagatcgaacagtatatctgaatagatgcgcaagaagtatgtcaatgacaaggagggcatgcagagctttacgaaaccaaaatgagttttttcgcagaaaagctcaagtttttattttgaatgtaaaactggtggaaaattggttcctttttagttttataccttgagatcgattaccgtcagattaaaagaacagagatccaacagataggaacaatagagaattggaaaagatggatcattaaatgctaatgatgtgcctcgaaaccatgaaccaccaaattcaaaagcataaaaattttcaaattgggttaagacgaatataccctttgtaatcatttaaaatgtacttttttattaaaaaaaagatcttttaaggggcaattgttatactcaaaattaggctgtacgtcggagagtgactgttgggttttatgccctaaataaaactccaattcaatgtaatccattttatttatcatcaataaagaaacagaagta

SEQ ID NO: 132521 - DNA, 576 bp, Cannabis sativa
gtatcctaacacttcgacgaattacactgcaatattaaggggtcacaccaatatatctgttttaggggtgtgtactctagaagtgtccaatattatatatcctgttttgatcggtggaataagtgtgaaaaaattgagggtttttcttattcataaatctttttgctccggccaagtgggttttttttggatttaggcttagttttgttgagattgcgttttgttactgcaattcgatttttactagggcgattaattttatttttatgcaatatagttttgagtagtgtcttatggttttatttttgtaatatagatttgagtgttttaagtcttgtctgtgtgacatgattttattttattttgtttcgttgttgattttttttcaatgactcaccattaaatcgttgttagtacatagttgagaataacaagtctacgactcatgaaagggttgttagtagtgaagttacgtaccttacgcaataattgagtgctgaagctagctatgcggttgaataaacttgctgcaacagtttctacatgtgtgtgtgtctttaagcggtgcataaaaca

SEQ ID NO: 132522 - DNA, 893 bp, Cannabis sativa
  modified_base (853)..(855): a, c, t, g, unknown or other
agactggttccccaactggaattctagttctgtggggtttcatggggaccaaccgaaatttcggttcctacaggtctcactgaactggtcgaccggtttagtggatgaaaagattaaaacttcataactcactcaaatcgacctcaaataaaaccaatctgtccagacctgttcaatatatcttaaagaacataaacaagtcaacaaaacacctcaacatgcacaaaatcacaaaacaccattagagagcaaagcttgagttcataaactaaaagcttgctcaaacttcagaaaagctcctaaaaccacttcaatttaacataatacaccataatttaacttcagaaaactatagcaaacaccacttactaccacagagccctaaatcaacaattcatgcaaaaaccaaactataaacataagaaaactaaagaggaaggtgccaaaactattaccttcaaaggattcaccaagaatcaactataaaccagcaaaaccaagatgaagaacaccccaagttgctggttctccaagggtttcgagagagagtgaagagagataaatgggttactttgattttttatttttttttttttctaattttggctaaaataagataaagtttatgtttatcaaattaattaagggagaaaattcaaaataacatattctactaaagtccactaaaggacaagaaatcacaattagccaaaatgatcattttgccctccacatagccaaaaagtcataaaactacctaggggtaatttggtcaactcaaaaattttaactaatcccgacattctcaatgtctaactatattgtccatctatactaaaaatactaagatgtnnntctaatagccaaacaccgtgttccaaagttgtcgggca

SEQ ID NO: 132523 - DNA, 545 bp, Cannabis sativa
  modified_base (477)..(488): a, c, t, g, unknown or other
tttgaaaattatttaaatttagtttaaaaaataaatttcaactaaaaatatatggtcattcttaagaagagatttcatgttgatgatgtcaaatggcctatgtatggaatggatgaatgtatggagcatatattcctttgatgtagcttaacattccacctttggagattctccccgtggcatatctatcctatttctagatcaggaatccatgtttggaattgggttaagttaatttggggtctcaacacaaagagcataaatgttgattaagtttttatctatgcttcagttgtggtggatactattttggctcaaactaaattgtgatgtcataattggtttggacagttcgtgtattgcggtggtcgctagagacaattttggtcaggtggtctggatttctacgactaggttagacttttcagatgctttttgtggcgaggtggatgcgtgttgtgttggaaattattttannnnnnnnnnnnatctactcacaagtatgttaattaacaccctaaatatgaacttagatcggaagagcg

SEQ ID NO: 132524 - DNA, 520 bp, Cannabis sativa
atccacaccccaatgtcccctttgccaaatacatttggagacaattaatcacgcttttttctggtgcaatcgggctagacaggtctggagaaattgggaatctgacattaattggcttttatcaaaaacttgtcctttctcagactttttagtctatgtttcttcactcttgcaatcggataaggttgaacttttcatcactgttctctggtgtatttggacagcaaggaatgctgagactcattcgaagactcccaaaactgctttgcaaatttggcaatttgctaataactatattgctgatttcagaactgctcaatcttctcagcatctcactgccctcaacttcaaaggttcacctgtagctgctcaacataacactactcctactggtacaagttctcaggccttttctactgcatcttcatctgcaccaatgcctcatgtttttgctccacaatcacgggtgtccccagctaagcctaaatggctggcacctccttcaggcagactcaagtta

SEQ ID NO: 132525 - DNA, 814 bp, Cannabis sativa
caacagattcaacaaacaaggctctagtggagggtctaattcttagatagatatgttaatgcaattcatggcagagattaaatctttcattaaggtcttggaaactccgatggggcaatgggctacacaaaatactaacatgactcaaggtaacttgcctagcactaatgaagtcaatctaaaagagaaatgtaaggcaatcaccttcagaagtggtaagaactatgtcgggccaagccaagacaagtcaaaggatgaagataatgatcaataagaaccagctccaacacaagagaagaagaagaccattgatgatcttcaacaaaaaggaacttcacctcctattagtattgatcatcacataaaaattccctatcctcggaggttggacaagaataacatgataagcggttttgcgaatttcttgaagtatttaaaaagctgcatgtcaacattccttttgtggaggccctagaacaaatgccaagctacgtcaaattcatgaaggagattctatccaagaaaataaagatggaagaatttgagacagtagctctaacaaaggagtatagtgcaattattcataagaagctccttcctaaattgaaagatctttggagttttaccgtaccttgatctattgggaggcttgagaatatccatgcattgtgtgttctgggggctagcatcacccttatgcccttgtcagtattttagaggctacaactcggagaggcaaaaccaacaactgtaacactatagctagttgatcgttccttagcccatccaagaggagtaatcaaagatgttcttg

SEQ ID NO: 132526 - DNA, 511 bp, Cannabis sativa
tatttaattaataatattaataccggcagatatagagtattactcgcggaaattaaatccgactctaatactttgggccggattttgaccgcccaaaatttgaaataactaataccagcgaattattagaggtgggtttcaccggtattagtgaagaattcttttcggcggaacccctattaacaccggcgggtcccaccggtaataaaacactatataataccaacccctaactcagaatacattatccatttttcccccacaaaattcaccccgaccctcctcctcctctacccatttctctactatcaactgccattccaccgccattttctttgacatgtaatgtttttttgactattgttttttttcatttctccctttcatttctgttttttttttttttgtatggttatttattttttgtccatgcttgaagtattgggggagatactctgctcggaacactaatggaaagtgaaaacgagggaagagtaaaaagcttggccag

SEQ ID NO: 132527 - DNA, 663 bp, Cannabis sativa
ttttctttatgtcaagctaaagtatgcctgcatttgacttagaggcaagtttagtagcttattctaagcattaaaatttctctgcataagttctgcgtgctagtttgatgcattgtatggtgtgggtgcccccaagtgagcacgcagacttacagtctcttggtcacttacaattcaccaagttttatattctttgcgtggaaattttcttgggggtgttactgggtgtacgcatgtggaactgaaaatgaataactttaagaaattatctttgatagcaagtggctttgacacagttggtcttacgtgtaacaaaagcttacaatttaatggccgcttttgaaatcatgttttggctaccccttcctgagatgtcagacagaggccatctctgaagagtgatgggaccaaaggcggaggtatatataaggctataggggccatggccccccctctatcttcaaaacttcattatacataataaacttactttcatgaaattgatgcaccttctttgaccgaagaaaatggataaaattgtaagtttaaattgttgacttattcaaccaatgttatatatatgtctaggtgtaaaattataatattttttaaaatgaaaattcaatattgtataattgtgtcttttttattctttttatttaa

SEQ ID NO: 132528 - DNA, 592 bp, Cannabis sativa
  modified_base (562)..(567): a, c, t, g, unknown or other
atttactgttgatattattaaatgcactagtcaaataatgcatttaaaaatttcgacagtggatggtttcaacagttacctaacagtagtttatgcagcaaatagtcggatggagaggaaaatattatggaaggacttgagggagattgctactgcagacaaatgggtcctaatgggtgatttcaatgatatactagctaaggaggaaagaattggtgttagggtcaaatcatatcctgatttggacttcaggcaatgtgttaattcctgtgagttggaagatgttaaattcagtggcaattattttacatggtcgaataaacaaccaggtgaagacagaattttttccaagattgataggattttagccaatcaagcttggataaatacttatgaatttgcagaagctgtgttcctcaatgaaggtctctttgaccattctcctggcattctaactcttcaccctggtcaggtggggggcatgaatcatttttaaaggaagtttggagtgtgacaataatgttggaaattattttaccaggatcatagatctactcacaannnnnnttattaacatcctaaataagaactt

SEQ ID NO: 132529 - DNA, 1170 bp, Cannabis sativa
tgataagatgaaccgaaacatacacaaatgaatgaaaaatacttctgtatctttattgatgttgaataaaatggattacattgaaatggagttttatttaggacataaaacccaacatggtcggcatgtgaggttttattggccgatcaggtatggtctgactagggtttcctttgtttgtcatcttcttctcgtttgatctcgcttgacagtctcaaaatcttgacaactgatgtactgcgcaaggtaaccttgtctagttaatgacagattgtatttcacgtgctttcatttttgattatgccacgtcaggtgaacaaaaattaggataacaataagtataataaagatagatatagtgaaatgcacagtaataatactaaaagtgtacattcaagtaacatatatatttttttaaggtcaatttactttatttaataaatatttatacttttttttttttttgaggaaaataaatatttatactttaatattgggggtccaaattttttagggaattttcaaaaatactcgaatttcggttaatttttacaaaaatactatcacacgaatttttttttcaaacatactatctttttataaaacaatcgtaaaacaataaaatagaacaaaaaaaaaaaaaaacaatagtagaacaactaaaaaataatagaagaacaacaatgaaaacttaacattctacacaatataaaaatacaaaatatttttgaaaaaaaacacagtatttttgaaaaaaattctaccccacagtaagaatgaaaaaaaaaaagtgagaacttttaatatgtggtgtgaaaactctattttttttttttatcattttaggcccaaatattcttaagaccgaccctgtaaaagaggatagatcattttaggcccaaatttcaatatgagataagaagatggttagggttgtaaatgccaatgggctaggccttatttaattttatttttttttaacaaaaagagataattacataaagtactattttttttgtaaaaaaaattatattttttacgtttacagaatttttttttacgtgttaacagttttccataaaaacaacacgaaaataacaagaaaattatataaaagtaacatgaaaataatatcaaaacaacaacaaaatataacatacagataacaaa

SEQ ID NO: 132530 - DNA, 518 bp, Cannabis sativa
agtcagaatccattatcacatacatataaacagaaaataacattattaaataataagctatttaaaatttttgtctggtctttaaactatttagggtattgtaaattaattattttatctgtcacatgtaatagacaaaataataacataattgcttaactaaatgttacataatttaacattaaaaaaaagttagacatttttaaaaaatcactgaaccaaaaactaattaataattaagaaacttacgtaaaattgaattaaaataattttaaattattattttttttcaaattaattacagacatgaagttgatatgatacgggtatggtaattgactaagtagccataatatcattttattcgctacgtgtcacacaatttgataaaataaccaatttacaatatagtcaataattcaagtattatttttaacagactgaaaagttcataaatataacaatacatatatcataattcaaaagacaaaaatcctaaatagcctaaataataatac

SEQ ID NO: 132531 - DNA, 1067 bp, Cannabis sativa
atgctttatcaaatcatgaactactaaagacagtgagcaacatgggacaaaactactaacagaaatttagacaataaaattataacattctcaagaagcacactcaaaaagttagagctttagcatgtatcacctcatactacacgccaattcattaatatattaagaatgatccccaaagcatctacaaaataaaataagataaaaaataaattaatttcctagtgatgatattaaaaactaatagaataaattcttaatagttagaggataacaactgtcaaaaaaattatatttaaaataaaattatcggcaaaatctatgtattagttggcccactttaaaattgacctacagattaacaaaaaaataaaaatttgttatttttataaaataatatagaataatataaagtaaataagaagaaaagaagaagaagatgaagagagaaagagaaactgaatgagaatttctcaattatttatttcaatggggtaaacctctatttatacaaaaatatgactaaaagaatagaaaactaaattcatgtaataaaataaaatacaacaaagcattaatggtgataattaatttggtgatttggacatccataaataatattttataacactcccccttggatgtccatgaaaactatctcattaaaccttgctgaaaaaacttggtcaaaagaaaaaaagacttcagtatgaattaactctccctcatttaggcattcgtggagatgttctaatcaacgaattccaatcttgtatatcgtcttctcaaatattgatgctggtaatagctttgtgaataagtctgcaagattgacacttgattgaatttattgaacaccaatatgtattttcttgaaatgtataaagaagaatttagtgaaatgtgttttaattctatctccttcaatgaccctccttttaattgagcgatgcaagtagtattatcttcatagagtactgcttgtgttgatacttctttattgagtgtaatctatatgtttcccaaatatgttaagtcaataatctcactcccacacattctctact

SEQ ID NO: 132532 - DNA, 528 bp, Cannabis sativa
tacataataagattttagtaacactactattagacaacgcataaacaacatagtcacaactatatatgaacaatgtacttggatattgttaaaaaaaaaaattaacaaagtattattggactgatgaacaacgacttgtagtttgagaatactttaagaagaaacaattgtaagaacaatataaatcaacgtcaactccactaatattaaaatattaacaatcttaccatattaaaattattgttatgagagctttatattggattgtctttatgaaatatatcattagtgagtttagagacactaactaaattcttttgcatttgagggactttaagaacagaatttaagtgaatgactctagagttgtaagagggtaaagaggtagaaccaacatgagtgattagaagctgcttaccatctcctacagcaacagcttctgtcccagtgtaagcagtggtagattcaagtgtttcggacccagtagatacatgagccgtggcccctgtatcagcaaaccaaacatgg

SEQ ID NO: 132533 - DNA, 722 bp, Cannabis sativa
gggtttcctctctacctttgtcccctgccttcaaacctgactcccttggtaaatacacagacccctcttctaaactctgctgaagcttgtctttattagtatccctgctaaccgccccattcttgccacctattttgtcctctcccatagaaaccagaaaaggagaagtagaaatagtagttgcccttccaatggtggttgtcgattgctgtaccgtatctacgagagtattattcatttccatcccatttcgatcaccttgcatgccttctctgaatccatttccaaccttcaaccatttaccatacacagctgtaccttccgtgccttccccttgaaccatgattggatcttgatgacaatctttatgactatgcccaatttttccacacttaaaacacatgaaaggtaattcttcatattggaatgcgatccactttttttgttcgttacaggggaggggaaaacctggacacactggtttattgatagacatccaaattctgaaacggaaaaagccatctgctaccatcttggagatatctgagttctataccgtgattacatcccctgccttggcagccattcgatttgtgttgtttgtggtcagcagatcgataggaactccccatgcccgaccccatataggaaagcttgttaaatcattcttccaagattcatgagaattctccattttgcccaagattagcaccccattagat

SEQ ID NO: 132534 - DNA, 624 bp, Cannabis sativa
tcttatttttattaatatacttaatccatatgtttcttccaccaccacacaattacttttttttccttaatcactcttatggagcattataataagcttggccacgaggagttattttttattttttatttttattttccttttaaccatgaacaaatatattttttttttaaaaaaaaaaaatcagcgttgaatacattgaaaaaaagaagaaaaatctttcatctaaactaattcaccattcactctaagtgcatgcacaactaattcatgagcatcgttattggccgaccgacggacatgaatcaggaatgcctcagaataattggatagtagactagaaatatcatctaaaagagaacaaagatcattacaaagagatgatctcttcgtgaaagcaaagatcacagctaggcaatcaaattcaatagaatgaagagggataccaatttcaagtgaccaatccaatgccaccaaaggagctactgcttcaacatggataactgtgagattcccttctaaaccaacataaaacataataaaattcacccaaaaatataaaactaataataataataataataaatgttgagcctatcttggacaaaaagaaaacctccattc

SEQ ID NO: 132535 - DNA, 756 bp, Cannabis sativa
ctaaagaataagagattgtatgtaataaagaatttataaatcgcaggtggaggtgctgaagttgtgatactgtagcagcggtagttgagtttggagagtccgaaggtcattgaggtttggatgtcagaatagaggtagtcgagatcgagaagttcgacaatctctgcgtgaagaggaagaagaaaagtcttagattttagggttttcggaaaaagaaaaaacgtacgtataaatgaatataaaaatattaataaaatatatttatgaaaaaaaattttatagaagtggaaaacataaattaaaaatgttaacacataaaaaattagtaaactaatgtatatgtaaattccctataatctattacaaaatatatgatacactagttatatatattattacatttaattattaaataataaatattatgtttttgtaatataattgtataaaaaaatccattaaaaacggatcaaattttattattatttaaattggagtagattatattggattagaagaagatttttcaatgtgatttaaaaaataattattatatgaaaaatacaaattgacactttatttataaaaataccttcataaggcgtggacaatatttatacattttatgtacttttaattaccaaaatacctcttacattatcacctacacaatcagacgaaggttactggatggttggccaaaggttgcatcagacgaaagttgctgggtggttgaccgaaggttgcattagacga

SEQ ID NO: 132536 - DNA, 1028 bp, Cannabis sativa
attaagggacccaattggctccccacgtgtgcccatgatgatccgagcctgctaaatacaaaagacacgtgctcttagagctattctaaaaatatagtcaaaaaataataattgaagagatatttattttttgaatgattattttattattattttgtattttaaacctaacccgactatagttacgggaaggtgcacctatggttaagggataaaatgtatataaggggagtaaaattacttataaagggaccttgaatttgatactcacaaaatcattctcttgagcttccacgctctaactctaacaactcgcttgaagaatgagctcttggagaacataactctggagaactatcctcaagcattgatcaataatacttcaagtggactggcctattaccgccgaaagagagtgaaccactataaaattctcgtattcgtctttgttgaatttacttttacaaaccagtttactttgattaattattgcttgtgttcatcttatttgtttacgatcttcttagatccgttaacgaaaaaccgcatcaacactaatattttgggctaaaaaaataactgcatacagaaaatagaagaataaggtacaaatatatatatactgatggatgatttttaaatattgatatataaatatatttatatactgatattatgtaaaagttgatttcattttttcaatatcaaaagaatattgttaaagaagatttggtacaccatccttgatttgtaactaatttcacttgatcaaaagaaacatcaggtatggactattaatttagttactattagcacaaagataatttttaaaaatcttaaatagtaactcaacaagactttaaaattttagagcaaaacaaaatcaataattcactagtaaaattctagagaaataattttttaaatataataatattaactatataaaagtttatcaatatgaaattatttaatatttttaaaaaatatttaataaatataaaataagttaatattaaataatatta

SEQ ID NO: 132537 - DNA, 1055 bp, Cannabis sativa
  modified_base (1027)..(1029): a, c, t, g, unknown or other
ggtcctcccgtacccatcgtcttggatcactctgcttatctgtcctctacttggttcctcccctcgaatagctttctaggggacaacgacaccagccttttaatatatacctttgctagggcacaattagattaccaaggtaggattagtctcattatattattcttgcatgcatgatttttcggcgatgttctgagccctttgtttatttctttgagcaacgacgccaatggagtacctcctagacatcctcgcccgtacctacagtcctgagtctggtctgcccgagtcacgcgacattgtggtgactcctgggagatcttctgtttgcgttctcgaggaccaagtcgtcctgattgacgaggaagagggggaaggtgagatcatcccgtggaccgcaagcgtaaaggcaaaattgtggagacagaggcttctaagaaaccgaggcgagcgggtactcctgctccaagtgctgactcagggattcattccgaagtggatgagtaccctgtgcctacgggcattatcttgactccccttcatccagatgaggaaagggctcaactccggattgccaagtacaactacgccttgggggattacaacaaggggaatgcgaaggtggaggctctgaagaaaatactaagggatgcccagggtggatctgtctaaagcgaatatgtcggaaacgtttaggatttgaatttggatcccttgaccgacttgtttaaacgctttctgggacctagcctggctccttttgcctcagagataatgagccacgttgctgccgacttgagccaactcccaatgaagaggtatgccgcctacgcttctactaaccccgtgtatcaaatccaggatatgagtgcggccctcactgcagtgagttcttatctttaagattcctcaagtctctctttttttttatacaaggttctaataacatgtattttctgttgactgccaaattacagcagaggccggtcatctcttaaagacgttaattgtaaagaccgcttagttnnntttagaaattagcagttaattatgtt

SEQ ID NO: 132538 - DNA, 1109 bp, Cannabis sativa
tttagccttcacaccttcatcatctgataccgtgggagctgaccaaccctcagctatcgccatctagactatttcatcaacgacctttaagaacgttgtcatcttagttttccaatatggataattggctccttcaagcataggaggtcaagacgtggaacctccttcacgtaacatctccatttcttaatgatctgcacacaacacaaacaacaaatttgttgcactgtaggatgaatctcggagtggatcagctttccaaaaaaaaaaacaacaagcaacaacttcattgcactgggagatgaatcttggagtggatcaattttttgaaagcaataaacaataaaagaagaatcaaaacactacagaatctaatcaagaatcaatcagtagcaacatgatctcaatttctttacaggaaaaagttagctctaatactaattgaaaaatcgatctaatcagatgctactaattaaacaatgacattcaatcacacaatataaaacaaacctagtagtttcactacaaattttcaagaattattacaagctaaaatgcagaaagtaaaaagaagaagaaaaagatttatgccctagcagagaaaaatctctatgaaagaatcaaatgagtaggaattagttagaatattcaagaatcaactatatatatcaccaactcacacaaaactgactttgacagctcattagctcattgacagatgttcaagatattttaacataaaaatgttaatctgtcaaagctaacctataaaccaaacttagatagaactattgactatccaaatggcaaaaactttataatttgacatacacaaaaaaatataattcttacaccctcaaaatctataaaaaaatttacttttatttgagatttcaaataactttatttttttagagaaatgtcattttataaaaaaaaaaaaaaaaattatgaaaccaaaatatttgttgttgctcatcttgatttgtaagatttatgctcatagctatcaagttttaactcgatataattttagtaattagaaaaaatgtgtcattgaaatctctcaaaaaaaaaaaaaaaatatgaaaaactgaaaaaaaaaaaaa

SEQ ID NO: 132539 - DNA, 578 bp, Cannabis sativa
cacgagatctcttatacgttgtcagtagtcatagagttatgtggatgtccccatctacctttgagagtgtccttatgtcaacggtgggtgtagtgtcatctgccccttagactaacttggcatgtaggtgtgtggtgattgttcatcctgcttaccaaggtgttagtccatcatctttccttcttggagacgcctaacttactcaagctaggggtaagggtgaccgtctgacttccattataacagtcatgaccacccttgatgattaaaggtgatgaccaccccaacggtcatgactttacatattctccattaatttagtcttggtatttccgtgccacgtgttgttactcttgccacatcatcattatcaaaatttttgtaaacatttgcccctaagtttctagcggtatgactatacgtaggaacttttctgtgcagcccgcacttcaatttagttgttgtgtatgacatagtggtacggtggcgagaatgccattgttaaactagaactacatttcaaacccaaaaaataattctcccacttttcatatttttacaacatatcccaatgataa

SEQ ID NO: 132540 - DNA, 541 bp, Cannabis sativa
tcagccacaggcctacactgcatttccctcaaatgttcaagatggtacctagtacatgggcagtggtgccacgaaccacatgacttcagatcccattggtaatggctctaaactccctatcttaaatactggttctagtatattcttgttgctaataggcccttacatcttaaaaatgttctacatgtgacatctataaccaagaatctaattagcatatctatatttaccaaagataatgctgtcacaattgaatttaccaatgattgttgttttcttaaggaccagatcacgaagaagcctcttcttcagggcactattaaggaaggcttgtaccagcttcatccctccttgtcctaagtcaaagtgcctcactcctctactcataacagtgttgttgctaatgttgttgagtctgtaactcagtgtccaataaaacagtgtactaagagtcaaactcttgtaaatttatggcacagaaggcttggccaccccaataaaattggcatttgtatcttgttcatagtagttttgacaagat

SEQ ID NO: 132541 - DNA, 1299 bp, Cannabis sativa
cagcgtcaggatcgaggtctgggtctgagtctgagtttggggtttggggtctaggaccgggtctgggtttggggttcgaatccgtgttcgggttcaggttcaagtatgaatccgagtttgggtttgggtctaagtttcggtcaaaggttagatagattcaggtcatggtatggtatagaatattgattatttttttagtaaaaaaaatctaaaatatgagccaaatattattatattttaaaataataaaaaaataattttcaattttcatttttgaaaaaataattttgaaaagtaaaaactaaaaacacaatcaaacaacctcatagtgttttactatatatatttaaaaaaaaaaaaggtcttttactatattagtaaataaaaaatatataaaaatgaattcattttagaacaacgttatttagttaaaattaagagtgagcaacagttagtttggtcggttttttacacaaaaaaatccaaaattcaatcttcgattttcatggttataactcgaaaaccgaccgaccattatataaatgtaaaaaaccgaccgtttaatctacggtttggtcagtttaaaccgaccaaatcgagctttataattttttttaaaaaaataagtttaaattttctataactatttaaaactaaaaaaaattagagtattgtatcaaatatcatataatttaagaataaaattttcttagttaaataaataatgtaaaataatttttttaaaaagaaaattattcaaattatttgtgctactaatatggtaatgagttatattaaaaaaatcatattattttatgaatgtgtgtgtaaatacattaaattataataaaataaaacaatgaataattgagagtttaaataaaaaaaataaaaagtaaaactagttgaataaaattgtatattaaatatgtgaaaaaaataattatattatatatgtatattgtataataaatatgttcggtcggttttcagtttaatcatcagtttatcattaatactaaaaccgactgtattaaggcagttttaaacgaaagtgttttttttattattttttcggtgtttgtacggtcggtttcttgaatttttatttttttttttcttaaaatgggtttgggacaggctcatttacctcaatatcccgccatcttcttcttcttaccgccgtcaacgtcaaccgatctccggtgtagcagcccatttttctactctaggggaggcggccaagacccaagtcgacggctgtacccaagacccaagacccaacgtcgatgcctcgtg

SEQ ID NO: 132542 - DNA, 561 bp, Cannabis sativa
  modified_base (95)..(112): a, c, t, g, unknown or other
  modified_base (488)..(488): a, c, t, g, unknown or other
attccgctgcaaccaatgtaagcttcctagactttatatgtgtttattatagttttagaagttcagattaaggatgttaaacaacatacttgttnnnnnnnnnnnnnnnnnngtaaaataaattccaacacaccactatccacttatttttctaatttatttccaaaagtagaatctttttcaagtttgagagtttgttttttttttttagggtttcaaagaaaaatagccaagaccaaaaatgctcaaccttctaagaggcctgctcgaggttttgcctttgtttatctaccatcgcaacttgtgccacctattccagtgaccagagctccttggtcgttgtctgctccgacaaaaacaaccaagaagtcgaaatcccaagctcaaaaatcaacttacaatctcagttctccttcgatcatttgaaacgccctaatgctagggcacactacaattctttttcaattatagtgcaatctttgctaatnaaagaattttctcgaaaaatatgttaaattaaaactttcatactaattattaaactttataatataatcaaat

SEQ ID NO: 132543 - DNA, 601 bp, Cannabis sativa
  modified_base (543)..(564): a, c, t, g, unknown or other
catcatctttccctcgatgagtttccaaccggaaacgtctctttttctccttcttctgaacccgaatgacattttctagagtagccacaaccggtctatgatccgagtgtatcaaatccccattaatgactttaactgatggaaacaaattatgccgatcctgttacaacaatagcgatcaagccgttcttgcacatgtgcagcaccttgcgttttattaagccatgtaaagcattgcccttcaaaccccatatcaaccaaggagcacttatccagagcttgttggaattcagtcatagcagacatactacggtcagcaccacccttcttctcattaatggaaagaattttattaaagtcaccaccacatatccatggaagatcaaaaaggtccttaagccgacacaataatctccaagattcggatctacaacttgccttaggattcccataaaatccagtgaacctccataaattcctacccggacattgcaccaaagtatcaatgtgtccaaccgaaaaagacttaaccgacacctcccnnnnnnnnnnnnnnnnnnnnnncaaaccaccactcttccccacacaatcaacatgaaaa

SEQ ID NO: 132544 - DNA, 1253 bp, Cannabis sativa
attcatatgcaattcaactatcccatcagatttctcataccccataatgcacaatacacacttattattgtgaaacaagcacattgagactccagattgtaaagagaatgacaataagagaatttctgatagataataatcctcttgagacaagacaaaatctccaaatacactcttcgagacagtgacaatctcccaattgaaccaaagttctattttctcattcccgatccaacaatagctacacaattacatatttatagtctatcacaccctttacactactagtaagccctatttcatagtgtaacactttcaaactataaaagaaactaaaaataacaagcacaaacataagaaataaaaaactaatttcagcacactatgcttttagcccaaaaacactaaataatgaagaaccccagtgatgaaagacaaatgctttgatatacacaacttgggattttcatcaaacagttggtatgcacaaaacactgaaaatattaattgagctttaatagttcccaaaacagagtcagtaaaacataaccaaaacaacaatgaatcagaacaagcaatattaaccaatacaataataaaaatcaaacctttctcccagctattttgctagaacgtctccccatacagagaggagatacagtccatatggtcctaaccccagtactactgctacatccattatgaaaaacccgtgcccatgaagacgaagatggagataataccggtaagttcttgcccagaaagccattccctgaagaagtgaatcaaagtaagatttaaaagaaaaacaatagaagtgaatttgcaattggagaagaagattatacagtattatactatggaagattatggaatttgggtatcttggagaaaccccattgcagaatctgtggaagaaaatgcctccgagtgctctgcttgaactcattgcttcttcgtttattttacaaataagaactggttttgtgaagagtggccaaagtaacatatgggccttcctgggctaatgggccaagcccagaccaggagcccaaaaaaattattttaaaatacaaatatttcttttttggaaatttaaataaagtaaaatttttacttattttttttatgcatattttatgaaaaaaaaatacataaaaataacatctaaataacattaaaatagaataaaaaataatatagtaataaaataataaaaatataatataaaaaatacattaaaagatcatatt

SEQ ID NO: 132545 - DNA, 702 bp, Cannabis sativa
  modified_base (633)..(646): a, c, t, g, unknown or other
tctagccgaatctggggatggagaattggtcacaaaaaatactcatatcccatggaagtctgcaacataatgggatggaatgttaggggtctgaataagagggataagcagagattggtgttgaatgttcttagagagaataaagtagggcttggtgctcttctagaaactaaaataaagcatgataaggttagatatgttatgactactagttttcttaactgggagttttactcgagttctattatcagtaagagaataattttgatttggaaatccaaatttgttcaagttaagatcttggaggaggacttccaatctgtccacagcagggtaaaagtgataggattggttgaggaattttacttcactgcagtctatggcagtaattcggctttggaaaggaggtctctttttgagaagctggctgggataggaatggttagtaagccttggttaatccttggagactttaattccatattttgctttcaagataggaatggaggtaagcaagtcttggctaaggacattgatgatgctcagaattggcttgctttaggccaagtagatgagatctaaggctcaggatcttattttacttggtctaacatgttggaaattattttaccnnnnnnnnnnnnnnactcacaagtatgtttattaactaactaaataagaactttctaaaacgataaatta

SEQ ID NO: 132546 - DNA, 703 bp, Cannabis sativa
  modified_base (255)..(265): a, c, t, g, unknown or other
atatatatgtaaattaggttttcaaatcccatatttaatatttttaattatttgtttaggaagttttatttgtcattgatgctgaaaaagttatcgggtttgctgttggtgccggaaaaattactggagtaactgtcggtgccagaaaagttgtcggagttgctatcgatgctgtaaaagtcgtcggaatttctattgccgccgaaaaaatcacaaataaacagatttcttgatgaagaaaccatttttttggtnnnnnnnnnnntaccaacagcaaactccgaaaaagattgaactaaaaaaagtcgatgccgaaatagtgagagatgtagtgcattttttggagtgtattgtaaaaatattcaatcatatataaacattatacctaattggtacatctttattttttatcgaaaatcattatcaatgaaaataataatttaaatttgagacaataaaattaaatttaatttaaaagtatttgagagaaacaaaattaaaagaggaaaaaattaaacaaatatatatgctaaaaaaataaagaaatagaaagaagatttaaaaatatcacataaaaaaatattggcacataagtagaacaaaaacgcattaaagaatcaagagtcttgtcatcgaaagctaccttaaaaagactcaagaagcttagagatgctcattcctgctctttatttgctgaagaaaa

SEQ ID NO: 132547 - DNA, 666 bp, Cannabis sativa
attgaagatggtgatttggggctgaagtacggtaaatttgagatatttgaagtggatgaagacgaagaggatattgacgatgaagaagatgatgaagaagaagaagtagaagggttttacgatggaggtggagccatggagctagaggatgggactgttaaagagaagggagttccggctgtaatgcgatgctttgacagggcaaaaatatttgcaaaagctggggacggagggaatggggtggtggcattccggcgagagaagtacgtgcctttggggggtccttctggtggagacggcgggcgaggtgggaatgtgtatattgaggtcgatgggtcgatgaattctctgttgccgtttagaaatagtgtgcattttcgagctgggagggggagtcatgggcaagggaagatgatggctggggctaagggagaggatgtggtggtgaaggtggcgccgggaacattaatcagagaagctggtaaggatgaagtgctgttggagttgttacatccgggacaacgagctttgcttttgcccggtggtagaggtgggagagggaatacagcctttaagtctgggactaataaggtgcccaggattgcagaaaatggtgaagagggtcctgaaatgtgagctccttttctgcttctgttattgtcaatt

SEQ ID NO: 132548 - DNA, 786 bp, Cannabis sativa
ataaagtctatctttgtttatcttctaagtctatctttagcttttgtattagtttgaacatatttttattgaagtagagtctgtttagagatattatagggatgatatgagtactttctcaatggtgtttgtttagagatattattaagcttctgatattagttacatttgtcactactatttgtgggtttgacatgattaatcgtgttcatttgttactttagatttatttatagatgagatatattttaatttaataaataatataaaaattgttttacaatgtatctaataacaatgtttttttaattattagttaatttttattatctaatgtatataagaaataatttgagattcttaaattttacaagtacaataatttgcaaagttattttggtgaggctgcattttatttattcttaattataaaaagcatatgaaatgttgtattatatgatatcctaaaatgagttttctatacgttcaaatttatgaaaaaaaaaatagttgggactagggctgtacatatgcactgtgccactttttcacaaaatggcttatttttttagggtaaatattattttggactttgtattttataaaaattactaattggaccatctgtttcgttaaatgacaaaatagattttatattttccaaaacagtaaaaaaaaggaccctgagttcaatttttaataattttattttttaatataactaattttaaaataatttttaacacgaataaatacaaaaaaataaccaattttatcataacatct

SEQ ID NO: 132549 - DNA, 892 bp, Cannabis sativa
aaattgggccttagaaaaataagagttttgtgcaatgactcaagcttcctaatactttagcatggtgagttattggttagtataatacataatagtgatatttacggtaaaaatttttaatatttataattattttacatatgaccctaataaaaaaaaatagcggcaaaagtaccttattttacgattttattacggtcgtacctttttttagccattaagtgttagctcaaaaacgtttgacgacatattattggatcacgtattaaataagctaaagagtatgtcattatatatttctgagttggtacttaatgagcttttttttgaatgaaatatcaacttcattgaaataaactagcattctgaatacaaaatattctgaagttcaaaggaaatgggaactcagagatgctacaaccaacataaaatcgagactgcctagcaacataatgtgcaacacgatttgttgatcgtttaacaaaatataaatggacattaggcaaagaagataaaagaatacgacagtcatgaataattaaaccaaatgtcgaacccattgattgagtgcttcagattgcttggaccatgactaagctatctgtctcaatcacgacatgctcccaattttaagatttgatccaactaagtgcctttttgatacacaatgcttctatgactgcagcaaaataaattccaccaaaatagcctccccgtgcctccaagcagttgccaaaataatctcgagctacaataccaaagccatattgctcctctctttaaaaaagtgttgcatccacatttaacttgattttattcatatcgggtttagaccaacgctcagcaccatcatccttgttgttaagacacaacgatgttagtgagattttat

SEQ ID NO: 132550 - DNA, 1255 bp, Cannabis sativa
  modified_base (1217)..(1219): a, c, t, g, unknown or other
ccagcaggatatttctcaataatcataattagctttaaaaacagcttttgaggttgaatggtcgattcattaggagttgaatttgcatcaaacatatttaaatattctgcagagagtgagataggtgaatagatacccagatacaaagagctagatacaacaaattattgttaataaaaattgaaaataaaatgtgcaattgcaacaattgctcctattgataaatggatgaaaaggccctgatttcattcgaatatcaaaatactttcgtcacatacggttcgaaatctgacagtttgtattgaaagattacataatggatttgaagccaatggccttagataaatgtttactttttgtgtttcaaagttgaattgtagtagagtttgtacttcaccattaccaaggtggttagctcttaatcgataactttatcaaatctgttaaaggtggctcagcagttggcgggtatcaacaacccagatcttcgccttcttcgtcatcggtgctggtggactgcgacgccatgacgctacgacctaagttattgtcaaatgcaaagggcgcaataggtttcaatatactttgtaccaattggaataatcgtgagaaaggagaaagggtataaaaggtggagaaatggtcaaaaatggcaaatgtgaactgatggatcactgattggaataatcgtggggatatgagaaagaggtataaaggctggagaagcttggttaacgtgaaacgttagccttccgtccattttctttaaaaaaataagaaaacgttaaaataaatcgttaaaacaagaattgtcggtagatagctacttttaatatataaagataagctatagatttttataagatagtagaagatttttaaaaaataataaaataattaggaaaaaaaaaaaaaccaaaacgttagtgaaatgattgaataaaaagctagctaaaaaaaggtaagtgataaagagttaaaaaagttaataaataaaatattatttttgtagagttattatttttttaaaaaataaaataaaaaatgagtgaattaaggaatgaataagtatattttatattaattaatatttatgaaactaataaaaaatttaaaaagaagagacaattaagaagaaaacaaataagactcatcgcttcatatttctcctatatactaggttgatgttacgtgaaatgcacgtataattagttttnnntttttttaattaggttcaattaggtgatgttaagtg

SEQ ID NO: 132551 - DNA, 634 bp, Cannabis sativa
aatcactttttggcatcaattatacattgcacaactaatgacatttgacatgaaatctaaaaaaaagccatttatttatagtttctatctacattcacactcaattgattaaagagacaatgaatagtagtattatatccccacatattttcttttatttttttttaccaatattttattttaattctaaaccacacacaaatatttatacatattgtatctactttattttttaaactattcaatttgctattatgaacatcttgacattatcacttaaaacactagaaggataataatattaaaattaagattgttgtgactaaattattcaatgatattccttcaaaaaatcaatgataaaatatgcttttcttttaaaaaaattaaattaaatattttagttaataataaaaatatattttttaaatatataatcttagttaattaatgtcaaatcacttctttataagaaaaatatggacatgtatatgcctctttttttcacttgattttatttgtgtttgtcttcttaattcacagcccactaatgtttttttttatatgatagtacattatagttatacccgatatcctattaatttttaaaaaatattaaatataatttagagta

SEQ ID NO: 132552 - DNA, 724 bp, Cannabis sativa
  modified_base (572)..(590): a, c, t, g, unknown or other
taaatattcattcataaagtaactaagcaaattttttactggtaggagaatttatgtttttcaacatttgaagaaattaaaacttaatttatgtttctctcgaaaaaaaaaaaccttaatttttgttataattttatataatagaattaaattatacttataatagacatctcacccgttttttttaaaaattctaaatattttatgataccaaaaacaaaatttaaaataatgaaatgtacatataataataatattctaatttttctgaaatagttaaatgtttataatatataactacaatatatacaactaaaataaaaattaagtaacaatattttaagcgctaaaattagaattttgataaaagcacagatagtgcctacaatcatattttcttttaatacattaagggtcgtgtggtacgcatgattgaactggattagactgaaaaggattggactggactggacaagattagattatactgaaagtaatcctgtgtttggtttaagaatagactggactattttatttatctcttttttttaaaaaaaaaaacttaaattaannnnnnnnnnnnnnnnnnnaaataaataaaaataaataattcacaggaaaaaaataaatataaataaattatacaataaaataaaataatatatcttatataattaagtatatatcataaatatataataaaatatattatcatattttttat

SEQ ID NO: 132553 - DNA, 891 bp, Cannabis sativa
tttgacatgtattaaattatattttgaattgatacatataaattttaatgtcaaaaatttaattagccaaaataaattattagagattattaaaataaaaaggtaaggaattaggattagtcacggagagaaggctacggttggtgcaaagaagtaaaccgatccaatttcactccattttcttcatggtctttaaataaaataagtatgtagaccatagagtttgccactttacaaggggccaagcatgcttaaatagtaagagcattgttattaggtactagtggtgtctagtacttttacgacatgtcgcgttgtaattgactaacgatactccttaaaaactattatattaaattatatgggatttaatacttagttgaaccaatagcgatattgacacataggagggtgttaaacatcactggtgctctttagcatttctcaaataataaatatgactctcaatcttctccacctcgcacttctagatctccatccatatatcccacattacttatctaacttgtttctcttagttgcatttacatttacactcgactaagagcatctacgaattggtgatattaaacaagcataagtccttttgaattttcagagtaaatgaaaaaataaaatacattaatactttgatggaatttaaatatttattttcgtctccacaccaattcatttaaaagcccaaaagtcagctcatgttacaaactccaaagactaaattagtgctcttgttcgtaattttaactattattggtattcttctttgtgattttgttgtaataaattcaacacgtattttcaaaaaaaaaaaaataaaaaaaatccaacacgtaagtatacgtatcgttttaacaagtaatactcaggtaa

SEQ ID NO: 132554 - DNA, 700 bp, Cannabis sativa
ggcggacccacattgtagcgagggggcaagtcgccctctgaaaaaaaatcagaaaaaaatttatatgtattttagttagttacaacatagatttgtaataaaagataatattcatacacataataataggttgggtagctagattacatatgtgttagaggtcaaaggttcaaatcctaaaataacattcatttttttctttttgagtttatttttgtcctcccgcttttaaaaaaaaaattacgcatcccttcagttttaattctaagtccgccaatatattgtatatataaatatgaatatacatgtatatatatgtaaagataattattttaatgtatataaaatattaatatataatgaaattaacaactacaaatcaaaagaacaaaaaaataaaaagaattcacaatcgagcataaataaaaataaattgatcgtatatacatatatatacatgtaaaaaaacttaaaatataaatcatgacaaagataaaaaaaacgctctgataccaattgttagacttaatttgatatgaaaaataaactatatatgaattatatgaaaagaggaataaactataaatatattgaaactttatatgttatattattttacaatataataagtgtagattaaaatgtagtaatatatattattatgtgaataatatgtattaggtgtttggtaaataaattg

SEQ ID NO: 132555 - DNA, 605 bp, Cannabis sativa
aatgcgcaaactaaaatcgaaaggtacgttttttttttaaaaaaaattacattttaaaaaacattgcttgtgttagtgattattttttgattggatgtggatttatgattatttttgtgagatcaatttcttttggatttgtgtttgtttaagaccttagatagtggtggttatggtattttctagggttgagcataaaatccaaaaaataaaaaaaaaaaaccattcaaaccgacttactgaacactgttggaactgaaactgaaggaactgaaaactgaaaaaatcgctaataattaaaattaccattgaacggtcaatttttttgggtaataaactgaccgagaaaattaaaaccaactgttatacatatgtacattaaatgattaatttgttttttatttatgtattgtagttactaataatacataataatatattattattttagttatattaaagttaagagaataagataattaatttttgaacaattaatttgtttgtatgtagttgtaaaatgtaggctaatggtctttatagaataaattggatcatattttaaaagaagttcagtttgggcagtttaaaccgaccaaactgag

SEQ ID NO: 132556 - DNA, 734 bp, Cannabis sativa
gatgaggtggcgcagggataacttaatcattacgcgggggctctccggagcccattttatggagtttgttcttcgtttttgggggttgcttctctgtttttgactactcgtctgctccggctccgactcctgccagcgacggtgagttctctcagcgatttttttcacaatagattttaattctgaatttttattatatatgtcaatgttccatggttaatgtcgaatttgggttaaagaaaattgggtcttgaaaaatgtaatgatgcattgcattattgatttctctcattgaatcttcttagggttctttggttgataaaattttgtactgtttgtttgtaataaagatttgatttttatattttatttttggtgatttctcaggggcaacgatatatcaagggattgcaagttgatgttggtggctttggtagtgacatacctactgaagagagattatttgaattggggttggattatatgttgtgttatttagtcatgaatttagggcaaaatttatggatttatataccaattagtgttttgattttgataatttattgattgtgttgttgaggattctattctgtttggttattgtaaaaaaatagttgtaatattgatagttaatatttattttggtatttttttttgaattgtatataatgtatacggttaaatatgaatatatattataaaaaaaaatatgaatatatattaattttatttat

SEQ ID NO: 132557 - DNA, 590 bp, Cannabis sativa
aattatttagggcgttacaatgagtttgtagtcaaaatgccaaggttggccaatgagtactcgacgtctatccccaaagcaaccaaattcgacagtatagaagttgggctctttttcaagaacgttgatggaaaatctttcaggtcacatctgcttgagtcggttcttgaaagcttcagagttgaagtggcgagtggtcaagagcttgaaggctaagaaggcagaaggctcttcacgtccatcatcctcgggatggtcaggtgtttcagtgaaagaatgaatttgtgtttcaagagctgtgaggttaagagtggcagtaaaggtgttggacaagtcgtccattgtgagaacaggtgtgggaatttgggagtgaacaaaaaaggaaaagttagtgttgagactgagataaacaaggaaagtatgcagagaatgacagggtgcagagtgaaacaaggaaagaacagatatatagaagttgaagtggtcgagtatatgctctggcaagaggatatcagcaaaaattaacttctccatgtcagggaaactatcgattatacctgcagggatgacagtggctcctagaattggga

SEQ ID NO: 132558 - DNA, 1111 bp, Cannabis sativa
  modified_base (809)..(819): a, c, t, g, unknown or other
  modified_base (1073)..(1080): a, c, t, g, unknown or other
tttttattttttttttaaagaaaacctaaattaattatatgtatattttaaaggacctgaattaattatacatttaagttcatataatgctgaaacaaaagtggtatatatttattttaaaagaacaaacaaattgaaaagctggtcatatctccttaatgaaattattaaaaagatagaagaaggttattttaatagaataccattaattatttatattgtgaaatatggtttaaattttttcttatacatgtgtcatgtggtaaacaattgttttaattttatttttttgacaatgtaaattatttaaaaaaatttaaaaatttacatgtgatcctaaataattacaacatacacgatcataacaaaagttaaaaactctttcgaatgttgaaataaataaaaaatctatcgaaacatcggtgtactacaaattttttaataaacatttttaacatgaatgagtattattcctgaatggataatattaagaaaatttgagtttttatgcttaatttttctgtctaattagaaaaatattttatttttacattatttaaattaaattcatataattaaaaaataaattaacaatatacttaaatgtatttattctaattaaatatattacacaaataatttaaaattagtccaagtgttaacaagttaatatatctaaggctaattagcaattttttcttccgaactttgacatgtactaaaccatgccccctgaacttttatggccgttaaaaattctccctgaactattaaaattgttagattttaggacttttgtctaattttannnnnnnnnnnctaacatggatgaaagttcagaaagcatgaactagtgctaacaacactagtgtgctatagtactgagtgcatgtggtattatggctagttgtacatatagtatggattgatgctaccaatactagtacgattagagtattgagtgcatgtgatattatggtcaatcgtactatgttcaagaatgtttgagattcgctatatatgtttgacatggtttatgacttgttgataggtgtatgtgttgggttttatgnnnnnnnnaaaactctatttcaatgtaatccagattatt

SEQ ID NO: 132559 - DNA, 1132 bp, Cannabis sativa
ataaaccacattcttggtttttagcttgtcttggacaatttgctagtgaaattcttggccacgccccaagatacgcatttgatgccccataatcttgtatgccctattttaaaaattatattaacatttcaatgcattaacataaatatatatataacttagttaattaaaagatttattacataaagagtgattaaattattacctttcaaacattgcagtaatttgtgagggaactttgtggccacgtatagggtctaaatggataatttttttcggcgcaacgatttttggcttccaacgcgcacaaaaatattatattgggatgtatgtaagatagtataaaaataattttaagttataatatagaaaacaatgagcactaaaaaattaaatagtgtttacccgatatttcaaggaataaaaaatatttggtgttggttattcatcgatgataaccaatgacccaatccttgtgatgcattctcaaaagaatcttccttctctgaatcgttgataccattcattgcgagaagctctaggtcataaaacttaaaaattcatctcaaatcatttaagctctcccagatgttgttaaaaattagtgttttataatattaattagattaaagaagagtatacatcattccaaaaagtattccctagttgccgacgaagtcacacaatgccacttgctatatatcttctccagataacgtgatctgggtacgaggtgctatgaatacacggggcacccgaatcgggattatatcacgtttatctttgactcttaaaaattcttcaaccatccatttaagtgacttgggaattagtgccatgatctctagcgtgaataatagatttgcttgatgaccactgcctttatgataatgcatgggacctttttttttttgacacatcacatctggatggtggttgagctaatagacccttgacaaaataccatataatatatcaaatttgatcctaattctaccgaatttttggcaccataacaactgtaattgaacgcctccaaatattttaaacatgcctagtgacacacaaaacagataaaacaattgatttcatgttgggttttatgccctaaatagaactcatttcaatataa

SEQ ID NO: 132560 - DNA, 754 bp, Cannabis sativa
gttatgaccctaaacttcaccaactcgagctgtcttaaaatatcattgtacgcggtcagacagtcaatagcaatgaaggtgcaatacttaaaggtactttgtggagtatcaagacacaaggtgttggaaatcaaatttttcccatggggattagcgaatctttgttgaacccaatgagggtgagaaccactgggagacaggtcttgattcgtaagttcaatagcaaggaatgcttcctcaaataatatttttacggagcttccactatctatcacgatgcagggcactaccttgttggcaataagtgcttcgataactaatagatgatgatgtgggaaacgtacaaacttagctttttcctagataaaattaatgggttaatccatgagtcccaacctttgtacaggtagttgggttacgtacttcctatatttcatcatgatgatccaactcgtgtgcgtatcatttcaactcattgcgagtgtgtcatctattttagactttctttactaaaattagaaaaaattctaaaatccaacaattttaatagttcaggagaaatttttaacgatcttaaaagttcaaaaaaaacataatttggtacatgttaaaattcagtttaactgttatctatatatagggatatgactttgtcccgttattgtactttcacggattgtaatccgtaatgtacgacagccgtcagatcagggagttatttgatctgacgactgagattgatctagggataatt

SEQ ID NO: 132561 - DNA, 873 bp, Cannabis sativa
  modified_base (241)..(241): a, c, t, g, unknown or other
  modified_base (645)..(650): a, c, t, g, unknown or other
aataaaatcctatacgtatttgtactttattattattatagcttattttgggtgaaaaattatttttctaatgctaaattcatacataggtagaattttttttttgtgtgtgtttggagtttttatgcttctattgatggagataagggagtcgttaagtgtcaagttaatagctacgtgacagtttttaattggtgcaagtcattaaatttatatttattatttaaaaattaatttaaanataccaataagaaaatgacatgtagataattaattgacaattaatagtcaggtacttacaaaagttttaataatataatttaagtaatactaccgtcaaagtatttatttacaattgagagttaaacttaaatatttacaccataaattacttttatatatatggacataacttcttcatttctttgtatgctcataaaaaataaatatataaaaacaaaagaaaaaatttaagtatttttattattaccttaaattatttagggtcttaatcaattctttggctaattaggatttttgtactttaaactttaacatgtaccaaattatgtgtcctgaatttttttggatgttagaaattatccttgaactattgagaatgttagatttaaggacttttgtctnnnnnnattcaattttactatttcagttattgtttatgtattcaatcatgctctctagactttgatatctaccaaatcatgtcccccgaactttcacatgtactaaatcatgtccctttaacttacattcacgttagaatttttttactataattggacaaaagtcattaaattcaacaatctcactagttcaggaggcatttttaatgaccttaaaagttcagtgggc

SEQ ID NO: 132562 - DNA, 574 bp, Cannabis sativa
gtctcgacacttggggatgtttatttactcgcatttaatgccttagttgttggtggacttagccctctatcttcctttttcttttcagcttatttatacatgttcccccctttgttaatggtatcattcctctagattctctaggttttctttttgcgcgtgtatttcttacttcttttcccctagcctcaaagatgtcaaaccctccaggctctcctcttccccaatcctcaagtggggatgaattccactctgatgttggggatcgatctcctcctagccctgcgattttctctcgttactatcggcctagtggcgaggctattgttgggaggatgatgcgagcttatagggctaggcgtgatgatgcgtcttcgtcttctgacaaggagtggctccagaatttttttgagaatgagggacgtaacgtttcagctacaacaagagtccctgctgaattctatgctcttcgtttgcatgctgaacgccatcgtgactatcatcgcatgcaagcccggaaccgtcgggcctgggacgcggacctggagagggagcatttagctaacgagaggcg

SEQ ID NO: 132563 - DNA, 733 bp, Cannabis sativa
ttttacttttcaattttttaataattctaaattttaaaaacaaaaaaatcactttcaattttttaaagcaattttttttaatcaacattttggactttgactctaattttgaccttgaaaactgaatccggacccagccccagacttggacctgcccccggtcttaatctcgaacccgacttaaattatttaacaaatgaaaataaaatttactgaacatacttttattttttatttttaaaatttaaaaataaaaatagttatagaacacatttttgtttttcaaatacaaatttttaaaataaaatttttacttttattactgtgattaaaaaatttaaaattaaaaatattaccaagcgccaacttagaataatttttaatataaaaaatattgttcaaatagtctatttaacacgcgtgtaaataaaataatcacacatgcaatagattgtttgatgtttgagcctatgtttaccattcagtgcattaaatttttttgattttctttttaaattttgcagaatattttaaacaactatcacgtacacaactataaaaaattaaactattttttttgaaatagatagaaatacattgatgtactatttttaaaaccctttttaaagatttcattagggaaatttgattatttatgcatactaatggggaaaattaattccctaaacttgtacattttaaaattttaaaaataggtccactttacattaaa

SEQ ID NO: 132564 - DNA, 535 bp, Cannabis sativa
aatctcttcttgcgatgaatgagctatgacccccttacctttttgttcttttgtcaatttttgtttactatggtcaaggaacacaccctcggcaaccacatcctcactaacacgtgttaatgcaatatcctcacccttggaccactcaccattcgactcttgcatcccattcatagccgcaggtgtcacactctccactacagtcgatccatccaaagctgaagataccttcgacaactccatatccctctccactacaggtatcacactttgcttccctaattcatcaaccatcataggcagtttaccctcaggtgccacggccaaattctgggcagcagacccattggagaccaactcctcctcacgctcacgtgcctctagaacaaagataggatctaactcttcagatgtaggtcctgaatagcgaacccggttcctcccaaccgcagcaacaatcctcgaggcttcacccatggtcataatcggcctatccaaaggagaactctcccgatttctctgtacccgaaaccga

SEQ ID NO: 132565 - DNA, 642 bp, Cannabis sativa
ttcgaagcttattcttggaaattttgcatcacacgaaatagaggcaaaggccatcttccatagtttgttttggatcctccaattgtaattgccgattaaacaaatagaggcggacgttttgatggtttcaaatgctttagaaaaacctctttctgtactttttttttaaagatataattgtagatattttaagttttttatttttttctctagagttgctgttactcatgtcaaactttgtgtcaacataactgcttacggatatgctttaaaattagatgaaaattatgttcggttgaatttattcctcttactctttgttgtaaatgactcacagtattaattaatttatgataataaaatatttctctcattaaaaaagggtgcagatattttatagggactggctcttcagttagcattctaaatgatccctggctccctgctgaaatcgatggttttattcactcctctcacccggctctacataatcaatatgtctcttctctccttaaaccagatgccaaagaatgggacattgatatcttgaatgatcttcttgatgatcgtgataaagaccttgtccttcagctccaactcccctcatctggttctgaagaccactggtactggctaaaagaa

SEQ ID NO: 132566 - DNA, 872 bp, Cannabis sativa
ggattcagaaatggattccatgaagaagaacaaagtctgggaatatgtaaaaccacctgaagattttcgtccaaagttagggtgttacacgtgtcaccttgtaattagtttgcgatgctctataaaaattattatattaaactatatgagaccatatacttaattgcaccaatatcgatattaacatgtaggagggtactagacatcactggtgctttttaacaattctttaaaataattcaaatgacataaatgtaaataaaaaagagtaaattagactctatactttttttatattgttttcttttatttttaccctcttttttaaagtctatcatttttacctctttttttttaaatactttaccaattttgtccctgtcacttcaatatactctccatgttaatcttttatgttagagtattttgggtacactatatataaaaagaggtttgtttcaattaaatataaattagaggtagatttggttaacttataaataaaagatactccaataaaaaagtagtgtattcattgtggtgtaaattttaaattatagcgaatgttgtgccaaatttggcacaaaatttgttatgtgccaaatttacattactttttggcacactattggagctcaatttttattaaatgagctatattttagctttccactgcttatttgcatctccattgagatgctctagaaccatctttaatgagagatgcaaaagttgatttatatttagtacgaacattaattttgtgatatttttgctttaacttaaattattgtgctccaatacataattataaatcttgatgcaaaatttaatatatcatttaatgtttatctaataatttattaaaaata

SEQ ID NO: 132567 - DNA, 511 bp, Cannabis sativa
ccatactgggacttggacccggactgggagctgtgacttggggacctaaacaaagactgggacatggaccaaaaccgtcacccagacctagacccagacccaaaaacaagagttgggcccaggacctaagaaccagactcagacctgggacccaaaacttggacccacactggcactgggacctgaactcagactcgaacccgtactgggacctggacttagaccgggacctgagacccgaatccaaaccggaacacgaacttggaccggcacagggacctaggacctgaacatagatgggggacccaaactcgagaattgggcctctaaaccgggaccagaacttaggcctcagaacttggatcgggattcaggacccgaccctagacccaaaccttaacctaggacccaccttaggaactgggatccaagactcgatgcttggacccgacccatagtcattgtctagatcaaggacatagaccagaatccgaacccaaactcgaactca

SEQ ID NO: 132568 - DNA, 608 bp, Cannabis sativa
tctcccgaaggcaaaaaggggacgtctcagattccgattacgaggaccgcgagccttgcgcccaacacatactggaggcagaactcatcaagaactttaagatgcctgaaatggcggcatataccggagactcagaccctagtgatcatttatcccgtttcaatcgggtgatgatagtcctgagggtcagcaatgatgccaagtgtctttgctttccgctaacattaagtggttccgctgaggaatggttcaaaaagttggaactaggatcagtggactactggaacaagttgcaagtcagcttccggagacaatttgtcgcagcgagaaagattaatctcgaagtcagcactctaactaacataaaacaattgcccacagaattcttgaagaactttataaaaaggttcaaagaggaagcttcaaaaaccaagaaggtggatgacagacaatagcttccacttctccaagctcgggttcgcacggggaccccattctagaacaaattacaacatgagggagcaaccaatctccaagatttccaaaaaagggtccaaaagtacatcaatctagaagaggcctagatagtggcctacgggggatactat

SEQ ID NO: 132569 - DNA, 847 bp, Cannabis sativa
agtaggtagacaacttgtcattgctcgccacaccacatgctgcactttggttggaacttgcattttccacaggtgctgccactatttttctgcaccagaaattggccaatcaccactgctttgttgcagcagtttgtaagggctcttagccgagtaaaatccaaaggtttactcagcccaataccaagaatcagagcaaaacgaatcaagtaactgtattgacaagattttgtctctgtcctgatcattgaacatatcttgcagcagctccacatcccagactttactctcaatttgcataaaatagtccactgtccttccaatcaggcttggatgataagaagtaacaaaattatgctctacacctggtaaccaaggatcttctaaaataagagtagatttgccatcactaatagctctcgtagcccccatcctaaccaaactttgagcctcccatatactacgccaaataaagcttgggttcggacccaactcagcattgaagaaatttccatttgggaaatatctagctttatacaccttagccacaagagaattttcattagtaattagcctccatccctgttttcccaaaaaagccatgttatagtcccttagatttcgaaatccaagacccctagcatccttatggcgacttagttttttccaactcatccaactaactccttttgttctagagttagactgagatttccactagaacttcgccattaaaccctcaagttgagaacatgtttccttggtaagaagaaatacgctcatagcgtagctaggcaaagcttgagcaacagacttcaaaaggacttcttttccagctttagagaga

SEQ ID NO: 132570 - DNA, 719 bp, Cannabis sativa
  modified_base (308)..(310): a, c, t, g, unknown or other
aatctgttgcagtgactagagcaacagctgcagcagcaccagtcataacagaaaaatcaccatctgttcttgtaccaccaccaccaccaccacggccaccaggagcaccaccggaatgataacctgttctcgaatgcacaggattatttttcctctctttcttctcttggctccaaatgcaacccatcccaagaatatatccccaaaaagaataagaatacgcgcgttaccacactccctttatatgtgatctatctttcttttgtatatatatcactcttcttaaccttaatatatatatatatatnnntatatatatatatatatttcccaatgttgatagaaaaggcatttatatataataaattgtataaataaaatagaactttctttctaacattaaattgtgtgaatgtatgatcgtgtataatttaatacttgacggactcatggactctgttggaaagttttaaagttgattattgttatatccttacccaaaaaaaaagtttattattataataaatgtgattatttggtcaactcgaatatagggaggattttgacagttaaaattagttcccattcactagaataaattttgtttttaatcacaacaaaacttgtcactaaaaacaaaaaaattgtgactaattataaatcataattcttatgttgtgattgaaaggttcgtggataaaagtattagtcacaaaaat

SEQ ID NO: 132571 - DNA, 1071 bp, Cannabis sativa
  modified_base (1024)..(1033): a, c, t, g, unknown or other
aaccgttgcagtgtgttgtcacatcacatccttatattctgaattcaaaattaaaagataagaaatcttgcagtttaatcttggctgctgaaattatttaacctcgatctcaaccgtgacagtgtgttgtcacaacacatccttatcttctaaatccaaaattagaagataagaaatcttatagtttaatcttggttgttgaaattatttgaccacgatctcaaccgttgcagtgtgttatcacattacatccttatcttctgaatctaaaattaaaagataagaaatctcgtggtttaatcttacccgctgaaattatttgaccacgatctaaaccgttgcagtgtattttccttccatatgtaatgtcacacttctcattcaatttgatcacatctcttcaacatattttctaaatagctacattttcttcaaaaatatcttccatttgcggttcttcttactcggtagagaaagatgtgtacttgtgtcgtgtctatgattagaatttttgagaattaatagaaaattatgattttttaaattaattgttttttataaaagaagacaaaatttagtattgatcaaagttcatgggtataaatgctaatttttaacggttaaagtaacaaaagctacagaagggacataattatataactgttatattttaggaataatttttaacaagacgtatattttaaggggccagatcatgtagtattgaaaattcaaagggtaaaaatgttaattattcaaatctataaggtaaaaaacaaaattaaataaggattgaaaataaaattaaaatgggttgaagcttataaagtatataatcaaaattcaaaactttgtatacataagcttcaatattattctaatacatgttaatttcttctagctgtgataagctactcatggtgagtttcatcaatcaaaataaaggcaacacagccacccgggcaatgaggtggactaggcagcagactattgggttttgtgctctaaataaaactcatttcannnnnnnnnnatttactaattaataaagatcggaaatcattttatgtt

SEQ ID NO: 132572 - DNA, 544 bp, Cannabis sativa
cccaccattcccacggtcaccactatcctctccactctcaattttctttccaaaagtcaactctttttcagtttgagagatttttttttctagggtttcaaagaaaaatggccaagacaaaaaatactcaaccatccaagaggcctactcgaggttctgcctctacttttccatcctcgccacatgtgccacctattccagtgactgaagctcttgggtcgtcgtctactccgacgaaaactgctaggaagtcaaaatcccaagctcgaaaattgtactacaatctcatctctcctccaatcattgcttctccgattgcaaccccaactcctatgcttagtgatcatgatgaatcccattcatctgatcacatattgtcaaagtcatcttcttcaaatggtgcttcaatgtcaagagagctatagtgcctttacctacagtgagttctcgtactaggtccaaagtgtccacaccaaagaaaccagaggtggttcagcccaaagtagtctccaaaggaaagaaagtggtaactttatcctcaaag

SEQ ID NO: 132573 - DNA, 530 bp, Cannabis sativa
  modified_base (478)..(481): a, c, t, g, unknown or other
agcaaagtcttccaatctctttcccatgccgtaatatcaatgagcatggcatctggtcttctctttatttcgatcaacagagaaagtcttttgaaagggccatccttctaaaaggtgatgtgtctttttggaagaaccagagtatatgagtatgcttaatgataaaggccacatttattcttggtcacattctctatgtacgggctgaattggtggaagttgtagaatccttcctctttttgagtagaacttcttttcaagtcacagagaaagttgatttcatgaggagttgaaataggttgattccttaagcagtaaaagttgaagaaagttgagagaattatgtagtcatttggacttatttggaaggggagactccaaaataatatacaattgaaatgaaccacgagtgtaaaggcaagtaagcaacctcgttcatgtgagaccaagaccaatgtaataccctggaattaagaannnnattagcaaaaccctaattagataactatgaataattgaggaattatatt

SEQ ID NO: 132574 - DNA, 560 bp, Cannabis sativa
cttccagaaaacaacataacactattaagtctttgattgacaataatggtcatgttgtgagttccaaaacaggtatgactactgtaatcacttctttttttggagagcttttttctgcagcaaccgtagacactgaagctttgaaccatatcttggacactatccccacaacaatcactgcagatatgaatgcttctcttactcagccttttactagtaccgaagtgttcaatgcccttaagacaataggtcctgataagagtcctgggagtgatggtatgtcagctatgttttatcaccaatattggccaattgttggggacgtagtcacaaaggttgctttgggggttctcaatgatggttgtagtatggaatcctttaatcaatcactcatcacgttaataccaaagattaaagttccttgaggtatgggtgacttcagaccaattagcctttgtaatgtcatttacaaaattgtttcaaaggctctagcggtcagatttaaagatgttcttccagcggtaatctctgaaacacaaagtgctttcctctcgaataga

SEQ ID NO: 132575 - DNA, 701 bp, Cannabis sativa
gaacccgaatagctaagcttctaaataaagcacgcccaaaaaaattgttatactttaagacttgcaatattattaatacaattaataataaatactattaatatttaaaaaaatatcataaattacgatattaccaatgttaataaactattaacatgtaatattctattttttttttataaatgctaattatttatgtagtttcttaatataaaaataaaaaattataaatatatgaaatgctttctctctcgagaagagcctgcctgaaggaatgcaggaagagcctgtgaacaccatggacgagttgctttcacgaacggacaagcttactgttctagattaggatagatgggcaatcaatgaaaatgggggtgatgaagtgggcaaattgtttgcaattgggagactatgttccagccggactatgaatcgttctttgattaaagctattcttggccaaatgttgggtttatcagagaaggattggggcgttaagatcaaacacattacgaaggactctactttcttggtgttctctttcaagtcggcccaagatttgaatagaattttacttatgaacccttgatttctcaataatggtactctaatcttggactgtatgacgaggattcctttgaattgggataacactttttctgagattctgttgagtggtcaaattctatcgctgcctcctc

SEQ ID NO: 132576 - DNA, 644 bp, Cannabis sativa
tgattcataggatgctcctcaaccctttgtttttgaatgccaggtggaataccaggtggcaataccccactggccccattcgaaaattccttaaccgtttcactcgtaccttccgtacgtacaacattcgcagtcgtggtagtgggggcagcacacacctctgtaccttttgtaccatccgcctgaatattcgctgttctcaggccggagtttgacgactccgccctctcccggagaagaagagggcctttagtatcgaaacagctgcgtattgggacagaggctctaatccacggaccgtagagaggaacagccttgcccacaggggggaaagcaaaggcacgttctcttgggcatatactactgtcgtgagcaatatgtccacaattgaaacaaatttttgggagctttctgtatttgaattgtatccattcctgccttcctcttgtaatactcaggtaaaaccccgccgggagacgttggtcgatgaaaatatcgaccttgagttttaggaaacccctgcgagctatggctctgttatcaaccccatccgactccaggaattctcccaccttcgctccaatcaccctggagttctgaaacaccaggtagggtgttggcagcccatgaatctcaacccagaa

SEQ ID NO: 132577 - DNA, 857 bp, Cannabis sativa
  modified_base (755)..(764): a, c, t, g, unknown or other
ggggacataatctacaattatgcaattctgaatttcctaacggatctaatattggtttcctttatgtgttaagttcaaaacgtaaaaaaaaattcaatgttgaagtattttttttttaaaattttggtcaattatgtgaaatttctattaattaagtattttgtgggttgcctttgttttagttttatattatctaataattttaattatagaattataatatgtagtgttatatttaaattttattattagttttacttatttataatttataaatatatatatataattattaagtataagaattttaatattttgtgttgtgcattttgagtttgtcagttgctgtgttttcaggctagtctatttgtacttatgtgtcgtgctttttgtatttctcgtgtcctatcgtgcttaagcacatattttttgtgccatgctattctaatttatagcattgtgtcatgacgtgtctaagcctatattttctggtgtcttcttgactcgtgtcggctttgtaccgtatcaaaatttctaacccgtatttatagcattatggccaataccaatagtaggtatcacttaagaaatagaggaatgttaaggggtaccttaaggtgtcaaacaccacaagatatggtataccacttgttaacacagattttcgttaactaaacttgagcctctcagtaatgatttcctacagaaaaaataaaagatgtataaatagaaatatgaacacagggttttttacnnnnnnnnnnagttaaaattctgcatagtccatgagtcaatcttattcagatttctgattgtttttcaaggcctctcttgtatgagttttttcgtcccttttt

SEQ ID NO: 132578 - DNA, 1131 bp, Cannabis sativa
atcgtcatttttcatcatttttttcttgtttgagcaattttgttttatcatatttaaggtattagaattggtttggggtcatttgggttaaaattggagtttttagggcatttttagggatttttggctggttttctacaccaaccggaattccggttgtctgtgcccagaccatccggaatcccggatggcgctggaaccaaaaaccaggcccctttttgtcttttcacttgcgattttttcccctttaaaagcctaccaccgaattttaaaccccccattctgattttataccctaaaacagcaaccaccttctttttttttttctctcaaattctcactctcaaaccctaactttcatcctccaacaatcaaacaaaaagtgtgatcttcattccatggcttcttcatctaatcaatcctcaagagcaagcaagaggttggctaatgcaagccaactaagggagttaagggctaaagcaaggcaagagcctccattattctacaatgatgaagattaccaaaaatttgtcaatgacttctcttctaggaagattctcaaaggtaaaatttgtgatctccctagccttgattgtgtagattttagtcatcattttgaaactctaggttggacatcttttattcaaatcaatactccaatatatcctagacttgtacaagattttatgcttgcattaaaccttgcttagcacctttaggagttaaaggaacccttagaggaatagcctttgaacttaatgtagaatctctcaatgaaatgttaggagcacccaatagtggcattttacttgaacctaaactctctcttaaaaatgatagcatctttaactttgatgagtgttttagaaatctttgtggtgatggccctattattatgaaaccaaaaatatacatcaactcactttagaggccaaaattctccacaaattcattgtggctaaccttgcacctaggagtggacaccaaaatgagataaattccattaatcaattactcatgcgtctcatcctagccaaaactacacccatcaacctaggctatctcattttaaaattcatcattgatgtgaataaacccaatatgatcaaggcccttccctttggttttctt

SEQ ID NO: 132579 - DNA, 772 bp, Cannabis sativa
ggtgaaatctgttttgatgtcaattcatatttactggtgtcaaatcatgttcattcctaaacagactattaaagaacttgaagcaatttgtagaagctttttgtcgataggtaagagccttatgaatggggctggggcagttgcatgggagaagttatgctgtccaaaaaaatcagggcttatagggctggtgaatatccctaattggaatgctgctgctatggttaagcatgtatgggcaattgaaaaaaagaaggataacttgtgggtgaaatgggtacatagtgtgtacataaaacaaaaagcatggtgggaatacaaggctcctattagtggaagttggtattggagaagaatggtggatatcaaagaaagaattaaagattgtgtgcaacataacaccttctctgccactgaatataaaataacaaaggggctggtatggtttaatcagaattgggagaaggtttcttggtccaatgaagtttggtcaagattgaatattccaaagcatagcttcctattatggttagctatgcttaacagacttaaaaccagggataggcttctcaaacatggtcatattgatggtgctgaatgtattttctgcaatagtgttgaagaaacaacaaaacacctcttttttgactgctattttgctgcagaatgtcttaaataggtgaaggattggttgggttggcacacaacagattctgccctccctggtttgctgaaatgtacccgaaaagcaaggtgttcaagcttcaaaaag

SEQ ID NO: 132580 - DNA, 746 bp, Cannabis sativa
gaattgatgcatgagttagcttttaggatagaaaaatctgggttgacgtttatttgggtgattaacaatcgcccattggtggaagagaaatctggttcagacataattccacctgggttcgaaactcgagtttcggatcgcggtgtgacatggtggggttgggctctccaatgttggattttggctctccagtgggtgggtttgtttcattacggttggagttcagggatctaggcactcgaattcggacacgcattggttctgagatgaacaaatttgggcaagtgcgacattgtttcttcctcttccttgttgccatttggagtctcgccggaatgtgcaggtcgtacatagcagcttatgctcagatctttagtttcccatctttctctttgtatttgggttgtggagatctcagatctgagatttggtgttgcattcgattaatgttgaaaaaagtaagagtttgtaattattatttgggttttattttctaattagaggtgtagtgatggtggtaatgatggtgggtgggtggtggcaaaaattgtggtgttgataggaatggtggtattgtggtggtagtgggtatggtgttatggtggtttggtagtgtggtgtcgacagaaacaaggaaataagagagagagaaagaaagaggaagagagagagaggagagagaaagataaattaagttttattattattattaagagttaatagaaatgttttttagttttaattta

SEQ ID NO: 132581 - DNA, 626 bp, Cannabis sativa
gcttaaaatcgttttaaatacttctagttctatctattttcttttttttttttcaattttttattctattttaaattctcttcttaattctctcatttttattttaatttttttattaaagaacacgatgggaaacagagggaacagaaacatcaaagctctggtcgacaatggcaggctctacttgatgatgggaaggacgatcgttgaagcaaaataacagtcctaatcttctcaaagatctggatttggaaaattttctcttttcttttggtattttttctagggtttcctatttgacaaagtcaagggggaagaacgaagaacgaagaagaaaaagatagaggatgagagaggggttagggttttttgggttagggtggggttccaagaggaagaagaagaagaattagtttttaaaagtagtttttttttttaatttttttaattttaaaatattttaaattatttcttttaatatttttattattactattaggtggaccaataagaatttgtcacgtttacacttatgtacatagtagtagcagggctggccctaagttgaaatgggctataggcaaaaaaaaaatgaggaaattacatgatatacccactttacttta

SEQ ID NO: 132582 - DNA, 880 bp, Cannabis sativa
aaaaacaaaaaaaaaatacaaaaggcaaatgaataaatacgttcataatctttaagagtttgcaactcattgacctatataatcgtgagtatgttaaaaagttgaataaaataagtgtaaataatctcataatctcaaaaaattagtccaagagttaccgtaaaaggctatagtatagtgagaacaaatatcttaactagtgtctcgcaaaataggaccaactatccctaaatatcatcgaataatacgagccatagttggagtgtgtcatcttgataaaagcaaattactttttgataagaataaaaagcgattatcagcaattacttcattttatccacatgttgtaagtatgaaatttatggattgttcatattttataaacggatacttaaataagatcaaatgagaataactgttatttctagagcccctataaatagggacagaacctaaggggaaggggatgatcattttttttttttttttgagaacgagagaccatgtgagattaagtaaagtttcatagttattcctttgtattctaagtacattttcaagaaatagtcaaaaataataatgactcgtagagtatataaattttaactacaaaatcacgtaaaaagtgtttatatatttattaattataaatttattctaacactttatttattactaatgaaaatttgagtcatcaggaaccataatatttattgaattatgaatctagtttttttgttacactaattattgtaagtaattggttactaaatcccaaactcttggtctgattggtttttaggatttgaatcctattttatcattttgaaaacttaaaaagtttgggcccctcaagaaaacatgattggttactctattt

SEQ ID NO: 132583 - DNA, 623 bp, Cannabis sativa
ttcagttcattatatatatatataatttacttgaattatgtataatttataaaatctttaccagtgtactgtaaagaaatcacgctgggcttccataaacattaaaagaagaaaacttaagattatactttaaaaactttatcaatgtaatatagacaactttaaaaattttatcaatgtaatatagacaagcatttaagatgtcagtgcatgtatactttacgccgaacaaaattccagcggcacacacatatatgcacagtaatcgaccgattacaactaaactatagaaatatatattctgcataaaccatttgatgaaataaataccatttactatgtcgataccatatatatacgcaggatttatatatgtcaacaccattttttgtttttttgaaataaagcattagatagataataaaattagaccttacagatattatcaagtattgaagagggtttcacaaaacttgatatgttctaggcgaacgcccaattagccacattatgagcagcaaaattacaacaaggcgaaataaacgaaaaattacaagatacaaagtttttagagagttgattacataaagaaatataattatcaatattccaaatagagtgaa

SEQ ID NO: 132584 - DNA, 839 bp, Cannabis sativa
ggttgatttctacaagccgtgggttgtcaccatccttcaccctagtgaaaatgaatgactttcggtcgtaggtccacagactcccatcaatgaccctttgtatatcgatctcatggtagaattggaaaagaaacaaatttggattgagttcgttaacgtacattcccattcccggctgccataggaacaccatcatattttgaaaaacgttaaaatttgaaactcggcccgttaatagcttacccaccaaacaccatctggtgtctatcaccacctcttctatattactcatcgggattcttaaaacttcagcctcttcctcctccagactaataggttcttttctgacctccatgactctcccttcaccactacttgatgccatagcaggaccaaacacaaccaaaatcaaacaaactctcaaaacagagagacatcaataaatgtcattacatcagttcctttctttttcttatttttaatttattttattttagttgtcttttataataaaatttttattactctaattttcttaattttagtatgtcatttaactttttaattgtaattatttattttaggcggaattttatgtatttattgtcattgatgagcatttattgggtagcttttgaatatttattactgttattatattttctttatcttttattgatacttatatctttaaatgtgctttaattatattttattagttgttttaaaaatctattcaattcttatttagctgagcttttaattatggtggcgtttggtaatattttttaatcagttttctatttttaaaattggaaaagtaaaaatatttttcaaaa

SEQ ID NO: 132585 - DNA, 739 bp, Cannabis sativa
cccccgaaaagcagaagcgaatagctcttaatacccgaaattcagaagtgacaggtcttaatagtaattggcactctttttcagtagtgtttttggtgcaaattcagtatagtaacactactgaaaaccgcttgtgaatactctttaactgataagcataatcaatttacctaagcctatttaagtaggctgttcggtcacaatagctcttcatacccgaaatttggatttgacgggccttcttatagtctttaacactgcttttaagtagtattttggtacaaaattcaaaggtttaattcaaataatcttcaaactggtaagcataacctattcacctacgctggtgggctgctcggtcacgatagctcttaatgcccgaaatttggatatgccaggtcttaaagtccttaacacactttttaagtagtgtttttggtaaaaattctagggaatatttgaaaaatcttaactgataagcacaatctattcacctacacctatttaagtgggctcttcggtcgcttagtcaagcaataccgatgagaattaaccaaggaaaaatacaactgctttcgacctccaagcatttctggaaaggattgtgatgataggtaatcacaatcggtatattttatattttgtttcgagtaaaatttgtagaaaggaatataacaaagcaactccactaatgaattgaagctatagtgtgatacttaagactgaaaataatggttat

SEQ ID NO: 132586 - DNA, 682 bp, Cannabis sativa
accattgctctgctaaaagaacatcaagacctcccaagaatacaagaggtgcttgcttcctgaacctatcatacaaaggctccatacggttgccagcaacaagttattctgttggcatcgcaggaaccacaatagtaggtggttgcgggcgaggctcaataggagcatcccactatctaagtcttcaaatctcttctgcttgctgagtgatttgggcttgcatctcagcaaacctatgctcctattcaaaaggagcctgggtgggtttacttggccaactctatgaatacaactgcggcctctgccgcgtccacgggggttttggggatttttgccaccccaaccacctccggtctcaaccattttaccctgacctcttacgtttcattgggcatccattatctaggacttagcgtgcgaacccataaggcatgtaggatagatagtggtcaaaatatttctaagaccgcattagggtttaaacaacattttacacatatatgcaatacaacttaaacaatttacaaaaagtaaaagcttgcggaaccgtgagttgagctcaacactggccttgattgtacataacttaacggtctttagtgaacaacttggtggctttgataccaaactgtaatgcccgtatttcaaaacttgctaattcaaaaataatcttattatatta

SEQ ID NO: 132587 - DNA, 548 bp, Cannabis sativa
atgccttcttgaatggagagcttcaagaagatgtttatatggcccaaccacaaggttttgtagaccctcaattccccaatcatgtgtgcaaactcaaaaaggcaatctatggcttaaaacaggctccaagggcctggtttgataccctgaaaaacaccttagtcagttggggatacactaatagcaagtcggataccagtctattttttacaactaaaaatggtaatcttcttctcatcttggtgtatgtggacgatattctcattacaggtgcaaatccatctcaagttcagcatgttattcatgatctccacaacacatttgcactaaaaatccttggccctgtcaactactttctcgggtttgaagttcacaggacaggtaacaccattttattaactcaacaaaagtacataagagatctccttgctaagactcaattgttggactccaaacctcaatctacaccaatgtgctcctccaccaaaattactgccaacagtggtactcctatgcaaaatccaactcaatatcgcagcatcatcggt

SEQ ID NO: 132588 - DNA, 788 bp, Cannabis sativa
  modified_base (38)..(50): a, c, t, g, unknown or other
cctaaaccctaagccctaaaccctcaaccctaaacccnnnnnnnnnnnnnccaaaaccctaaaccctaacctggacactggcccagacccttacccataccaagatcggaacccaggacccaaaccccgactcggatcaagacccaaacctagatccagactcaagacctgaaccaaaacccaaaccaagaacagaacctggtccgggacccagacattgacttcgattctgattgggacctcgactcgcacccgaatagggacctggactcagactgggaccccgacccagactctaacctgaacccgtattgggacctagactcggacccaaacacgggatccaaacctaaactcggacctagactgggacctaggatccagacctagatgggggacctgggccctaaacccgaacctagacccagaactagaccaaagatccggacctagatgggggatatggacctgaaactaggccttggaatcgagaccgagacccaaaactcgaccccagacccgagacatgggacccgaccctggatccaaaactccggacctaactaccagggcacaaccctgaactagacccaaacccaaacttaggtcccagcccaagacccgagatttgatatagaacaagaccgagatccaagaccaagacccgaacccggacccagacccgaaccgggatccagacccgatcctggcctagagtcagaatcgaaccaggattgggatgagaacccagacctgggactgtaataggacccaaacctaaacccaaa

SEQ ID NO: 132589 - DNA, 712 bp, Cannabis sativa
tttttataatcattttggtcctattatatgatcaaaataactacttttgtgtatttctattatatagctggaatatactttgcaactagtttgtaatatacatagcagaaaatcttttgatattgtcctcaatttttttttcctttttttttcttcttcaaatatatacatttgttatttttaatgtctattcttgtggaatgttcatttttataaagtttataaaaattttaaaaaaatataaatattagatttcaataaaaaagttgaatatatatatatatatatatatataaaattgggtaactagagggctatcttttttaactttttaaaaaatttctcataaaatattgtttccaaaaaaaattatatttttaccttgtataaaattcttaaaaggtgtatcaaggcattaaaattaaactaaggtatctataaaaaagtattataaagtttcaagtcttgtgttgtgacatgtgtggtatgttcttttgtctctaaagttgattttcttattctgatggcgtcaagtagttggagagggtttgatcttaatgagcagtatgggcagatcagcttggaggatgaagaggaaggggttttaattggtggagatgaagacggagaggaggcggtgtttgatgatagatggtgtttggtgggcaaatttcttactggccggacacttgattttgatgcaatgaggcat

SEQ ID NO: 132590 - DNA, 787 bp, Cannabis sativa
ttatttgtattattaactttacttgagattaattaagctatattactatttttttcccacgaaaataaagaataactgacaagtcattttttttaacttatgaatttaatttatgttggttaggcgactttaaatatagggttatatccctatggcctaaccaaataaatagagtcacatgttttgttagtttagttagttgtatgcacttataaatacactatttttatgttttgttagtttagttagttgtatgcactaattaatatactatttttattaagtttaattaagatttttgttcttaaattttaatatgtaataaattacgtttttcttgaatttttaaggttgttaatttttattttttttttttcattttttgagattgttagtgttgaccgagattttcggcaaccaatataataatatataagaaagctgtaagaagttcaatgaacgagatttttacatattttgggcattaatgagccttagtccacgagtctttggtatttatgagagtatttattacagagaatgttcttggtgacttttctctttggttcttatgcaacccagaattctcgacccccgccttaatgagtttgggggtatgtatagtgtttttgtgggatgatccctagaaccgaagtacatgtctttctgtattattcagtagagccacagattcccaacgagtgtatcataggaaatgcatggtctaagccctaggttttttaggggttaggtggatgtaatacattatcctctcttgactgatgtg

SEQ ID NO: 132591 - DNA, 523 bp, Cannabis sativa
taaattattccgaatttctcaaaattttgtaggatatcttaaatagttataacgtacatgaatataaaaaaaaattagactaaaatttatttctaagcattgtaaaatgaccctttattttattaattgttagtatacttatttatttatttttatactgaaaattcttgaacggcattcacgtagcacattcgggttcgatcggttggctgacacatccgccacaaggatctagatgtgttgaccaactcgtgtgagccacgtagagcgaactgctcaggatttttagaataaaatttttactatttttgatatatatattgaaataagtaagttatattataatttctaatgtaattaaaaagcaaaagtgattccctaacgtataccctaaaaaattataattagaaaaacaattattaaaaaaacacaatataaccttataaaaaaaaaaagaaacttctcaaaaagaaataaataaataaataaaagaaaaaacacattataatttaggctaattagt

SEQ ID NO: 132592 - DNA, 559 bp, Cannabis sativa
acccttttataattggaagaaggggcgcgcgtttggctggagcttcaaaaaaatcttttatcacggttatttcgtcattagccaaacatgcctcgtacatttttttttaaatcacacctttaccaccgtgtcgtgagcaattaatcttgtcagccaaacatgccccttacaaatatttagactttaaaattagtgtaaaaaattgtacaacaatcctttcttcccccaccttctcattggcttccaccgctcgttgccgccacagccatcgtatcggctcaatcgtcgttgtctgtaccgattaccagaccattcctctgttcatcatcgaccactccggcgtctttatcgcagaggcttttccgaggaccagttctgggccactgcttctctccgtgttcgcttcttttatgatatcaaggtaaactcttttcgtatctgatagatgatagtcctcttcgaggcatgaaaaatctcctaaaatacactcttcgattcagtgccaaactccaattgaactaaaagttctattttctcaatccatatctcacaatagcct

SEQ ID NO: 132593 - DNA, 565 bp, Cannabis sativa
cgataagccattcccctcgaagaagcatgccagtatccttgtgtttatcagttcgttgcttatttcaaaatccggctctaagtccagagccattgtctggagaaaggtcgttcggagtttttctagctcctcgtccccaccttctcctttattcttctccagtaaagggtcttgtccctcaccgccgttgttgtcttcctgtctctcattattaggaatatcagtaggagggatagaaatatccttttccagatattgaggcttgattgtatcaccacctgtcccttccattaagtctccaactaccccacctgtctcattctctgcattcatttcttccatattctgactagtatctcccatactcctaccaacttttgcaaacgttgaagtaaaagaatcgacagaccactaagtctaaaacagacgattcaaacgtctagttggaactccaacactccatcacagaagagatataggttacatagtatagattgtttgggtatgaagttataacatagagaagtaccacatgttagcattgtcgaacaacgaaacaggttat

SEQ ID NO: 132594 - DNA, 669 bp, Cannabis sativa
catactgtgatgaccaatcgaccatacacattgtaaataatctaatatttcacgaacagacaaaacatatagagttggattgtcactttattcgtgacaagaataatgattccaagatcaaacttatccctgttaatagcacacatcaactagctgaagtattcacaaaacctttatcctccaccattttaacttctcacataggcaaaatggctttatatgatatatacagtccatcttgagggggggtattaagtattgacattttactgtgtccatatttcattacttttcctatgtaaacatgagttagttattttaccaacggtattgacggttagttatgacagccttctgttactcgaccattgtgtgtcttagcttccttgaagctaaatatactgtattgcttcctaacttttcacttaatgaataaacactatttctcttattttcctttcgcaatatgttgccccaatgacaaacgatcaatagctagttattgtgtcttcttgggtgattctctatctcttggtcatcaaataaacaaatagtggtggcacggtctagaaccgaatctgaatttaggtgttggattttgtgtcctaaataaaacccatttgaatataatcagatttactaattaataaagatcagaaatcattttat

SEQ ID NO: 132595 - DNA, 1460 bp, Cannabis sativa
ataaaagtgggtatatttaaaaaaatataaaaataaaggtaaaaattaaaacatataaaataaagtgggtatacaacgtaatttcctctttaaccttggattcaattaaagcccatttcacccatcaagaaattaccatttctttcgcacgtcgatttctacgtttaaaaattatttattttatttagaaaaaattacactcactatcgaattttaaaagttgtttatctaaatataacacttttaaatttgactaatttatatggtatttttcttattttaagtatttttatggtatttgatatatcatatatacgtaaatttggttttcaaagctcatatttaatgtttttatttgtttttaggcagttttatttgatgaagaaactagttttttgaaaaaaatcaatttcttaatgaaggatttttggtatgggtgtacgtcggtcggtttggtcggtttacgttacattttatttaactcaatgtaaagatcgggttataaaaatctaagtgcaactcacccaattaagaaaaaaaaaagtttcaacccgcccaatgaattagtcggtttagtcaaggtaacccgtccaaatcgagcactaattttttttttttacattcaatggttatattttagttatgtgataatgagataaatataaagattgaatttaaaattcaaatcatccaccataaaaaaaaaaatatagtagtttgaactttctattttttataaatatgtatgtatattatataatatatattatatataataaaaacatatatatatgtatataaaactctcttaatcgggttggtcgggttagtacgggttgattgcacgggttgatattattttcaacccgcccaatataaagattagacaggttgtattttcgtcgagtttttcagtttgtatttttcgtcgagttatcttggtttgatctgagcgggttgggcaatttacaaaaatttatgtacaaccctaatttttggtgattgattttgatcgtatgagaaacttaataatttgaatcgcaggagaaaggaaaaaatcttgtgtggctggagagagtagtttaatttttaagttttttcgagcacctctgtttttttgtaatggagttgcttcaaaactggatttataggtttttttttatatatattttacttttatataatcaaaaccagtttcttggtatttttcaggtaattttttggcaacaatgccaattccgatgacttttctggcaccgacagcaattctggcgacttttctaacaacgatagcttctctggtgactcttctgacaccgacagcaaactccaccagcttttccgacagcagtgacaactccaacgatcattgtagctttatttgttttattttttttttttaaaaaaaatatgaaggaaattttaatattttttatggttatataaatgacatatcctat

SEQ ID NO: 132596 - DNA, 566 bp, Cannabis sativa
ctgcttaactaagaaggttttgatgagttcttttatttacattcatgaaaatgatttgattagataacagaagattcaatccaatcaaaaaggattggatatccaatcttattggcttggattgcatacaaattctgcaaacccgaattggaatatgagtaacttgaatctaataataaccaatcaaattcaatatatgtgaacactataacatgtggttttcttttgaaatagtaaaggacacatcttgtacaataaagtgtgtacaaatgatcaaggtgtacgttaatcaaaacaaaatcttaaacaacaaaaatttgatttggaaattacaaaaataaacactatcagatattttttctccccaaatgacaatcaatttacataaaataaacaaagttaacaatttaaacgacattaattttacaaatgcattcaatgtttaaactgaattttagggtcttccacagatgagaaaaacccttcaaaaataagcgtatgccattgaaagtgacaagcacacggtattctttagtaaaaggcgaaagaatagttcgctttgtgct

SEQ ID NO: 132597 - DNA, 752 bp, Cannabis sativa
tcttattttttagggtgtaactcaattcatggtctccaatcttaattcttcaaatttacaagagaaactggctatcgcataagcagtccttaaggaggagaagaagctctctgctctttcggaggcaaagtataagcgtgaaaatgatgaacttgagggcattctcggtaagaggctggcggaactcaatgagttccgtcattgagcgctttcctctcctccagactgactcacatcctgagtctcaccataactcgcaagcagttggtggaacatacctgagttccgtcagcctcttaccgagaatgcaatcaagttcatctttgtcacgcttatactttgccttcgaaagagcagagagcttcttctgctccttaaggactgcttatgcggtagccaatttttcttgtaaatttgaagaattaagattggagaccatgaattgagttagaccctaaaaaataagagaatgaaagggtgttagcacaataaaaggatgtgagatcatataaatatgagcgtgcacatgagaagataggccattatcaatacattttgatgaatagtccatctcttacccgaaggatatcttggactcctctagtgacagcatcaccttcgtagttggacatatcacacaccacctcaacagtgacagtttgtcgaacaaggaggtcaatattgtcgtgcacaaactctagcatctgaattgtagcgtcgtcgggacaaagtctgggaaccacgatggaagg

SEQ ID NO: 132598 - DNA, 1029 bp, Cannabis sativa
  modified_base (108)..(108): a, c, t, g, unknown or other
actgtcatccgcaaagagcaagtgggatatggcgggggctctcctggccacttttatacctggaagggacttatctctttctttctggcgcagaagagaggagaaacnttctgcacagaggagaaagagataaggagagagagaggatcgccctggcgaatccctctagacggagagacattgcctaaaaccctaccgttaagattgaatttgaatgtagccgtggagatgcaggagaacaccagatgggaaaaccgggtagggaattggaatttccgaaggatagcatcaatgaaggtccattccactctatcaaaagctttggccatatcaaccttgaccgccatccaaccttttttgcccctagtcttgagcttgatggaatgcgctacttcctgggcaataattatgttgtccgaaatgagtccatcagggaggaaagtgctttggttgggagaaatcaaagtgttgagaacgagctttagccgatttgcaatagtcttagagataactttgtagatggtattgcaaaggttgataggccgatactcggaaagggaggttggttgtttgactttggggataagagtgatgagggttgtattgagaggagcaatgtccccgttttcattgagaaagttggccgcagctttgagaacatcattcttgacagaggaccagttagctttgtagaaattagagttaaaaccattaggaccgggggctttatccgagggaagttgaaaaaaggctttttcaatttcctcgagagagaaatcctcagccaggaaagatttatccaactcggagagagagcacgtaactccttccaaggccttattcacatcttccgccgagggattcgttgatgtgaaaagttggtgaaaatgggattccatttcacgggttatgctctcctcatcagagacgataccgccgttggccaagtggagcttttggattttgtttattttctttctgtgggaggcgtagcggtggaagaatttagtgttcttgtctccctgagct

SEQ ID NO: 132599 - DNA, 844 bp, Cannabis sativa
tgaacttattatatttttaaaatattttgtgaatttaaatttttttaaataaaagtatagacgattgtttttacattattttaactgcaacattatgttgctttcaagttatttttatgttactttatatttatattacggtgtttacatattatttttatgggatttggtgaaaatatataattaaaaaatttctgtaaaaatataataaaaatatatagtaaaaatataaaataaaatttgtaaaaatgtaaaaaataaaaaagtaaaaaaagaacacaattttaggcactttaaaattcttacatttgtgcacacacccaaataacagatgagctgtgatgtaaaatggctttaaatttgaaaactaaagttagtaaatgtctcttttttaaaaaaaaaaaatcaagaaaatggtcaaatataattaattaactaataaaaattataaaaatacatttattacatattatttttaaaaatatatatatatataataattaaattaagttataaatttttttagtattacatatgttgcccctaatttcgcccaaaatacatggactaatgtggctacgacacgtggatctaagaaatatggctcttagatcaatcaactaagtctttttagatcaggaatatcaacgagaaagtacctcccggaggagatacggaagctccacgcactcctggagaccaggggaaacgctaagggacctcttggaggaacaagacattatttgaatagtcacctcgcatttaatgccgcatgggagaaaacgtattggaactgccataagcaataagtctgacggcgtaacccctctgatgcagctaatac

SEQ ID NO: 132600 - DNA, 1123 bp, Cannabis sativa
taaatttgattaattgattaatataagtggtattttttaacttaccccaatatgtagtgtggtattcttaggtgatctttaccaaaatatccaaaaaaaaaaaaaaaaattcaattttacatttttaatgtcacacccttttatttttacatttataccgtactaagttttcaaaaatattatgttaaaatttcaaaattataaaaataatgtatttcagtaaaataaaataataacttaaaaacatatctgaaataatgtaacaaacaacacgaaaataattataaaacagcaaaaaaataactgcaaagcaacgaaaaataacaaaataatgacctaattgcaatatgcaaaacaatatcaatgtacttagttttgacaacttgatttatctttttgtaccattacattactttttttaatagtatgttgttataatttcatattatcaactttttttctcttttccattttaagttagtgacagttaaaatgataatttattttttataagttaaataagtaattacattaataatagaaataataaaatctcatgattttaaaatgggacatgtaatataataggtaatatataattaatattgttgacccaaaaaattgatcaactgacagcgaggtcgtatgactctgatgtttgcctcatttacacaattagaatgagaaagtaaaccacacataattattatagaggttcggctccattagatatcggataatgacctactctcattttagttgtattgatccgagggttaatgctatccagatcactataggtaggatctgatataacacccttaaagatacaaagtagaaatcgaggttggcaaatctcaagtgatgagaaagcttgtatgggcgtgtgagagagattgggaaagagatttattagacttaggcttaaaacttggacgctagtatcagacttaatgacttaggttttctaagttagagttaaggcttttatataggaaagcctaaaccatagtttacaactgaaatcataggatatttgtatattaaattagttaattacaaaagaccaaaatgttgggtttgtgccctaaataaaactctatttcaatgtaatcttttctat

SEQ ID NO: 132601 - DNA, 860 bp, Cannabis sativa
cctccgtcttgattgttagtccatgtgtactctgaccccactcttttcaacatgtctgcttttcctgtcatcaaccaagcattacaatcctaaagctctatactagcaaccggcttccccccaaccctatctttaaaatgaaaaagagcattgaagtcccctaggataatccaaggtttacctgggaacattaaattacctaggtcttttcaaagctccttggtatccctgacccatgttgttactacgatgacctgggagaagttctaggaattgttcaatgcgaagtactataatgaagcagttagaagtgcgaaaagaaaggagtttactcagctgactcagaaagaaaatatgagtgttactaaatacacaactcagtttgattgattggcaagattggcttcgagaatagtgccagctgattttagtaaaaaagaaaaatacctggacggattgaattcaaagataaggcatggcttaatgatcactactgatgacaacaccatttatgctgatatggtgggaaaggcactgtgagctgagggcgcagtggagtgcacccaggaatcttgagggactcaggtcattagtggggctcctactcctcctaccttaggctttagtaggggaggtaatggctcgaccactgaccagaaaagaaaggcacctactgcatccggtgactcaaatcagaacaagagattttgcaggaaccaggggtgaggcaatcgttaaggtagctctgaaacataatacacttacctagaatgccctagttgtaaaaagcatcatgtgggagagggtaaagggcaactaccttgagagaatatctcaaccaatagaaatatctataacta

SEQ ID NO: 132602 - DNA, 640 bp, Cannabis sativa
ctatttgtactattttagaaaatgcagggtctattttgtcatttaacaaaacacaagatccaattggtaacttttgtaaaacagaaggtccaaaatggtatttaccctacatattaaaatgacaaattttaacttagtaaattttcagattttctttaaaagtttatttttatggcccctcttaaactttgtttttgtatattggcccccgctcacaagttttttctgcttaaatacatgattaaaatttaaaaatatacgtattgtgtaagattaatataacctgaatataacatgtttaaatattgtgttaaattgtatcgtgtcatgagttaagttatttataatcatgttatgttcgtattaagtataatcgtgttgactcgaaataccatacaaatacggaatattaattgccagctctatctacttttgttttactcaaaatacataaaaataaatgatgcaataaaataatgaaagtgtattttgttttttataattacatatatgatttggaaacatggattggaaaattgttagggttataaaacacttaaagaaatatataaatcacagatctaaacatattcctaaagtgctttaatatagaaaaccctaaatcatataaatctataaa

SEQ ID NO: 132603 - DNA, 807 bp, Cannabis sativa
ccgaaatgatccaaatgaaaaaaataaagagatccatgtgggttttatacatttaaaacacgtaaaacgtcaactttaatttcaataaaaaattcgggtccgaatgtggattttaagaaaaaattgagattttcacggtttttcagaggtatacatgctcaaagcctttatatagcacgatataaatgtgattaaacattcatgaacaaaaatacaacaaactatgaaaccaaaaaattctcattccacgatcctgaaaacgaaaaaaaaaaactcgtacatatatatatacacgcctataatagattttatggtatgaaacgatgagaaatttataaattaaattattctaatcaatattaaaaataaaattatttaatcataaagaattatatataggcgaaactatatatatacttacatataaatatattatatatattaacgtaaacatgaatatatataatcagagttatattatataaaagtatatatattatgaatatgaatatatatataatttatatcataaatgaaaaaccctgtacgtatgtatatgattatatacattatgaatctgaatatatatacaagtatatatgtaaaattatgtacatattatgaatataaatatatatatatgatcggatgaatataaatcatatatataaaatatatataaactaagaaccaattgtatacttatatatatatatatatgaatgaatttcaaatcaaagcagagataaaaccgctctgatattaactgttagactataatatagtatataaaatatagcatatata

SEQ ID NO: 132604 - DNA, 501 bp, Cannabis sativa
ggtttgaaaaaatggtcaaaaaccttaccacccgcaccacgaacacccctaatctctgccatctaaaaatagattcaaaaaaaaatacttacatgtcaatattatacatgaattacaaaattataatataatttaaaaaataaagcaatattactccaaaaaaaattgtgtaattatgcaagtacttcattccttctctcgacaacattaaagattgtaaacaacctgcaagagagaactaagaggttagagacatgaaaaataaatggaagaaaaatgaacataaaaatatagtacatacaaatctatttataaatattttaaattttggattagttataaatattttgcgggctaattagaatttttgccccctagactttatacatgtaccaaataatgctccctgaacttttatgaccgttaaaaattccccctgaactattgagattgttaaatttaaaaacttttgtctaatttcattcaattttactgtttgag

SEQ ID NO: 132605 - DNA, 1200 bp, Cannabis sativa
atagcgagataggcgcctctcttactaggtcttaagtccacccgatagttgtacttagtttgtatattatgcgctaagtgttttcaaagtcaatatgcattgcttacgtcttcccaggcgtaacaaagttgatgtctcgcattgtgcatccaacgccatatggtttctcgttaatacgtgcggcaacagtttgtatatctttatctcgcataggaccttatagtcaggaagttgcaaatatactatgtcacttctgcaattaatgagttattccattaaatgtaattacggttacatgcatcgatccatattctccttaacttgacacatgtcttccattgagatggtagccgaattttgggcataacatgcacctttctgattctctctagcaaactagactggagtgttaagttatgcaattttccaactacaaattcaattcctgcatttaccatctctgaacccagctgaggagatctcaaaacagtagtgaaaacctacccgggacctcttctacttagtgcatcagccaccacattggctttcccagggtgatacagaatctcacagggtagtctttaaccaattccagccaccttctctgcctcatatttatatctttgtaggtgaaaaagtacttgagacttttatgatcagtataaatctcacatttctcaccataaagacagtgttgccatatttttagagcaaataccacaacaacaagctctaaatcatgtgtttggtagcgctattcataatctttcagttgactagaggcataagctataactttgtcagcttgcatcagaaaacatcccagaccctttccggatgcatcacagtaaacaacgaacttttcttgatctgatggtaaagccaacaccggaggtgttatcaaacgttgcttcaactcctaaaaacttgcttcacatttgtttgatcacacgaattgttgatttttcttagttaattcgattagtggcatagtgatcttacagaatcctttgacataatgtctatattaccctgctaaactgagaaaacttcgaacttctgtcaccgatcttggcctcggccaattctttaccgattcaatcttacttgggtcaactataattccatcttttccgacaatatgccccagaaaagacacttgcgacagccaaaactcacactttttgaactttgcataga

SEQ ID NO: 132606 - DNA, 640 bp, Cannabis sativa
aaatgcttaactcttacactcttacctaagaatcttcttcatctacataagattattcatacaaatcccaaacccatttcctctcttttctccgtacccctatctctctacctttaaatctctctcttcaaaactcgtctgaactcgttatcttctaaaatgataagtgtgagtggtatttataggctcaggataaagatcctaagtcggtgattgcaagtattaaactgttaagttagttacgacttacaaatttaacaaactccttgtaaatgtatctccatgtcagcataagtcaatagtgcttccaggacaacagtccgaaatgcacactgaagggactgcctggataggaacggtgccagctagagtcgactatttgggacaccctttcaagggggaacaactaaccatcaagaactccttttcggattgaaaaataatttttaaatcgaataacataaaaggaacttaatgagaaaattaacacatataatagggtaattaaatactaacgtatataacccaacatgggtctataattactcgaaattaaaagagcaaattttaccttaatgtcgccataattttccttaactcattgtaattagtggactttttcctatcatcacgaaaaaca

SEQ ID NO: 132607 - DNA, 1139 bp, Cannabis sativa
ttaaaaaaaaatatttaaaaaatactgtataagaagtggagtgaatttttacttgtataaaaaaaatataaaacaacttaaaaatatagtgatgaatctgaaaaaaaaaaaaaaaaaaactagtagtgtataataaaagaattaataaaataaaaaaaataatacaaaaagattaataataatagttttaagtcattgatttgttttaattgtattaacttttacatacattaaacttattaatttttttaaaaaaataaaaacttatgtataatttaagtatatgtattgtactttttaatttttttaatgtgattatttttttcttctaaatatatatatattttttacttataattaagtaaaaataaacaattaatagagtaattaaattataataaataactagtcattacaaaataatttagttagaatgacataattgtaataacattagaatattataactaaatattaagcaaaaacaaatcttatttaaaatttgacatttgtcattatatcaaagagagtgtaaaagagagtgcgatagatagagagtctccttagcacttctctttaattaaatcaatggctataaatcattatacctatcaataggtaaaaattacaatacctattatattatctcccatatatatatatctataattttttgtcttttgagtttggttggatctagaaactgctctaatccaccctagtctagagccagacacacatatatatatatatatacataatatatatagtaatatattagaaaatttaaagcaaattgaaagagaatatttattaacaaatctgagagggttgttcaagagtgaattggaccattgacatcttttaaaatcttttcaaaagattttttttaaggcatggaccatttacacctctaaatatagttaacctaattaatacttataaagtaacttgtggtatttaatctgttgaaagaaaaacatataatatataagtatataaacacgaaaaaataagttatttgtggtgcaaattttcctattagtatgatatagtgtaaaaagagatattttttgatattttttttaattaagtagttaaattaatcataaaaattcaaatttgtgatttcattattc

SEQ ID NO: 132608 - DNA, 699 bp, Cannabis sativa
ttgtataacaagaacatagttttgatctaaagtttggtcaaaaagtaacgcatctatttttcacttataaaatggtattgaaattaggagtaattttacattacactcttaaaaaagaaatactgatgcacatgtattcttatctattttagtatttaagaaaaaaatttaatctaatttttttcatagttgtgtatgttataattatttaagaactttataaaattttaagaaatttaaaataatttacaatataaaaagaaatgttcaaatattttatttaacataaaataaaagtattatacgtgtaacaaactatttgaactgtatttatggcgtgttaaatttttttaaaaatcttaaaattttgtaagatgttttaaataattacaatatatacaattatgaaaaaattaaactaaaaacttatctcaaatgtcgaaataaatagatagtacattgatactcgttttaaaaaatgtattgtagaattttcaagcaattagtattatggatatattagatttttttttttgttaaattagagaataatatatagagttgatgtgattattatattatgtgttaaattttattcacgtgtattgtaatatctttatatattaaaagtatttatctaacggcatttattggtttaacagaatatacttaaaaataaaaataaaagaatattctgtt

SEQ ID NO: 132609 - DNA, 667 bp, Cannabis sativa
agcaatggtcaagctgagatttccaattgggaaattaagttgatcctaaagaagacaactcaacaatctagaaaggactgatcaaggaaaatagatgatgcattgtgggcttatcgaactgcattcaaaacacctactgggatgtcaccatataggttagtttatgaaaaagcctgtcatctttcaatggaattaaagcataaggccttttgggtgatgaaaactttgaacatggatctcacagtagcacgagagaagagactgctacaattagatgagctagaagaattcagaaacgaggcatacgagaatacaatgatttacaaagagaggacgaagaaatgacatgacaggaatttagtcagaaaagagttccaacctggctagaaagtcttaactttttaactcaaggttgaaactctttcctggtaaattgaagtcaagatggtccggaccgtttgctgtggtcaaggtgtatccatatggagttgttgaactgaaaggcgagaaataaaaaacttccaaagttaatgggaaaagaataaagctttacttgggaggtcaaattgaccaacccaagtccgccatcatattggcacctcttatagaagaagtttagcgtctgactatatgatcataaagacagcgcttttgggaggcaacccaa

SEQ ID NO: 132610 - DNA, 521 bp, Cannabis sativa
ggtggcttccaactgtcaaattcaggaaaagggtggtggcgagaaggacaagcagtcgtacgaggttggtacgagtagtgggaatgtgggaaatgattcgagtacggatggtcatggcatatcctcccacgtggcaattgggggggaccacggaatattggcggctcggaattttgtaaatttgccaaatcctgattttgcaaataatcgtaatagggagcatcttattcttgatttgggccctaccctcgcccaaagcattgatgtaccccatgattggttgtgtctatctcaaaaaccgcattcttttcctgaacataccccaattctctggcccaatgatgataaggaggtccaaaaactcttccttcagctataaggcccaataatcccttttatctaacccacccaatttatctgagatgattattcatctcctgggcaatagtaggaagaggaaggcccacacttggtatcaaccattctctgctgtttcaaacttctccccgccttcaagccct

SEQ ID NO: 132611 - DNA, 616 bp, Cannabis sativa
atccttatatatatttttccttcaagagaagttacttgtcttaaatctctctatgtaaaaaggtaacttccctatttaatttcttaaaggttgcccattttagatttagatgagttcaattttttttttttaggaaaaaaaatcataattatagatttttttataagataattgtagaatcttttttggtaagataattataattttttagtagtaaaatcttttaaaatcgataaagaaatcgtaaattatgaaaatctactaataaaatataaattaaaaaaaataatttaaatttttattcttcaatttgatatgtactaaatcatgtcaactttttaaacctttaaaaattcttctcaattattaagattgttatatttaaagacttttatttaattttactaataaatcttatgtgaataaaaattgaggggacatgtatatgttaaagttcatgggtatgattttgtagatatcaaagtttgaatcggtacattagcaaaattaaatgaaattagacaaaaatctttaaattcaataatctcaatagtaaaaaaaaaaataaaaattagcgacttaaacagttcgagaacattatttaatacatgtcaaa

SEQ ID NO: 132612 - DNA, 678 bp, Cannabis sativa
tgggagacttgaacaatgtggtgtgtcacgatgataaaaagggaggcaatcgatatccgaaattcttgattcaggggtttcagaaagctcttgcaaatagcggtctacatgatatggatctttgtggctatccatatacatgggagaggggtaggggttcggatagttgggttgaagttcgccttgataggggttagttaatcaatcttggcttgttttgttcaaggctgctaagttgtataatcttgagacctcaacatcgaaccattgtccgattttcatggatttgacaactgagtttgctactccttcggttcgtaggttcaggttcgaaaatgcttggcttcgcgaacttatgtgcattcaaattgtgaaagaaagctgggagggatgtattgatagcaatgttcaagggaagctggaagcttgcagtagacagttgcaatgttggggaaaggagtttactggaatttcaaggaaagaataggaaagtggaagaaagaaatgagcagatggaaactcggccgtgatgggacgtctgctacgaatttcaaacaggaaaaacgtaatttggtggagacgtatgctcagcgagaggtattttggcgtcaaagatctaagcaactttggctccaagatggcgataacaacagcaagttttttcatgcttcggcttca

SEQ ID NO: 132613 - DNA, 1325 bp, Cannabis sativa
  modified_base (901)..(903): a, c, t, g, unknown or other
  modified_base (1122)..(1125): a, c, t, g, unknown or other
ggtggacgggacaccagtattgggtgtggattggtcaactgcagaactggtattcccagtctcttgcacacctggtgtgatcctagctgtaaagaccgcttagcttaaattttgaaatcagcagataattaaggtttaatcatgaaaattatttgttaactctaaataattaatttatagagatttacttgaattcagaatgcattttatatgtcatatatagaaatttcataattttgcatgttcagtgcccggcaacattggaacgcagtgtatggctcagtagaatcacatcctggtatttttcataattttgcatgttcataattttgcatgttcagtgcccggcaacattttaagttgtttttagttgatttgagggcttgtggtgagagttgttcaaagtttgagcttatgagctcaagctttgctctcacatggcgaaacttttttctaagcttgtagtagggttttgttgccttgataatgtttattggggcctatatatcaggtctggaaagtttgaattgaattagtgttgttttgattgagttataaaaattttcgtcagtcttacactgaaccgaaattccgggtcaaaggggcctgtaggaatcggaattccggtcggctcccaggaattttcctagaaccggaattccggttggggaacccgtctaccgattggggcaattctgggaacccttgtttttcccatttttgtgttatttagggtattgccatgatattcatcgatagggaaacttttagtttcaagtttaagtccccggaagtgatttagcgtgtcactcacctatgttacgatttatgtgatttaggagcctgtaattcgccgagcagctattccactcaggttggtcgacacacctgaattcagaannnaggtaagattagtataatgtcatggatatgcttatacatgtttagcgtacatgttagttaccatcaaaataacatattagatagatgttaggcaaattttatatagccatcagattagcatatcagggcaacaatgaggtgtacatagagttgcaccgggatgccatcagatgtatgctaggctatcagatagtatagattaactgctaccacatcagnnnnattagagtactgagtataggctagattcgcggttaatcatactttgtgaagaatgttctcgattcagttagggttatggttaggtgtatgggcacctgattataacctgggatttagtttgtttatcatgttatgcttttcttactgagtctgtcgactcacagttctacgtttatgtgtaggtaaaggcaaggctaaag

SEQ ID NO: 132614 - DNA, 629 bp, Cannabis sativa
atgaaactcatgggacccaaactgttcctcctaaccatgagaataataatgtgggtggagaagaaaggagagaccgaccttctctgatttgatcaccaccatcacctataagctaccccgatcagtcaaatggtaccactccagaagaaccaaggcggttcacctcccgtggtaatgcaccacatgctcaaccacctaagggcataggcgacgcactgcacctcgcgaagatcggactcatcagaggccaacatatcataggaaaaaataaaggacacccccaaggcgccaacctgcccaagaaaatagttatgtgtccaaatcagacactacttttatgccgtactccaagccatactctgcgcggtccccacactctcctcatcatcaacaacaataaagaatagtgagctttatcgaggatagtggtcggtctgacgctaaaagcaactccattattgttcataataatgcaccctacaattatgaacatcgccacaacaaccatcccccaagagacgcaagaaggcctgatttgcgcgcctcaatcaaagacaacctaatttgagggaaattttgaatagatgtaaaataacaaccataatatcaatgagggacatcaaaataac

SEQ ID NO: 132615 - DNA, 890 bp, Cannabis sativa
aagagggcttaaatggattgattggtactacctatatcaataaggtggatcttgttttacggtagcccaccacgaaagaactccacagttaagcgtgcttgatctggagtaatttcaggatgggtgacctcttgggaaattttcccaagatgcgtgtaagtgaggacaaagcacgctggaaaaactcgtgttggtctgtagggtaagtcgtcaatctatgaagcagccaaagtgacgtactcatgtataagagccatcattctgtgggtgtgagggcccaatgaaggcttgaagtagggatgttacaccaggtaactagcaaaataaccaacatgatcgacctttaaccaatttcttaggacatgttgataatcatgttggactccctggagaccacgacttctcttctcaatgttagaaactcatagctatgctggcatagaaagtccaagaaaccagttccctacctcagcctgctgatcaacctgttgtatccaacatttttggtaataacttcggtgtccttaaatatacttggataattgacacttgtgctggtcaccatgtttgttgtgatccctccttgttccacactattcaaaataatcctaaaattaccaatgttggattaccagattgtagcaatgctgctatttcttttgtaaggaaccatacacttatctaatcttattctcactaatattctttatgttcctaaattctattgtaacttgtcattagttacttctttctccaactcttctaactgttctttccttttccttccaaacaaatgtgtgattcaggatatttccaagaatcaagtgattgggatgggtgaacgtattggacaactctacctcttgagacacaatgctttacctactgtt

SEQ ID NO: 132616 - DNA, 626 bp, Cannabis sativa
actttgtaaacctgtccactatgacccacatgagtcgtactatcccatggttctaggtaatcactactccaatttagtcttttagtgacacacaaaaaagtgtgagtcactaaagagttacgagtaatttttagtgacatgcacaattagtctctaaatatttggtgttagtctcatgtaatgtgtgtcgctaaaaatatggaatgtcactaaagagtaaaatctaaattttctgatttttattaatttaaaaaaatgctggcctatagtgacgcgccaaacgcgactaggtaaatctatccctacacacgtagcatgtcactatatcataatcttaatttttttttttaaaaaaagttataattaataattaaataaaaaaaataaaaaataataaatcctatcttttttttcttaaaaaaaaggacaaatctatcccattagtttaacaagtaaataaagaaaaaaaaaatagctgtataacattaagggtttacaaaatacaaaccctatcagtgtacatcaataaaaaacacaaagcctctatctcttcgtcttctccttcagccgtccagcgcctctgtgttgggttttgtgtcttaaataaaaccctttacaatctgatt

SEQ ID NO: 132617 - DNA, 705 bp, Cannabis sativa
aaaaatgacatgtcgttttcggggaagtaattttcaaaaaaaaaaatggaaaatttcaatttttttttctgatcaagaaggaacaaacttcattaatcacaaacagattacatcaaaacagcccaagccaagggaaaaattcctgctttacatatacaatctctctatgtatcttttttcatagtcttttaaactacctttcttagctatttgaagtctaaaatatactatattttttatgtcattcgtgatctttacagcagtttttgagaaattgttaaatatgcaattgttttcattgcttcataagctataaatcatggctgccaggattgttacatgaactctttgccgcttgtccttactgttcaaacataaccactgctgccattttaaaaaatcagttggccagcagcaagtcttcaactagttgcagacttgggccaaaacctgttgagataagatgcattcaaaaaaaaatatgcattgctctcctctacatcagcacaaaccgggcatagagtagtatctaaagcaatctgaaattgggtaaacttatctcttgttaagagctgatcgttgattgtttgccaaaatatgaatctatgctttggcatgttgagagaactccaaataaccttgctgaatccaaactgttcttgagcaatactgctattatacagcagcttagtcttgaaatgattc

SEQ ID NO: 132618 - DNA, 889 bp, Cannabis sativa
  modified_base (388)..(388): a, c, t, g, unknown or other
caaccgcatcgatgagttcaccgctgaagttctgaaacaaaatagaccacactgctgttggtagtagcagaaagagaatttacagttcaaagaaacataaaaggccacttggctaaaacattagcaacttcattagacgatctaggaatcggaatcccccattcatgttatgaatcttaacaacaataccatcaaatatatggcaaaaggcacccgtcgtatacagaaattgaaaaaaaggcaccattattataaaataattataactattataaaatattgggtaaataccgtatgggagaaaagttatcaattttaaatgatcaaatagattctatattttttagaattttacaaatggaacttgaactaattttttgtcaaaatnaaatttaataataatctgatctagggatgttatgacaaaactagctacattttctgtatctgttcgtattaaaaattatcgtaaagttggttatattaaaaaataaaattgttaaaagttgagctcaatgtcttatttttaccattttgaaaaatataaggtatattttatcatttaacaaaacagatggtctaattgataatttttacaaaacacaaggtccaacatggtatttactaatgcaaagcgcttattattaggcaccattagtaccttttggcttttaagctagatgaccctatgcgaaaactacttttgcttattatactcgcgttatgtaatatttttgtttttaaattttttaatcacaaaaatatagtagaattttatttttgaaaaataaagatgtattttataaccacttttgttttttagttttaaaaataaaaaaataaaagtgtgttctgtaaatttcatatttatttttatttgttgatttta

SEQ ID NO: 132619 - DNA, 1251 bp, Cannabis sativa
ttttggccaacaatgattgaagattcaaaggcctgtgtgaagaagtgtgacaaatgcgccaaaggttttttaaagttccccgagcaccgcccaatgagttgatacaaatgcaaagtccatgaccctttgctatatggggaatagacctgatcggtcaactacccaaaagaaagggtggtgtgcaatatgcagctctggctgttgattattttaccaagtggacgtaagccgaaccacttgcaactatcacattcaataaagttttggattttgtggtaaaaaacattatatatcagtacagacttccccaaaaaattgtttctagaaaatgggaaataatttgacagccaaatgttcactgacttctgcataacacgtgagattataaaagtggcaaatgttatctcaaatctccgcacagggtgatgtggcatccagttgagtgacatttggagaatatttcgtgattttggatgggtcgtacgctccatgacacattgtcctaggtaatgtgccattcgtagataatttatttaaagaagaagctggaatacactgtccaaccagcctccatcttcaaagatatttcccctaaatgtatctcgcgatcattacacatacaccgactagagtaaatgtggctggaatatcttcaaagatatttcccctaaatgttcaagcaatcatattcctaattctgtgggatagaattgcacgacaggaaaaaagaggaaatatcttagtttcctcttttatttctctcgatttaggaatgtaattgaatttgcttattcatttcttatttgtttaggacgccaagttaatgtttatagtagagtcgttttactatttagggattcaaaattttttattcaaaaaagtattcaagctgctaaatttacaagatgttcgagaaagatcaagaattttttatttcttttctcgcaaattaatacaagtaaaatataagtagactattaccattatcacgagactgatgaacctctataataaaattgtattcttattacttaattattataagtaattgtttctattcgctttaattaatttattatcgttggctaaaaacgagatcaataaaaacttaaaaaatataaatgttgtaaaaagtttataatctaaataaactaaaaaaaaaaagatgtcataaatttgtaaagaaagtaagagcatgtttgatattgttttttgttttttgtttttgaaaaattgtttttagaaatgaga

SEQ ID NO: 132620 - DNA, 967 bp, Cannabis sativa
tgaagttgagttacaccagcctgcgttcggtcagccgtgttgttcaattgtgcaacagttttctgcatttttgaaatgtctttcttcatctgtccaaatttgtggtggtgccatctctgaagtgcatcagtacaggtcgaaagatttgattggaaatgggtaatatcacctgaagtaacgaacttccaattatccttgattagagcagccgcttcttcttctttgagccacatcttctcaaatcgaaaccttgttttcctcgctgattgctgctggtgtagattgagtggcaaaatattcacagctatagctctatgatccgaagaataaaaatccaaatgtgatgttgataatggttggaaatgagtaacccaaagatcattggtaaaacaccaatccaaacgctcttgaatagtctccacttgatgacgacttttagtccaagtaaaaggttctccagtaaaattaagctctgttaagttacaaaaatccaacacagatcgaaattcttccatttgactttctcttctcaaacttccaccttgtttgttgctattgtacaaaatttcattaaaatcaccaataatcatccaaggaagcattggggccacatctttgagccgtttaagaagtgtccaagaatgaattcgattgtgagttgctggtgctccatagaaagcagtgaagtgacataatggaccatttaagaaacccaagtagcaatcaaatatatttgtattgaaattgttcaaagttacaacagcttcatcattccacaacaacattaatccactactaagaccaactctaggtacttctaaaccatgactaaaatgtaaaatattgcgaaagcgggaaatagaattacaagctaacttagtttccattacaaataaaacagcgggggtttgctctttgacaagcaaacggagtttgcggacagcactcgggttccccaaaccacgag

SEQ ID NO: 132621 - DNA, 1437 bp, Cannabis sativa
  modified_base (519)..(522): a, c, t, g, unknown or other
aaaaagaagtaaatggcaccagccatagcaagctcggtatactcgatttggtatataaggaatgaccaattgtggaacaatcatgtagaaaatagtgatgtaattgtacaaaaagttaaaaatagtgtagcatagagttgttttggccaaaaaaggttggacaacaagatagagattggtttcacaagttgtgaaaagtcatacttgagttgtgaaaagtcatacttgagatctttcaattggaagatgctcctttatttgtaattgtttgtggaatatcaataaacttgctgatttatcaaaaaaaaattaaaaaaattaaaaaataaattaaaattttaaaactaattaagagatttaaaaaatcaattttgatataaaaaaatatattaaaaatttagcttttgttaaaactaaattttgagtctatttttttttttctaaaaatttagatttgtttaagtaaacataatatttttttttagtttaatttttaacttttttaaaataattttatannnntattgaatttttaattattttttatttttttagatatgagtttatatatataaatatataagtttgattttttttcttcaaaaaagcttaatttgtttaaattacttattgaatttttgataatttttgtgttattatttaagatacgtgtttataaataaaataaaaatttaaaatattttgtttaggaataatggttcttttaagtaaaactattatatattttttaattattttaatatttttatcaaattttttaatggtttttgattgattttttcataattaatagaatataataatttttaaattaatatttttaataaaaaaaaagataaaattttgtatttgtcaaagttcaggagataaaaatactaatttttaacagtaaaaaaaacaaaacctaccagaaggggcataatcatataactattatattttaggaagaatttttaacaagccacatattttaagagacaatatcagatagagtcaaaagtttaagggataaaaatactaattattctttagatattatcccaaaagaagaaactatagtcattttacaaagttaaagaacaaaaacataagaagtatcaaaaattaaattgcaatctaataacccataaatattaataattattaagaattctctgaaccttatgttaaattcaatcacaaattatgagtattaaaagaaaatattttactcaccaatcaatattactcatagtcataaatccaagatcaagtatttatttagagcattaaataaaataaatgcacatatacctcccaatctatccatatgagccattttgcttcaaaatctccaacaagaatcaccaccaaagatttcaagattagagcaaaactttagagccaatgtggagctatcccctcttttcttattac

SEQ ID NO: 132622 - DNA, 809 bp, Cannabis sativa
tagcgctgcaactactttgaaaatccaaaccgtaaattttaaaaataaaattaaaaaaataatatataaagtaatttccctaaaaaaattttactaatataaataacatataaaaataaaatatcttaatttttattccaatttgaagtttcctgggttgggggttgaagttcaagctgcttccaatttgatttcagggaatttgatggatgtgaatatgggattgtttctccttggctcgaatggaaaaatcattgataatacgacagatcagatgaataataagatacagatgatggaaaaggatgaggccagtcaagttaattgcaagagaaatggttcttggagggaagttcgtgaatctataaagggcttagtagctatggatacggataatgcttttgattctttatgtttggggaagggcagccctggtgctgaaatagattatcttaatttggtggaagttcctataagttatgttgatggattggagaggataagtaaggcaaaaggtcctttaaagagaagggtgactccaaaaagaacaaagatcaaagagaatgtggttcaggcagggaacaataaattggagacggttaaggatgtagggggtagtctttcaaggggattttctaaggaattggatttgatccttgacgatactttggaagcggcgaacctagttgatcaaggtcgctgagaaccatgatggccatgttttggaatgtccaaggtcttgggaacccttggacattgaatactcttaagtcccatgtcaaagattatcatcccgggatgattttttt

SEQ ID NO: 132623 - DNA, 728 bp, Cannabis sativa
tgcaccagggccaaagaagtatggcgcctctcgaatctaaacctgaacttcaaactggctgctacatcttctgctgaggaatttttgctctatgtctcggccaacacatcaacattagagtttgagcaattcttagccctttgttggagtatctggtttgagcgcaaatgcagaataccatgacaaatctcctaaacatcctgctgcaattctggtatttgccacagaatatcttgccaaatatcattccgttcatgccaaacctgtggccactagctctgttgctgccccaattgtacctccaacaattcatacaccagctacagcattagaagatccatggatagcaccaccagaaggcaaatacaaattaaatacagatgcgccctacaacaaagctgacaaaataattggaatagacgcagttttgcgagattcttctgggttacattaaagctgctttctcaaagtctattaaagggtgttataaaccagaagagatggaggctactgctctagcttttgctctgcaatggctcctaagtcttggattatctactgatcatattgaaactgattccttactagtagttcagggattaaaagctgcttctacttgtaattctgcctttcatgctatattaaaagatgttaactatcttgtatctttttttccacgagcacaggtcactcatgttaaacgatctgctaatacttatgcccatgtt

SEQ ID NO: 132624 - DNA, 1047 bp, Cannabis sativa
agtgctgggatttcagtttgcttaagtgttgacttggactttctattaatgagttgtactaccacatgacattaattttttccatgtaagcatgccacgttaggagaataaaaattgggataacatttgccccccaagtccctgtgcggacgtatgtacggatagggactttaccagctatgttgatgtggtcgagactgttgtagcctttgctgaatgaaagttgatgcacttttagccttttgaaacactttgtcttgactgtctgatctcaatgcagtagagaaataactgttttagttgtctttatgatgtgtaggtgaagtaagtgaagaatgggccccacatgcattacataagtgcttttttggagggaaaaccttttttcacttttcactttctcttactagaaaattgctttagaaaaagctcttccttctctctaaagggctgaaacccaaaagcttcattttcccaggatttttatgccatttcgacgatctgagattcccaccttcttcttcaatgaaatattgtagtgggtaagctttctattcccaatatcttcacttgatttggttaatttagccatggatgcatgaaaactatttcttgctttgaacatggtttgaatcgtatgttagattgttatcctttcggtattttgattcgcaagatagccttaggatacgtaatatgtgatttctaaatgaaaaggatctgaatctgacctttgatgtgattcttggctctttgagtcacaaagaacaaaaagaacaccaaagaacatgtttgagttcttgaaaagacacaagttctgatccatgcagaccctagccagccaaaaggccttgtttgaggcctggtcagccataagtggctgtcgaggggtctagccggccaaaggggctgtacccttaggctagccgacctatgcttggaattagggttcctagctaaccactaaattaggtattggggtctggtcggccaaggccaaggctccaagtgggcagccagttcttctccctcttttgacctcggcta

SEQ ID NO: 132625 - DNA, 917 bp, Cannabis sativa
ctgacctggccagggagtattgaagtttaaaaataaggatcctggttatacataattcatccagctgaatcttaaaccttatctaacttatacttatctcacaaataaaaatcattaaggatataacttttaagaaaagttatattggtgcataagtttctagaatttgcataaaactatcattaagattatgaacgagcccttaatacatgagatgactcttgtataaacctccacgagaatttcaaaatcagataatgtctcatgaatcatgattatttgacatacgagtaacaaaagaaaaaattaaatgattgcaaaacatttacaactatcacacgagaatcagttataagttttcatattagtataagggcaatgtgacaataaaatattgagatggatatcacttttcttcagaaaagtaatgcagagccattatttaatttaagaaatccattctagaaaaactaaaataatatttttttctggacaactcattctaggaagacaatgggatctaaaaacataggaggaagtgaataataaaattcaatcaactattgaggcatttcatcaaacaagtagagcacatacatatatgaatataacacaaactcaatacagatatatatgaatagaatatcttacaaagagataatatacttcacttaacaccacagtcctcaatactataatgatgaaattatattgatatattcatagttcaatgaaaaaatacgtatccagcacaacaagaaaaaataaacaaaacccaatctgtaaacgaaaattgttaagagaaaaagaaataaaaaaaccgaaaattctaaaattgcacaaactaaaaattcattgatattttttaggaagaagaagaagaaaacagagagagagagagagaagatcggaagagc

SEQ ID NO: 132626 - DNA, 905 bp, Cannabis sativa
aaataaaaacacaatataaatagtgtatatatatagatgtgagaacactctcaacactactaacactaagtgtaagtagggaaatcacaaaacttgaacaatatttaacacctttgcttaaaagtttattttctcctaccacaagcacttagggaagaaagaaatagaaataattttctggatttattaagcttatagtttctagcaaggtattttctttgatagaaacttacgaaaaaagtgtcttcacaagtgaaccaaacatctctatttatagtgtttaagatcacacactttgaaatttaaactcataaccctcatagatgttatggactcaaatgtaactcatacacacaccataactcttgtagcgttaaaaattttaaattaagatgtataatacttttttacacatttaatattagtaacaattgtggaggttacaaaatgtaagtaactccacatcttatgttacattttatgtgattattacttatatgtaactctcaatcacattatatatattaatatcatattaatatataatatatcacattttaatattttaatttatcttatattattacaaatataatataacacttgattccaataactcttcaatatgttcgttcttatgtatatatgagtatttcaacaaatgctataaacatagattttccccaaatagagtggagaagattaaaattgatcaaaatatgccatacaaaagatgttttgttttacaaccatgagtaataactgctctacatgtgaataaatttaatttattaattttaaattattttggatataagtgattatatatttatattaatatcatatatttaaaatacataaaatatattaaaatatataatatagagaaaaaaaaaatagaaaaa

SEQ ID NO: 132627 - DNA, 841 bp, Cannabis sativa
  modified_base (302)..(310): a, c, t, g, unknown or other
ttaaaatactatttataaacttttaataagtaaaatgatataaaatattatttttctaacttttgatttataaacaattaaatatttcacaaaataacctatttttaaatgagaaaatattatggttagaaaatctataaaaaaatatctaagataatttcaaatttattaattatttaattaatttaaaatatctaagttaattatttattatctataatagaatatttcaaattaaaaagataatactatcttttaatttaaaataaagctaatattaaaatatctaaccttataattannnnnnnnntaaatattaaaaaaattaataaatttttaaaatttgaccataatttaacaaaaataaaataattaatttttaaatttaaacctcaaaatatcataaattaataataatctatttaaaattaaatatacataatttgtaaattgatatttaagtttatatattttaaataatattttattttgatttttagggtttaaaattggaaagttttgggtgttgctgccgaggagggttgcacatacagccaagaaggctgcaagctgcccatgcgcgcgcagagcaggggaagttgtagggtggactgccgaggaatctcggccacttgcagcattggacgtatgcatgcgtgtttgaaccaggtgcacaccgagccttcagataggaattgtctgagctccgcgtgcgtacaagccttcttgtccgagcacctacgcccgcacaatgtcacacgatgacactcgatggacccgaaacttcaaaccaccataactttttcaatttttatcgaaatcgagttccgtaaaaaccaaa

SEQ ID NO: 132628 - DNA, 507 bp, Cannabis sativa
ctattctatccttttacacgtgctgtgcacgcgatgttatacaaacactttttttttttcttaagagaaaactttattaaaaaaaaaagaatggaatgaaaattatttcctattcattatattctattttattacttccaatcaaatgccgccttaattcttaatctcgatttatctcgcattataagaaatgagactttttattttcctttttatccttaacaaaaataaaaaaatgggatgataagatgactcattaaccttgtgaaattataaaactaatcttatcaagaatgttaaatttaacaaaatattcttttgttcttaaaatattccgttaaaccaacaaattggttaaataaccacattttatacataaaaataaagatatatctgacacaaacaaattgtttaaaataataaagatgatagaatagaaataaagaaaaaaagtggtttatatatatatatatatggaagaggtttcaatggttacatttttattgt

SEQ ID NO: 132629 - DNA, 556 bp, Cannabis sativa
tcgcactccaagcagatacactaagtcgggttcagtggagacactgtgaagaggaagatatcaagttcataagggtgatcttcgtgatcaccttagtgcaatttttcgggcgcaatcccagacgcctcgaaatgaggaagggccttatgatcccaagttgggcaatcagggcataaataaccttaccaatccacctaccgcaccaactgggacttctagagtagttatcccagcaaatatagctgctattgcaactatgcccgcgacgactcagaacaacgccgtgctgccagggggaatcgaccagggtattttattacaggctttaaaaataatcgatcagcagagaaagcccatttacaagctgcatggaacttctccctttaccacggaagtgcgacaagctcggctacctaaaggattccgattatctgaatcattaaaatataaaggtaccactaatcccatagattatttagagaaaattaatacgattatggaagtggaccaggtacctcaacttgcaaaatgtcgtattcttgcggcaacactcgag

SEQ ID NO: 132630 - DNA, 872 bp, Cannabis sativa
gtcaatcttattagatttctgatgatttttcagagccttttttcttatgatttttcgtcccatttttagtctaacttgcctttatttataatcacatagtaggcaattagttacagagttgactataatctttacaacgtttatcccctgaaatcgtagggtttaattacatatcacgtagtataaatgcgattattatttaaatatcacacagctgtgatttatccgcttttgttgggtcaaaatgatcgtgtattcaaacacgttttaaatcatagcgttctgggatgtctcgacaggaactcaatactaatgaccttgatagcgagttggagtttttttttcctatctttccgaggttgacgatgtacgcatcgttgcttctttgtttgaacgcataatgcttcattttgaccctcgcagttcttaaagacaaaaagagtatttcagcagtcatcatttgaatgtcagcttttgacttgtctagacaataagtgtcactgaaagacgcatgagaatgattggtgaaactaacaggagcataccttcttatagcgagatcggcgcctcactattagttatttggatttgcccgaatgttatacttagtttgtaaattatacgctacgtgtcttcacagtcgttatatattaataactcttcatttatatatatacatgttattttaaaataatgaaaaatagtaaataattaataaataaaatccaagaggaaatcaaaatgaaactataattaaattgatcataccacaaaaaaagtataattattagtcacaaagtaaaaaaaaaataaattacaaaattaaaaaaaaaaagtttatgaagagtttaattaatttgataaaaaaaaaa

SEQ ID NO: 132631 - DNA, 1382 bp, Cannabis sativa
aaattaaagagctcagaagctacaaagaggtgatttcaggtggaaacaagtcaaaatggctccataccatggatgaggagatggattcactccagaataacaagacttgggtagttgtaccaaagttggagaataaaaagattgtgaagtgaaaatagattctcaaggtgaaagaggcaatcaatgagaatgaaccagtgcagttcaaagaaagctcagtggctaagggctttactcaggtggaaggaattaactacactgaaatcttctcacttgtagtaaagtataagatgataagattgatattttctttggcagctcaaatagaatttgaagttgaacaacttgatgttaaaacttcctttttgaatggattcttagatgaagagatctacatgaagcaaccacctaggttttaggtggaacagaaagaagttgaattagtttgcaagcttaacaggtccttatatggtttgaaacaatcttcaagacaatagaatgaaagatttgatacttatatgcaacaaataggattcaaacgatccacatatgatcactgtttatatttcaagaatctggagcaatctacaattgtatttttattgcccattgtggacgatatgctcatcatgagcaaagacaaatcagtgatcaaaagtatcaaagccaagattaagagagaatttgagatgaatgagcttggaccagttcaaaagatacttaggtattgaagtttcaacgaacaagaaggaaaagacaataacttaaagcagtctgggtacatcaagaaagttattcagaagtttaacatggaagatgcaagagtacatctgttcttttaggcggacagtgtttttttgtcaaaggaatagtgtccgaatagtgaaaaagagaaagaggaatgtagtggttttaagatgcttaatgtatgtgatggtgagtaccaaactggacatagctcatgatctaagcatcctaagtcggttcatgtccaatacgagaattgaacaatggaaggcccttaaatggttatttaggtacgtaaagggcacttagggttatggtaaaagtaaaaggagaattggagctgaaaggattcttagatgctaactatgctttgaatagagatacgagaaaataaaccacttcctacgttttcatgacaaattggaactatatatgctggaaggcccacttacagtctgtggttgccctttccaacaaggaaggggaatttatggctactgtggaagcattcgaggaagcattatggcttcttggaatgttgttcgaattgaaacaactaaaaggtggagtgactgtgtactcagatagtcggtcatccatccattttggcaagaatccaatttatcatgaaaaga

SEQ ID NO: 132632 - DNA, 1269 bp, Cannabis sativa
cttccacattttgaagaaacaaatggagaaagcattactaatttaccacatatgccatagagagaagtggcctcaaatcttgtcttaacaagattttgtatccattatctaatctataatacacaataagtgaagaaatttttttcaaccaaaaaaattaattatctaatctattagcacgttaaactaatttatgggcattaacattaaagttttgaggttgacaccaaagatatgttccaaaaaaaaaactaaacaataaaactttaaatgagaaagaacactaacttatgtttttcatcccatcaataggatatctacaaaattatgggataagtagattaatattaaatatttaatatatatatatatacaaaatttcattagaaaaatttctttggacataagatacttgcatatcatgaactaccatagagattttagtaattaaaatattaaaataaatttatatggttgactatttaatggttacattaaaaatataattacgatagttatattttgttagagattttattataatagaaaaaaattaaaacatcataactctattgtaatataatacaaaattaaataaatgttacaacaacatatactatcttatatatatatgtatattatatatataagaaaagtagataaagaataatatgtataaaaatactcactcacaatcttgagtgtagattagtgaagatcaccataactcgaacaatgtattacacttttgtctaaaaatttattttttcctatctctaagcactaagagaactttttaagaaataactttaggaattatcaagtcttttagggtttctaacaaagtgctttgttgatataaacttctcaatgtaagaaccttagatctctttatataggatttagaatatcatcatttgaaatttaaactcctaacactcatagatgttattcactcaaatgtaacttatgcacacaccataactcctatagcattaagaatttcaaattaagatgcgtaacacttttttacacacttaatattggttataattgtagaagttactcatagtaataagtgactccctcatatgttacaaaataatgacaactaatatgtattgtcatattagtttattacatatatttaatttaatttatatattatttataaataatataaaatattttttttataacttgttataacatactaacaggtaaaagttctcttttgtaattttttctattttttttctttttaatttt

SEQ ID NO: 132633 - DNA, 820 bp, Cannabis sativa
tatgccaacacaattgcgcaaaatggaaaccaaccagaacatggaaaatggtttcttcatcacaattgcaaacacacacagcgaggatcaacagggacatgtttagtacgtagttgggaacgagttggtaagcaccccgagatagctttccaagcaaaatgaagaaccttgggggggactttaactttccaaagggccctccacagttcaaactccaattgaaggtcccattcacctttcatttcttggagatgatggtaagaactcttaaccgagtagaagcccgtcggctctttacaccaaaaccaagaatcaacattaacattatcacttagaggaacctgcattattcagtcaatgtcccttgcctcaaacaaatcatgtaaaacctcaagatcacattgcttacgattgatgtgcatcaactatgagactgtgctatgagccaaagcaggatgtgtgaaaatgacacaaggattcacataagaaattagccaaggaacattaagtacgagagttgatatacctgatttgcgattcaaacacactccgccaaataaaacttggatttgcacctatctcagcagtaagaaagttaccatttggatagtaacaagccttgtaaatacgtcccacaagagaatcttcatacagaagaagacgctaaccctgctttcctaacaaggaacgattataatctcgcaaattacaaaagccaaccccaaccgaattcttgcttctacaaagacgtcgccaactaaaccaacttacacctttgatattttgaggtttaaatataaaaattgattattttattttt

SEQ ID NO: 132634 - DNA, 757 bp, Cannabis sativa
agagagagagagagagagaagagcttcaaagggagaatgctcttgactctctctgatcttcttcttcttctttttactctctatttgtggttacagaagaaactcaatattaaaagtatcaaactttctcttctctctctctctttcaattattttttttgtttatttatttttgaattattttcttttgtttatttttgttttgttgtcagatgtcactttctctattttttatttatttattttactgcaaaattcttacaaaaaaaaattaatatttttaaaagccaagcaaaaacattaatcattattagagttattttattatattcttagagattcgtggtatattattgaaaaaaaaaagtaagtctagaacctaccaaccatacatatgcatacaactaataatatagtgggtagtacatagtacaataataataataataattaataaaaaataatacatatatacattaaaatgaagagaaatgctaaaagacaccagtagtgccaaatactttcctacgtgtcaatattattattggtgtaatttagtatcaggtctcatatagtttaatataatagtttttagggagtatcgctagccaatcgtaagacgatacgtcttaagggtgttaagcaccactggtgcccaatagcaatgctctaaaatgattgctaattataatttcttaatcaatttctaccttcgaaattacatgtttgaatattttttgagaaatttacatggtat

SEQ ID NO: 132635 - DNA, 684 bp, Cannabis sativa
ttcgtcattgctacaatatgtccatggcattccagtccactccccttggtttcgctgacaatgatttcccaaatcaaaattcaggtcgcaactcaaattgcaactcaaatcacaatccaaatcgcaatcctaaattactataaaccatttgatgtgctagtcaccgtttacagtgttcaagaccactaggcatcgcaagatatatgatgtcatttgcttaaggtattctctaaaatcaaaacccaaatcccaatacaaaccacaaccatctagactataatcacaacatctaatttttatggtcagtcacaattctaataacaactcaattcgcaacctaaattgcaattatctaattttatttttactgtatgaaatcctaattgtgaactcctttcttttttaataccataattttgtaaaaagtaaatttgaactgtattgcacaaattaataatgcactataaccttatatataagaaaaagccctaatttttaaaatttatgttattataattttttttgtttgatgtaatatgacttttatgtcacacacaacataaaaaaagaatatctaattttgatggagaatgctaaaagatagtattggtgcccaatatcttttttcagtattatattgttatttatgtaattaagtaccaggtctcatataacttaaaaaat

SEQ ID NO: 132636 - DNA, 810 bp, Cannabis sativa
caggggccgcagccccactctatggttgttgcggcctgcccctgttggaggcctgggtttccaagctaggtgtcgctgccccgagtggggaatgccgcagcccgcccccttgtttctgggcaaatttgaacgtgatattggaatgctcgtatctttgtgatccggactcagttttgggagtttcgcatagcgttgcaaagctcgttctgagctccatgtgattatttggaatttgaatgccaattttataattatgtggaaatggatttagggattaaccatattttttttttgaatcccaaaaattgtgactaggattaccggcacttggtgagaagaatttggggatttggaatctccacatttgctggacatcgggtaagacagtagttagcacgtagagttatgcacggtggcgcttatgctgaatgttatatttatgattaaaaacctagattaggcttattaccctaaagggagcaattttatggtctagggttatcaccctagtaattgtgaatgtttaaatgctatgccatgctataaatattgagattaagaattatgcgttcaaggcataacttggttggactcggtaactagaaccgaggtaaacctttctaaggccttattgtaattagacgtgtgagcataacacgtaggctatgccacatagacatatataggcgtgtgagcgtaacacgcaggtctatgcttaatagacaataagtgtaatgacatgattataatgtatatggaatgtataattgtgattattgatatttatattagcttgctgggcttggctcg

SEQ ID NO: 132637 - DNA, 1059 bp, Cannabis sativa
aggggtatccgagtggaggaggtttttctttatgcttcgattgtagttgataccatctagagggggcgaaataaaaaaaatacacaataacaatcacccggatgtattaaaatgtattgaccttattcatacttcttttgcagagttacatgcttctctggtgccatgcccagctccggttttgacggaaaactggaatccaccccctgaggattggatcaaactaaattgtgatgttagagagggattggcaagcatgtgcacagctgttgttgctaggaaccacctgggtaaggtgatttggatccacacgtctcagttggacttttcggatactttatgcggagaggcgatagcttgttgtttagccatttctgtggcaattgacttagatttaaagtttattgttattgagagtgactcgagactagctatcaatgctctcaatgggaaggagtcccattgggcacttgagaactatgtctccttttgtatgagatccactccttttactagttgtaactttatgaatgttagtagacattgtaactttgttgcccataatgtggctaagtgggcttttacccaccagaagtttggttgtatcccggtctcatccttgccggagaacctactttgtaatgaccttgaggtctaattatgttctttatctaatgcatttcaacgctaattttcaaaaaaaaaagatgatccatttacaattcgtggttgtgaaagccgaagacaacctttctcgattgaaatttgaagataaagcaattttcctataaaatttgtgatttttgttgaaaatatcgaaagatataattttattaacaaagtcagtattgtaagtacaagcgagccaatgtatttttcgggtaggtgctcaaactagtacgagagaatgagaacataattgtgacaatcagtaatctcgtgatctgtaaggagaaatactgggtaaactgtgcaattccacatcacctgtgaaaggtcaagtgtgatgattatgagactgtgtaggtatgagactacatagttgaagatggcttaaat

SEQ ID NO: 132638 - DNA, 602 bp, Cannabis sativa
ccttcagatccttgtcaaataaagaaagagcccactttatgcaccaattggttgactcaatagccttctaacctgcaacctcctctattgggcctccgtgtgggttggtcagaaggctatatcacgggctgtccgcctagtgctggccttggtggaggggaggcagtgatggtccgacagcatcctcaccatgggatgtcctggccactttggccctcacccatgcgataggctcatttgaaggtccacgtcaaagacctctcaacttggaagacatgtctacaaaagcaaagtagcaaagtcaacaagcattcacaaacattcaatacaagaacaaaaggatggtgttatcaactatcaaataccttcatcatcagaagaggagcaatcagaaccctcaactgcagccttgcccttgcccctaggtgtaggcacaggacgtgtatgtctctcaaaaacctaacctctaggcccaatatggagggaagtatcacctactggacccccgctggctaggcaccggtggagagccttatctctcctctccaaattccatgcaatatgagacaaaggtactttatcatcatccaagtcaggagctt

SEQ ID NO: 132639 - DNA, 982 bp, Cannabis sativa
aatatcaaagtgcaaattttgtgtgttttatatacctgataagatccactagtaatgatatttgcaccagcattaaggtagtccaagtgtacctgttattttaagatgaccatatagatgtatataaatgtaatctcatatatacatattaaactatctgcgctatttgtatatcacagtactatatatagtaccaccacgaggttcaaattacgcccattcctacctccttaagtagaagaacatgatgcaatgagtattaggagagaattgaggatcaaaatcttacgaagccatatgtcttatagggaagtatagtatgtatatatattggatcaaatttaaagaggttggatgatatagtgaacattaatttagagtattaatgctataattcaaagtgcacacactaatgttatatatatgaattattctatgattcttgcgttacacaactggggtttttaaaccataatatataaatatggacacaatttatatagtgttttttttttaacaaaaaattaacgtatattgattcttttagtgtcaattatgtgttcaattcaagtatgatcattacttaataaaataatctaaaagatcaaattagtaatttttcttacatctcttcctcaaaactcaaatattatatcctcaaaataaacaaattctattctataaaattttacaatccactctcttaagatggatgcacttattttattttagtatatagaagaatattttagtctattttttttttataataatatacattgtagttatttaagatataatttgtaaaattttgaacaatttaaaaaaaatttaacatcatgaaaatattctctcttataatataatattatatttaactaataaatataattttatcaagtaaaactaaataatagattcaacagtcagttgcacgtataaatctattattttataggcgtgtgaaatagattatttgaac

SEQ ID NO: 132640 - DNA, 1211 bp, Cannabis sativa
aaggttgttcaagaatatcaagaagaagacaaagttatggagttcttgataggtctgaatgagtcttattgcaatgctcgctcacagatttttatgcaagaaccatttcctcaagttaacaaagcctatgctagtcacctatactcagtggtatgcctggacatgttatggcaaaatgttacaaattgaatggctatccacgagggcacaagtttcatgggaaattttctaatcaatgtgattgagcaccaccaagaaaagttgctccaaatttttcaaaatcaaagaataatcaatctggactgaaggcaaaactcaggcccgtccttaagcataaacgggttaggcatggacttagggctcacttagcccaagggaccaaaaaaattctccttttaaaattacaatttttttgctgattttgaaaaataccatattttaataagggctcaaaaatattttttttggcccactaaactgtcaaaacctcatcaagatctaatctcaaatcttcctctccaatgtcaaaagtgaatgacagtgttgttagaatattattaccctattatttatgttacttttagagttaattttcttctttattattattttttggaatggaattacgcatgtgtttgttaatttcatcagattttgacacttgacatgtataacttggtcaaatctcacaaaaagattatctataagatagagagaattgtgcaagaaaataaagttgaaacttcaagcctaaattagactatgttatgatcagatttttgtgaacatcgaaacataaaatttctagatcactcttttatatttctggaacatcttgtatcgtccaattttgagtaatatcaagagagttatggccaaaatactatcagtcgacgtagcaaaaaactcactgcccaaataaaaggggggtcaggcctaggcatggaaattccatgctgcggcctgcccctcctaatactgaaaaaaaaaataggttttcagtgtcttttatcttttctttttttttttttatcattttttggctataaaagaagtggatttcaatagttttcaacaagcaatcaaggagtacgaattttggagagcaaaatcaatattggaggccttctcaatggagttttcagcattattttcttctctattcttaaattaatatgtgtgaatttgctacgatgaacatgagtagctaa

SEQ ID NO: 132641 - DNA, 578 bp, Cannabis sativa
ttcttcctttaaatttattgttttatttattttaacttttttatataaaataatattaatttgttttatttgttactaattttgtaaaataaaatatagatatttttcataaatattaaataatttaatattaaaagtaaataattcaaatgaccgatccaatttgtatttttacggattgaattaaattaaatttgggctattagattcaaaatataaaattcaaatgcactataaaatagtacggattggattaaacaaaaaacttatattcttgacgtaaacctctatatatttcaagtttttttggcagctcttaaatttggaagaaattgtcattttagtagttatatatataataaatccaaatatattaatatctaagagaaattaatttactaaatttaaatttcttatatatatatatttatatatgaagggtgcacccttaattaggggtgtttattgaatcatgttcaatgtttttaggcatattcagatccgatccaatcatatattggatgttagattttaccatccgatttgattcgattaatttcggtcatccaatcgatcca

SEQ ID NO: 132642 - DNA, 1170 bp, Cannabis sativa
gggaaataaggaactagaacccaagatttgttcttgacaagagcacaatttttcagtttgcataacaacaaaccatagaggatcttgtagtacatccttgaaggatgtaggttcacgagaaaccttggagacagcagtgagggcctttagtttgattataccattctttgaccttgttatcataggatgtgtattatttaaggcatttataggagggtgaatttgtaaactaaaaactggaataggggtgatgagaggtggtggttcatgattagtttctgtgttagcaatttgggggctggtattgacttagggtgctggttcaggttgacttgtggaaggttcaaagggatataatggggttggatgaatggttgagggaacttgttaatttgtgatagtgttttctgattgagtgattggagcaggtattgtgtatatatggtgtgtgtttgggttagagttgttactggtgataggggtttaaagagagagtggtagggaaatttgtttttatcaaacttgattattctagctatatagatacggccagaaggatgcatacacctgtagcctttgtgtgttatgctatatcctaaaaggaggcattgtgttgttctaaacgaaagtttgtgactttgatatagtcttataaggggatagaaagcacaaccaaacacttttaaaaaagaatagtactctagtttttgattaaagagtacctcataaggtgtattatgttgcaagatgggtgttggtagcctgttgatgacataggtggccgagacaaaggcttcccaccagaaactcaaaggcatttcagattaagcaaacaacgtaaggccagcattaacaacatgcatgtgtgttcctttatgcacaaccctgttattgatgtgtgtgagggcaagggtgcttgaactaaattccaagatcctgtaacaaaggtcttaagggtctatatttacccccagacagtttgaagagcttttacttttatttgaaaacatctctaaccatagacattcaattgtctgaaaatggtgacttgatgtttaattgtcataggaaaaatccaagtatatttagagtaattatcaatgaaactaacataatacttgaaaccttccattgaattgtagaatgaaggaccccatacatctaaatgaa

SEQ ID NO: 132643 - DNA, 577 bp, Cannabis sativa
attagatattatcccatgtgtaaataaatgaaacgtgtgaaatgttcacctttcatcagtagttatgaacaaatcaatccctgtaaaaataattgccaacctatattattataaatagggacaaaatccatgggaaaagggacgacaagaaaatagagagaaatattcctaataataaggactcgtggagtatgtacattttaactacaaaatcatgtaaaatatctggtgttctttattaacattaaattttgtagtgtatttattgccaaaaaatgctatttatttagttaacgaaaatctgcgttaatagtcgttgctttcattgagagtcttggtgataaaaactcaaaaatatccctcctaataaacacaaatacgaactcatattaaatggctaataacaatcaacacgacagtaatcgtcctgaggaaacaacccattgtcctggcaaagaacctatgggatctcaaagaaccaacacattagaaacaccacattcagggaggaacaatggtaatattaatgatgctggagatcaaatcctagaaagaaggagtacgcacgcctatgatc

SEQ ID NO: 132644 - DNA, 697 bp, Cannabis sativa
tattattattattatttaatccaactaatataaattttttttatgtgcaattaaaatatttttgtcccttcaagagaaaggataacaattttttaaagcaaattgcatgacctttgattgaaacctattactaggagctaacaactatgattgttttttttttgtttgaggttcatactctaatattttgagattattcttaaaagtttttgcaaatttgttatttagatttttaggagtgtttttaatctgtgttactcataaattagttgcacatgcttttgggatggataaacaacttgttcgacaagatgactatccatattttgtgggttgcaaagtaaatttgatgaactctgcgtatttatttaatcaatataaaatgtatagtatttaaaattagcatgtatgataatattatattttcagtgaatttgtggattgattttttcaagaatatgatggtttctgtaaagttactatttaattaaaattgtgtgtaattttgatgattacaatatctaattctaatgtattttttcaactaaataatcatacacgagtgaaactcagttttaggttaagctaggctaggttcgtacacccaaatctacctaacaaaaattgtacacaacatatttatatgtaaagaaaaaggggacttttatttgcaccccactaaattataaatacaccc

SEQ ID NO: 132645 - DNA, 513 bp, Cannabis sativa
  modified_base (27)..(32): a, c, t, g, unknown or other
actaatcagattgtaaagagttttatnnnnnncataaaacccaacactaagatcctggtaaaataatttccaacaaatgtagtgtttgatgagaaagaaagcaccaatttttctgcatttagcttttcagatagcttcagcagaacgtgtattggctttacaaagaaccaagttgtcgtctacgaaaaataagtgggaaattgttggtgcaccacgcaaaacacgcaaaccagtgagattgccattcattttttcaaattgaaacaatcttgagagtccttcagcacatattataaacaaatatggtgataatggattgccttgacgtataccacaactcagaaccaagtcaccttgtgttgatgttgggaatattttaccgggatctagatttactaacaagtatgtcgaattaatatagataactctagaaattagagttatttttcacatttttttaactaaaattggtttagttcttaagtttttaattaatttattaagtttttaatt

SEQ ID NO: 132646 - DNA, 577 bp, Cannabis sativa
tcgaatggtaagtggaggacttgcgtcgacttcactgaccttattctctagacagggatatgctgacaagttgttcgtcctagacgacacatttaccttagtcatcaaacaacagttaattaataggtcatttttcctgggtgtcatttcaaagatggtacccttcgcccaaatcctggaaacattctacgtgtgacctagagaagtgccacatcatccatgcagattttgggataataatatttaaatcttaagtagagaaataataaaatttgcatattaagatagtgagatcaattacagatagaaaatactacattaaaattcatgaagatggatatactcctagtctatttacaaagttttttttttaaaagcatggattcattgcccaatacatatgtctggtacacccaaataattgtttttgataagtttaagaaactaagcattgttggacatagggtggagcgtgcatagaaaattctaaactttcctaagtctttgtctattgatactcttcaacggtagtgtgcatatcaaattgtgttctaactaaagttgtttctcaaacata

SEQ ID NO: 132647 - DNA, 613 bp, Cannabis sativa
ccatctgcatttaatttcactctatacacccatttgttatcaattaaaatcatatgagatgcatagggcacaagagtccaagtaccttgagctttgagagctttaatttcagttgacatagagccattccaaacaggatcacgaagggcagatttgatagacttcggttcacgaggtagtagagattcaggtagccgatgtttagtggcaagatatgcttttggcttgtagatacctcgcatagatctagtgatcatagagtgagtgcgagggtgaggaccagcagtagtagaagtggattcagcagctgtagtatcaacagtaattgctggtgcaggttgtgactgagatattgcagcaggaacttcattgtgcacaccaaaattatcatgtaaaggagaggcagcaggagcaatatcagaaggcacagaaattgcagcaggggcctgatgaatagctgctgaagtaacagcaggagttgaaacatgttgagcagacacagaagcaccagtagtaggattaggaggccgagtagatggttcagtaacagtatgagtaacttcaggaccatgagtagtaacaaattgcatagtagaatacattggagcttcag

SEQ ID NO: 132648 - DNA, 671 bp, Cannabis sativa
cgatccaaagttggcctaaggaatttgaacaagtgatcttgttataataaagaatgataacaagttattgcccaaaatcaatggaagaaatttattgagggtaagtctttctaccgtgatcctaaattttctttcaaagaacatattgttagagatggcttaaagatttctcaggttgattccaaagagatgaaaatacaaacaacaaactggagctctgctttaatctatatggttcttggtgccaaccctccaactgcggtatttgagggttttatcaaatgaatttggagacaccttaatattgctcaaatagtcagaatggctatggatctaactatattatctcgaaaacctaattataaataattaaagtttattattatattatgggttaattaggtaacaatgagtaggattgtgatcttgctaacctaatttagcataagatataatttttttctatgaatggataaataagtgtaatttattaattacagagatttttggaatatgtggatataatgtaagttatttgtgaaataaaaatatttttctggttcagcgaccttagagacccgattggaggacaaaaatgttacaatggttttagttagtaatattgataggattattgagataagttaattttaaaaatatcagggtatttt

SEQ ID NO: 132649 - DNA, 693 bp, Cannabis sativa
  modified_base (653)..(654): a, c, t, g, unknown or other
catgcccagaccatgttgcggcacctgggaccaattcccaggtccactcagaggagcgggcagtggcatgctccaaagcatgtcgcggcatctaggtgcagaatctagaaaaccagcagccactcttcgaatttcagcccaaaactcaaacttttcactccaatttctcaatcaatcaacaaattaacatataggattattagcacataatagatactcaattaatatattacatgcatcaaaattccagaatttagattgtaaaagccatcttaaaatcatgcacaaacatggcacttcaagctcttgaataagagcttcatctctaactactcaaccaatatccagccatgaaaacaactcataatcacattagctcaagctaaaaatcacctctaaaatcccagctaaagcttaattaagattctaagcatcatacacacaaagattaatacaataacatgctcaaattaactcaagaacacaaacatgaaattttaagatcaaaccatccttccaagcttttccaacataaaattcagcaagagaattaaattaaaaatctgaaaacaactacatcaattcacaacaaagcaagaacaataatcttcctccaaactctagctccaaatcaagccaaaaccaagtttttnnttccaaaatccaagttgaatgcaaagagggtaagagagg

SEQ ID NO: 132650 - DNA, 927 bp, Cannabis sativa
gtgcaaatgggtcaaaccttgcattgagacatgaattagacataccatgaacatatttgaggcatcagaattagattcgaagatttttcattttaaagcaccctgacacccaatgctcgggcaccctagtgcccagattgacaatctgtcaattcgggccacttccaagtatcaaattaaaaattaaaaaaaaaaaaaacgtgcatcttctttgtcttcataaaaataagaaaataggtacatatggggaagaaacaacacatcctgggtgccaaaacaacgacccagtgcccaagttgacaccttgggctggcccaacgcccaggttgagacctgggccggcctagcacccaggtttacatttttccatcataggccaattctgaggatttttttcccatacatcttttaggtatattctctatttttcagcaaagattaagattcaactttttttggggaccaaacaaaacttccagatggccttaaactggacccactgcttaagttgacatattgtcaaccttggcaatttccaatcagtttcttgaaaaagtattatgggcatttttcccttcataataaataacagagatacgagcaaactcgaaaagaaaaccacaatcacaagggcatgaaagctgagcccatcgcctagattgacaatcaagctagtgcattgatttcaatcattcaaatgataattctaatgcaagcattctccctagaatggttaagaaggggtcggagacctcgtccttaagctctagagtctcagaagtattaaaatgacatcttgaatgctttgaaaaaagcatttaatgcctacattgagatatggcctggtgtgctggatttttcttatccgactctgattccgtctcaactgttcgtctagtttttcacaataactaagagcaataaatt

SEQ ID NO: 132651 - DNA, 741 bp, Cannabis sativa
actcgtggtcaattgcttaaaaaggcatattgaggtttaagccttaaaacttaaatttaaaatctatactcttttttaattgttatcttctaatcactgacaatcaaaactattaaaacaaatcataacacaaaattctaaagaaaaagcacataaattaaatgtttgaactttgaactagcagcctcaagtgatttcatgtggtattttctaagaaatgctaggatgctacgagtagtaaatcattattttaactttaagcacacctctcttttcttctcttccctaaggcataagcctctcttctgtcttttccctaaggcatgaaccctacgttgtctcacctctaactcttttcaaacattgcctcacctctaactctttccaaacattgcctatagtgaatatccaacaaaaattttaaaacacctaaacaagatatgaaatgtgattttttttaagtatttataaatgttttaatacctacttgaactatcatcctgtttcatgaatttatgttatgattcatgaataggtatcaagatggttcatgaagccatgtgatagttcaagaataagtgttaaagaatcatcacattggcttcatgaaccaacctattcaccaatcatcacattgcttcatgaaatcttgcattgtttcataaccactagagctttggagaaatattacaatctctccaacaatccccctattaaaaattgcattttaaacacttatca

SEQ ID NO: 132652 - DNA, 683 bp, Cannabis sativa
gtcttaaattgttttccaagtcatctagattatttccaaatgaaatgaaatcaactttgtattgttgtggcatgaaagagggaagagattcaaagagtattggatttctcgggttttattaggagcaagtgatctatcatttagatacttagggatcccgaatatttgtgccaaaagattaacaacaatagaatgtggttcaatagtagagaagatggttcaaagaatcaaaatttgggggactcggaatatttcctttattggccgaacaattctgataaattcagtgcttattgctatacactcatattgggcgcagataatggttcttccaaaaacagtgttaaagaagataaatgccatttctggagcattcttatggaaaggaacatctgatacaaataatcctggttatatgactcttggtctcagctttgtaaatcgaaaacaggtgggggcttggggttccgaaacaaattgttatggaatgaagttgctcttgggaaatatgtttaggcagttgggacaaaataagaaaacttgtgggtgaaatgggttcatagtgtttatttaaaagacacaaattggtgggactatcataattcatgagaatcaaacaataagattaagaaatagcgaaagcgtaccagagtccattgaatcgcttgaagaagggtatgatc

SEQ ID NO: 132653 - DNA, 1111 bp, Cannabis sativa
ctcacgagtatgtagatcaatgagatgcaaactcatactcacgagtatgtgggtcaatgagctacaaacttatgtctatccattccaaatagttttcttgtatattctgtttatctcgagatggatctgtttgtctcgctagtcgcatcggtcaatagttattactcacgtcttactattgcctatatggcaacgagtttgagtatttctattaaatatatttttcgagacgagttatttatgtgcatttaataatgcatcaatttgggacttgttcatattccaactttaatacgcgtgtcatttttctattactgctcgaaatataggtgtaacaaataccgattattggtttttatggtccatattagagttataaaagtgaaagcggaatttgataaaaaatagtttttatccaatatgaaccataagcccaaggatttcaacataatatatatagattaaactactgaaagaaagattatacctcttgaaacctatcagggtatccttgtttcttttcatataaattttgaacatccaatccaagaacttcgttgaagaacccacaccttgatcttccaggccagcctcaacacttaggaatagtgtgggctattagatcctatttggatgaacaaatttatgtattacaatgtgtactcaactcatgagacattgtaatagagttaaggtttttgatgtcacacacacacctgaaaaaggtgtgtacacgggtgagagaggagagagagagagaagaaaaaagaagagctaggtgagagagagaaggagtgaaaaaataaacttcctattttctctctttgagttgcttatttttctgttgttatcactctattatttattctactatatatcctatatatagtgttataaataaagccttttaatttttaatttaaaataaaagtaaatatttaatttattttgaattagaatttaaattcaaatataaatatctaataactgcatatcaaatatcagcagagtttttattttaataattatccttttaattaaaaaaattattcaataattcatttaattaataattaaaaaataattaacttaatttaatttaaattatttt

SEQ ID NO: 132654 - DNA, 579 bp, Cannabis sativa
caacttaccagagaaagatcccgaagaccggtagaataaagcctgtcaggtccaccgtcaccaagctcctttagatcctcatccagaaaaaggaaaggccctctctatgtgccggttatttgcctcagcagccctctatccagcaactgagcccgctcctcagccgagcctccgagtaccttggttggcaagccgtatcacaagctgtctgactagtgcaggccctggcagtgatgacccaacaacatcctcaccacgggaagtcttggccactttggccctcacctgtcttgtgggctcattcgaaggtctcccaataagacctctcaacttggaagacatatctacaaaaaagaaagtagcaaagtcaaaaagcaatcataaacatttaatacaagacaaaagcatgatgttatatcaactatcaaataccattatcatcagaagaggaactatcagagtcctcaacgatagccttgcctttgcctctagatatacgcacgaggcatgtagtgttgggttgtctgccctaaataaaatccatttcaatataatcagatttactaattaatcaaagat

SEQ ID NO: 132655 - DNA, 2577 bp, Cannabis sativa
tcaaaatcgattcagcagagccaactatcctttgagacctcctctggaatttggaactttctctccccagtattctgcagcaaggggttctccttccaatcgggttgcctatctgtatcatcccagggcaaatggatatggagctcctcaatataatgtgcctcacttcactcaggttcatcgaggaagcttcaatagaggaggcaaatcaagcaactcttccaacataccccaatgtcaactatgtctcaagattggacatactattgtggattgcttttatagattcgataaaagctttactggagtgcaatcgaattatcgaatcccgctgctccctctcctcaggcaaatttggctcacacttcaggacaaaatgataccaattggtatccggactccggggcaacaaatcattgtacaccagatatccacaatctggtttcaaactcgccatatgaaggatctgagcagctggttgtaggtgatggcacaggtttgtcaattaaacacattggtcattctactatcttgccctctactcataacacttctcctcttattctcaataatatgcttcatgtgcctgaaattaccaaaaacttgattagtgtttctaagtttgctagagataatagtgtattctttgagtttcaccctgatgtttgtcttgttaaggatcaggtttctcacaaagtattgatgactgggacataccagaatggcctgtattcctttaaatcatcacaattgcacttgctgccctctcatttgcatacaactctcaatggcaacacttcacagcaacctgctcattctccacacactcttactgccactgtcagtcagccttttcattgtagtagctctcttacttccaataatactacttgtatttccccttttgatgtttggcataatcgacttggccacccctctgagaaagtggtcaagtctgttcttacttcatgtaatatactttgtccaaataaaaattctgtttcgatttgtcaagcatgttgtttgggaaaaatccacaagtttccatttccaaagagctctaatactacatatactatacctcttcaacttgttgtttctgatctttggggtccctctcataccccttccttcaatggttataagtattatatccattttgttgatgcatattctcgattcacttggatatatatgcttaaaaccaaagatgaagcattaaaaacatttcagcactttaaagctgaagctgagttacaacttggcaccaaaatcaaagttttacaaactgattgggggggtgagtataggtcctttactaacacattaaaagaggctggtatcattcatagacatccttgtcctaccacccatgagcaaaatggtttagctgaacgtaaacatagacatattgtggagaatggtctcacacttcttgcccaagcttcaatgcctttaaaattttgggatgaggcctttagaacagctgtctatattcataatagacttcccacacctgttctccatcataaatcacccattgagacattatttcaaatacaaccagattaccctagcctaaaaacctttggttgttcttgctatcccaatataagaccatacaacaagcataaaatgcaatttaggtctacaccttgcacttttattggatatagcattaaccacaaaggttataagtgtcttgacacttctggccgtgtgtacatatcaagagatgtcatttttaatgaatctcaatttccctatgcttcacatcagcaatctcctataacaccagaaactatagcctccttttatccatctgctgttattccaactgtcacacactcctcatctggtttaagtcatcataatgcatctatttcatctcatacacatactatctctagcttttctaaccctgtgcaggcaccatcaatgataccagccacccaatgtgacatctctgccattcctacaatagcaccagcaaataatattgctacagcagctcaggcttcccagttgcccatttctgaagtctcaaatgttatctctgctcctatagactcaaattccattctcaacactactgaaacaacaaatgcaccatcttccacaacagttaacaatggcaatattgattctgtgcccactgcaatcacaagtggtgcagctgttaccaatgaaaatactgctgccaccacaactgatgccccagctgttgttaattctcataacatgcagacccgttccaaatctggaataagaaagccaaaagcttacctagctctaaaagaaccgacaagtgtgaagcaagctatgcaaagtgctcaatggaatggagcaatgtcaactgaaatgtgtgcactaaagaaaaacaaaacatggacttatgtggttttaccacctggaagagaggctattgggtgcaaatgggtctataggatcaaagagaatcccgatggtagtgtatccacactcaaagcaaggcttgttgccaaaggatttcatcaacaacctgggtttgacttcactgaaactttcagcccggttgtcaaaccagttacaattcgt

SEQ ID NO: 132656 - DNA, 959 bp, Cannabis sativa
aaagaacaaaataaaaagatgcaagaggtgatggtcgccatgcaaaaagccatggagacagcaggaattcatatacaccctaaggccatcccagcagtactcgagaaaatgccgaaagagtcctctccaagcacctagaatcctcagaaacacaaatccagggaaccaagtcctatacggtatccctctgaagaaaatcaaagaaaaaaccctacttctatcccagggagaaagaaaaaggtgcaggatccgcgaaaggtccgctcagatttcccaaaagggaaaggtccgcagaggggaaaactccaaaagggagtcttggccctcaggatcgagaggatcgaaagagcgtgtccgtgcaccaagagcccagggaaagagggaggggaaaccgaagataacctcccgttgatttaagacacctaatcaacgaaaagcatggtgatttgcggtatcacctagacaaaaagaaacatataccagcggtctctacgggaacaccaaatgaaggaaatttaacagaattggcgacactgcgcaaagacatcgctcgggtctcccggaggaaaaaaggggatgactcggactctgactatgaggaccgagaaccatgcgcccgacacatattggaagcggagctccccaaaaattttaagatgcccgagatggcaacatacactggggactcagaccccagcgatcatttgtctcgattcaaccgagtaatgacggttatgagggtcagaatgacgccaagtgtttatgctttccactaacgttgagcggttccacagaagaatggttcaaaaaattggaaccatgatctgtggattgctggaacaagtagcaagttggtttctgaagatagtttgtcccagcgagaaagatcaacctcgaagtcagcgccttaactaacatcaagcaactacccacggaaaccttgaagaattttataaaga

SEQ ID NO: 132657 - DNA, 908 bp, Cannabis sativa
tgaaattaaacaaaagtccttaaatctaataatctcaatagtttaagagaaatttttaacggtcagaaaagttcaggaggcatgatttggcatatattaaaatttggagagtaaaaatcctaattagccaacttattatacacaaatatatatttatatgagttaagtacatatgatctacaaccttcatgtaccattttttgtttttcttactttagtaatttcactactaacctcaaagctcttattgttttggaaggcaactaagtctggagttttttctgtggaaagtgcttattggataagccaacaaaataaatttaaggagctatgcaagaaaatatgggacaaattttagcaaatgaagattcacccatgaatccaacttctatgctagaagattatatcaggcatactcccgactaagagtcggcttggctttggtacttatgaccaaattcagtgcaatttctgcaacatggaggcggaatctactctccatcttttttgcaaatgccttgttgttggtgacatatggttcaaaagttcttggggaattagaattgatagcttaaactggtctagcattaaaaaaattaagcacatagtggactgagattacatatgatgatttggccattttgcagcttgtgtttgtgatacgatctagaagtggagaaacgacatgatctacaaagagaaagtgtgtgttttggaggacatctatacggactgcattagaagattcgaagaatttaagttgattcgatactggttttatcaggaggcactataaaataactgttacttttagtgacaactttttagtcacaaaataatttttctgtgactaaatgtgacttttagtcacaacaaaatgttaattgtgactaaaacatagtgtttag

SEQ ID NO: 132658 - DNA, 1539 bp, Cannabis sativa
aatatcttgaattgagatatatgaagaaacaaaagatataaaactagcactctattgatagcaattgaaaatatacatttttaattctccaaatacaattcaaacataggaccaaaagggtgtacctcagctcaacaaaagccaacaacaaccaactttgaaaagccaaaattgctttaacaaaagtgaacaataaccaatacttcaaactggtgtgggcaggtggtgaaatggagtcccacctctgccatcactacttttgaagttaaaaaaagaaaattaaaacacatcatgaatgagtagtagggttgtttgcccatgaacatatagggttaccctaaaaccttataagaattaattagtactccttacccaaacaccagcaaagacaaaaataaaggtggcattaaactcagcaagataggccttgagagaagtagtgctgaaacagtcaccaaagctacccaaagtcaacttcaccatttttctgtaaaggaaattataaagagatgagttggctcagtttctcttgatgaatgggttgtgtaaaacattattttgagtgtttcttaaatacaagtttagccaatatagtagactaagcaccgccatgatactccacttgggcagcctttgaaattcataattggagttgccaaccttttatttttgtttgttttatcagaaatatattttatccatcttatatttattttataagatagccaatcacttttacatgattgtaatcaaaggaatatgagtactcatagaatctagaattaagtatacaagtaccaatgaaagattatctttgctattttatttacatatcttatgtagctaggccataattaagctagcactaattataatttaattgaatattggaaccaaccaatctgaatcactaagctaaacaatggactttggggtctaaatttaaactaaaaaatctagcagaaagtaattgtacaatatcctgatacttgatgatgtactggtacacatgcaactagtaatgttacagagtaactctcttttcagttaagatgtttctttaattaatttcattgccacttgtaataatgcacacatgatgcttttggcaaaatcaaaatatacatataaattgcattttatatatatgatagtatgacatctctatattatatataccatacctaattataattagtacatcacaagcagctgatcatattgacgtaaccaattaggtgtggtatatgtatcatatataaaatataaagtaatgaggtaaagaatgttttcatgattttcactacttatatatatttcaattggtacgaaagcgaaagaaactcacaaaaataatagcagatataggtgctgatataagtagctatagagaattagtttagttgagaattaatacctttcaacattcgaagaacaaaagaagatattagtaaacatattttgggcttttcttctagctaggccaattgataaagagaaaaggaaaaagaaagagacacagagggaaagagagagaga

SEQ ID NO: 132659 - DNA, 972 bp, Cannabis sativa
  modified_base (26)..(26): a, c, t, g, unknown or other
tatattatatgttatatgcttttctnactgagtctgttgactcacagatattacttttgtgtgtaggtaaaggaaaggctaaaactgaacagcagtgaatccagagctcaagggatggttgtacatgtcgagacggtgggacatggagagttcagtctcgggacgacttgggccttattttgtagccgttgtgcgatatgtatgtaaatattattttgaatgtaaaatttataaatgggatcccaaatttatgtgaatatatgtatatgtttataaagtttaaagttaatcgaatttttaatttatcacacttttcgagaaaatcttttgattagcaaaggtctgcaaagtaattagaaagtcactgtagtgtgcctaatcattagggcgttatacactcatatttagttaaagactcaagaggaacacacactcatatatactaaaagttgaagataaataggagaaactaaaatttaactaaatatttatgcatgtttctcaattgaaaattcaaacttaattatagcacttgataaatatttgtaaaaataaactaagatcttagtaatattagcacaagtttcctcgatcataaactaaataggaatttgacagtccccaatataaaattatttattgttgaaattaatttcatctttaaattttttattgatgttgtaggataggtcatggtgtaaatgtgatgatgaaggagataggaaatcacgacaaggaatccgattgggaaatgttggtagaaatagtgtaacgccctaaataattaggcacgctacccaataaacttatgaaaccctaatcccctaattgggattgctaatagaattagcgcagaaattaaactttaattgcaagcaatatgaaaataaacttgtaatactttttcactttataaaacaaaagatacaagtgtcgggatcccgaaagtactttacaaaatattattacaag

SEQ ID NO: 132660 - DNA, 606 bp, Cannabis sativa
taataattagttaaagagcttgatgaaaacaaaatacacaaaaaataattatttatttgactttcacatcatttttttgtgagggatttaaaaattatattaaattaattaaaaataattaaataatatattaaaatagaataatttagaaaatgttaaaaaattagaatacacttaatatactaaatgtgtagttttcaaaaacacaaaagtgatcattacttaaaatagagagtactaagtatgtattttgataaaaaaaaaatatcagatatgtatttaccctttatgaatcaaaatatcttagaatgagacaaaatattaaattgcaccaacaacaatatgtcacatcaccttatgcctttgatatttctctaaaaagtaagataacaccacaccttttttaacatcataattacataaatatatctttatatataaaattatttaacggtttttattagtttaataaaatattttaaaaatataagttcgttaaatttaacggtattagtaactttagttttataaatatatataaatattaatatttattattttagattgatttgattgatatacattaatattatttatttaaggtta

SEQ ID NO: 132661 - DNA, 751 bp, Cannabis sativa
cattgtcgttggctaaaaccgaggtcaatattttggtgctttaattgagagcaagtgtcataaactcactatttacttcaaatttggtcataaacacgatggtggtatagactcgtagagatgtggttgatccagcaaattccctggcagtggatcccgcattgcagaacctaggaaatgtaagggttccaccagccacaaatcctgaactactgcgaattgtgggtcagggtgtgacgtctccttttaatggaatcgcaccgggtgtgcaagagactagaaatacaagtttggcaaccaatcagggtattcccaacactagagttccgccagcaacaaatgtccgaacaatagttggagatgacaacgagatccagaacgtctgtgctgctcttggactcatgcaaggccatactaacactctgcatcacgatcaggaagagctccgtgctgcagtgaacctcgcattttaatagcaaaggcgtttgttaacaaaatggagggataaagaggtggaaacattgagggctcagcaagcagccattgacaaccgaacaagacatgcaccgtactgatatgaagggcctatcaggcaactaatcaacaaccggcaaccagcatcccactgggtgagtcagacgaagatccaccagggaatgcttctcaaactctgaacggtcagccgcccaatccccggtcacaggttccacctgtgggccaagtggtgttgggttttgtgccctagataaaa

SEQ ID NO: 132662 - DNA, 715 bp, Cannabis sativa
  modified_base (379)..(410): a, c, t, g, unknown or other
atttacatcaatttttttagcaaaaaaaaaatgtatttacatcaattttggtaatataaaaaaaatcatgtacattaattttgtaacaatgaaaattatttgcattcttttttttaatatttattattattgtaatattaataacaatctgtttatctatacatatatattttatattttatatgtatatgtatatcatataaacatatatataaagtgatttaaaattctgtttatatttcaatttatttttattattatgtgagagtcttacatttttattgcatgaaaaaaaattatcatttactatctattaatggatcaatggattctttttatttttataactctcaccaccaccattattattattattatnnnnnnnnnnnnnnnnnnnnnnnnnnnnnnnnttattattattattattataccactattgatttttataatatatcaattgtcaatgtatttacttattattacagtatgcagtaatatcatattattctaaaataattcatatagtaatcaaacaatgatcttatttttatgttactgtacacttttatgaatttaatttattaatttttcttaataaatacatataatatgatttatattagtttacaagtaaatccttaagggtgtgtttggaaataactgtgtaattactaggtagggtaattactaggatagtaattacacagtttagtaa

SEQ ID NO: 132663 - DNA, 646 bp, Cannabis sativa
aaaaaaaaaaaaaaaacctactttgagtctagtatgatatattctaaaaatatatatatataaataaattaatatacacatgtatatattctcccttgagtcggtatgatggcttctctacatgttcttcatcagctctatgttgtgctcactgggatttagaacctctttggctggttcgagttgtagtttagaaggtgggtggtagtcgggagtctcgtcgggttgctgttgagagttagtggtttggtctactcgttaaggggttttcccctttggtggatcttctcaggttcgaatttttctagtgttgccagtggggcttttacaggtctgacggtggtgttggatcttgggttcatgtctctggtagagaagttttgggccatgggtgggggtctcttggactctatctaaagagtgtgttgttgtattcagtgagaaaaagggtgtggaggaggattctttagtgattaggtccactgcattttgttactcatgtgtgttttattttatgggtcattgtaggagtgttcatcaaaccgctcgaactgtccgcaccgcaccacaccgcaaaaaaaatacggtttgaaattctttgcggtgcggtcgcggtttgaattccgcacattataaaaataccaat

SEQ ID NO: 132664 - DNA, 859 bp, Cannabis sativa
  modified_base (207)..(213): a, c, t, g, unknown or other
  modified_base (565)..(570): a, c, t, g, unknown or other
aataatttcataattaaacatgaaactgctaatttccaaattaaactaagcagtctttacaggtggtgagacctcccttgtagatctatgggcggctaggattaacctagcaggactctatgttctccccaaaacatcgacctcatgttcttaacaaattttgtctttaacagcctaacaaattgatggaaaatatctactttcaannnnnnntttagtcttttgtatttaattaatttaatattatataagggttttattgtaaattagggttttagatttcctatataaaggccctaactctaacctagaaaacctaagtcactaagcctctaaataactcttagtcaaaaaccccaatttctctttctctctctctgctacttgcccctaaggctctctatctctttttctctctcacacgcctctaaggcaacatcagtctctcattagagatctacctgctgatttatgttttgtatccttatagagagctatatcagatcgcacctatagcaatctgaatagtattatctctacgtattaatacaaccaaaaggggagnnnnnnattacccgctatcacaagggggccgaacctctataacaaatctgtgtgttttatactttttcattatatttgtgtaacacgtggcaaacatcatatctatacgaccccactgtcaattgatcagtttttgagattaacagttcggcgctttccttgagagcgtggatatcgtatctgatcaaatgccatggttaacacgagaagaacaccagttgcaacatctacatctttggtctccctcgagacccacagactgtagattgcgatgttcatgctgcagccactactg

SEQ ID NO: 132665 - DNA, 779 bp, Cannabis sativa
aaaaaaaaaaaaactttttagttaccacatttgctaccgaaatttgttagtagtcaattctaaacaaataagaccaaatatttctactaccaaattatttagtaggaaaatatcatttttagctaccaataattttttgtagcgaaatattcatgtttagctaccaattttcttagtaacaacaaatcttttacttttagccaccaatttcactaccaaaattgtaatttttatgattaatattttttgctacaaattttttactaccattttttttttgtaacaaaatatgaatcgttaggtatacccattttgctacattatttttagtagaaaagtatatcttatcgcaaccaatgtaaatctattattttctttggtataaaaatattatttaacacttttctcttcgtaattaataaaaataatatttgttagctatctactaaatcattatagtaaaaatataattattatctctaatattatttatactgaataataaaaaatgtagtaaatgattgacttttttttattaaaacataattattatttcttatgtttcttgaatgaaattattaaattatttatataattttattattaattttagtgaagtagttttattttttcttattatatattgcattttgttaacgtaaattttcgttaatcaaattcgagcctaaatagtgataaacatgcatagaaaaatgaaaatagtaaagaaataaaaagaaaagaatgaatacaaaggtttttttacgtagttttgcagt

SEQ ID NO: 132666 - DNA, 675 bp, Cannabis sativa
  modified_base (27)..(30): a, c, t, g, unknown or other
actaatcagattgtaaagagttttatnnnnggcataaaacccaacaacttcaacatgtaggacttgcatggttggccaaaccatatcgtatagtgtatggctgaccaagattggcctggcaggattctctgtacagcctgatacatggactgcaagctacctgtgaattgggcccttaacaacccaacaaactgatggaaattatttactttcaaggggcaatttagtcttttgtatttaatcaatttatcatgtaaatatctaaggatttctattgtaaatataaaggccttaaccctaacctaaaaaagctaagtctgattctagcctccaaatcactctaagtttgaaaccctaatgtttcttctctctcttgtacaggcccaagagggctctctcctcctctcactcacacacctctaaggttatacctctctctcattaatgatttgcctacttgatccattctttgtaaccttatagagagctacatcagatcccacctataatgatttgagtagtattatctctaagtatcaatacaactgaaaggggagtaggtcattacccgctaactaagggggccaaacaagctgaacctttataaaaatccttgtcttatttactttattgttcttgttgtataacacgtggcaaacatcaaattcatacaat

SEQ ID NO: 132667 - DNA, 681 bp, Cannabis sativa
aaccatatcatgtgtagatggaatgtgatatttggagaataagagtgtagggggtgagaggtatactctctagactaatctatcgcccttgagtagatgactcacccttaggggagtggtgattgtttaaatcacaatgggggtacttgtccatcccttcctagggggtagtcactttactcacgttaggagagtgactgctagacttactcccaaggaaattactgctaaacttacccctatgggatagtttctctatctcccacacacatagaatatacccatgatatgttattactcactttcatcccatatactcaaaatttttgtttcatcatacttgacatgtcatccttatcaaaatttgggctacaaatgtctactataaatatcatgcacactattatataaaaaattagtttactattctctatatactgaaaacaagaaatgctctatggtaaggttaaaagtgaagctcctacatgagaattctacttgtaagaatatttttttttctatatatggagaaataattatttatttttttatatgacaatgtacattatagttataccacacatcctactagttaacaaaaaaaaatagagtaaatttcgacataaatacctaatgttttcgattttatacacttaaatacctaatgtttatttttggtgg

SEQ ID NO: 132668 - DNA, 974 bp, Cannabis sativa
  modified_base (924)..(937): a, c, t, g, unknown or other
tctgaacatgtttggacgctcctcgcagtgtcctcaacttttctactctgatttgtttggaggatcacagtcacaacaaccgatgtttggtcaatttgggtactcttcccagcaaccaatgatgtatagtcaaattgggggttcactgcagccaccttttccgagttcatttttcattccataaaatcaatattttttcgtggtcaatttcagcaacaatctccgatttttttgcaccaacaacaatctccgactctgccacaacaaccacaaactcgagaatttgtttagttattatgttcgcaacagccatattacccttcaccgccattatcacaagctcaggacagtgcacaaacaacccatttaaacttgaacaccagcacttcagaaattttagataatgtacttgatgaagacaataataattagtgtaagtttttaattatgtatggacaataattattagtttaattttaaattatttgtggacaataattatttattaaagtttttaattatgtgtgaacaataattatttgtttaatgcagtatattggacaattattaattaactatgtgtggaataattagtttagtgcaatttatttttaattcaagataaaattattattgttattgtaattttaaatatttttatatatattattaatattattataaattatatattttataaatattataattaattactactttttaatttaaaaacgcaatactggtgggatccgcagtaatgtgttagatattaattctgacgacattaatagcagccgtacacgctcttattgatctatcggtattattcattaattgcggcagatgtgttagtcggttgctattaatgagtaatactgacgggtctattgttggatattattttaccacgatcttagatcnnnnnnnnnnnnnntttattaacatcctaaataagaaagatcggaagagcg

SEQ ID NO: 132669 - DNA, 750 bp, Cannabis sativa
cctaaacaacacaaaaatgggaaagactagggttcccaaaactggcccaaccggcaaaccggttccctaatcgaaagaccggtttagtggggtttgttggggaccaaccggaattccggttcctataggtcccactgaatcggtcgaccagttcaatgcacgaaacacccaaaaccttctaaacacctcaattcgatcccaaacttcacaaaaatttccagaacacctaattaggttacaacaaacatattccaagcaataaaaccaaccaacacatccataatcaaaatctaccattaaagagcaaagcttgagttcttaaactcaaagcttgctcaaacatcacaacacccacaaacctagctcaaatcaacacaactaactttaatttaacttcagaaaacaaagttaaaacactataaatcaccatagaaccctaaaattagaaaaaacatgcatgaacttaacttgaagcttaagaaattatgaagagagaggttagagagttttaccttaacttgaatcacaaaatactttccaaaaaccctaagttaagctactaaaactccaattcttgctgggttttcttgagggttcgagaaggagggagagagataaaggtaagatgtgattttctaatttctatcttttgaataaaatgaagaataaatgataattcccttcttatttcagccaacatacaacaaataaatcacatattttcagaacactaagtcaactaaaggacaa

SEQ ID NO: 132670 - DNA, 912 bp, Cannabis sativa
aaagcttttggtgtatactcatatgtatattattagaactccttcaaaagtatattgatgcaccatgtctgttttgatatcagaaataatttttgttaaaatattttgtatcatgtacgttatagttggattcaaaatattttgttgcatctgtgactattttattttatacgcatgtaaaatagactgtttgaatactactttctatattgtaaattattttgaatttttcaaaattgtatagaatatcttaaagggtaacttatcttaaataactacgtaatatagccgctcttcccgcggctaatttttttattttaaaaacaaaaaataaaagtgtgttcgatagctttatttttatttttatttttaaaatttttaaaattttgattttcaattaaaaaattaaaaagtgaaaataattttataaaatatatttttagaaaatattttcacttttttaattaaaaaaatagaaattaaaaaagtattaccaaacgcaccttataagtcaccgttattactactgtatctcatatattttctcctcgtattttattcattgaattttatttattgtttcttcatgcaatttaaaaattacattttatatagatttgtagaaaaaaaaaacatattttatatatagcaaaaatagtaaaaattaaaattgtaatgatttgtatatttgaaaacaatatacattattaatttatatataggatagtttagattatcacaaactatgacttatatttaacataaatcaaaataaaaatatatatgatataatatgaaagtagtttgtttgagtaataattgtatttttaaagtattaactcatttaattttttttatatggtataattatatagctaatatatatatatggaagaggtttcaatgattaca

SEQ ID NO: 132671 - DNA, 899 bp, Cannabis sativa
taaaggcaaagaaaagctagaccagccatgaggtgacagtcttcttcaacaatgtacatattaaccttgtcgggttgtgtacttagttgtcatgacttgttttagactgtatttactgtgtattttgattttatattttgacttgtcattgtatatagtccttttgtaaaaaaattataacatggatccccgaaacaaaattttagttttgttatgatgtcaatttttagtgttttattttaataaagtttttaatattatatatcactgattttaataattaataaaatcacacaagtggcgtccctatagattatggcgttacagtaatgatatgtgatcttctgagtttggtatcattgtgcatgacattaaaagatttctctttctttcacggatatatctttctctcattgtaatcagtcccataatattatagctcattctttaacttgtattgctttgtctttaggtgtttctaaagttttgtggcatgaatcatctcccggtctccaagtttaattattttgtgatgtatgtgactctttttgcttgtgccttttaatgaaattattcattttattcaaaaaaaaaaaattaaagttatagaaagcacatgtagaatttgttgggattttatgccctaaataaaatcaaatatcggtataatcttatttactttcaataaagattataaatcatatcttgaatttgtcatgtgctttgttcacatgttttatacatgattatatgtttaatatataagttctattaaatcctgaacatatagttattcacaattagcagatgttatcacagtaacaagtaattatgactatatgtttcaaatttatttagtcccacgaattatcagtgcactaatgtgataatcatcgata

SEQ ID NO: 132672 - DNA, 525 bp, Cannabis sativa
  modified_base (488)..(490): a, c, t, g, unknown or other
ataggcggcttctttgaatcaagattattcgatcatccattaaaaagtttagtcgataatggtggactttatatataataactatatgacatcctaaaagttttattttattttattttttctaaaaaaaaaaagatgaaagtataaaggaatatatactgatgaggatattctagtttctttgggtttgaataaggagccattgaagtcttttctgttttagatttttttgtgtttttttgtatgggtttggcggttcctaactgcgtctcttaaatgatacttcaacttactattatggtcataaatattgagaaaataaatttttgttactttttttagtcatctttttcatataatttaaagtatatttttagtcacaataaaaatttagttgtaaataaaaaagttatatttaggagtttttttatttttacactttaaggactcgtttggtacaccttattgtaatgtattgtattgtattnnnttggattgtgttgtattgtattgtattaatattat

SEQ ID NO: 132673 - DNA, 615 bp, Cannabis sativa
aaaattactatttaattaataatttaatacttaccgtccagtaggtaaaaaatctaggatagttgtccccatacagctccggactaacctaaaaaaacaaattaaaaaatgatcagcaataattagtattatatataagtgaattattttatatactatttttttttcttcaaatttacagttttaattgttctgatagttgttttggtagtttcatattaatttctaagtagattttgattgagattttgatagctcccttggttggcatgtgaattttcataaaaatacgaaaaaaattcttttaaagtgtaaaagaaaaaaaaaactcatatatatacatgactactatattactcaaatttaatgtgtagaaaaaaattaatatcatttatttatatataccgagataaaacttatacttacatatcttgataaattataaagggtagattgatatggtgtttaacataaattgtctgtaatttattatcgggtcaaatttattttattttaataatattataaattagtatttttagtgatgtgagaacatattttttaaagaaataattcttaaaagtgaaacataaattaataaaataaaaaaaatta

SEQ ID NO: 132674 - DNA, 541 bp, Cannabis sativa
agaataacatatcagggtatcggtgaggtgtacatagagtttcaccgagataccaacaccgatgcagctgtggatcaaaagaatggtattgttggcatcggtgatgttttaagggattctcatggctcggtcattgcatcattatcaaaaccaatcataggttgctttaaacttgaggaaatggaagctcttggccttactcttgcactctaatggctgctatctcacaatctttcagcacaatacattgaaacagagtcgatgttggtggttcaaggacttaaagctgcttaaacttgtaattcagcatttcatactattctgaaagatattaactatttagtatcctttttcaaacgagctcagatctctcatgtttctagatctgctaatacttctgcccatgttctggcaaagtacggtggatagtgatcgtttttggttggaggaatttccacctccacttatgactgttatgtaattgttttcaattaatataatggtctttctctcaaaaaaaattaaataaattaattttaaa

SEQ ID NO: 132675 - DNA, 509 bp, Cannabis sativa
  modified_base (125)..(127): a, c, t, g, unknown or other
tcacaacaactattgtaactaaaagtacatttagttacaataaattctaatttttgtgactaatacctttagtcacaaattttttagttacaacatagcaacaataatttataattagtcacaannntttcacttttagtcacaaattttgttgtaactaaaaataattttttttttataatgtgttatatataatctagaaaagagagacgtcctcccccacttcaaaaaaataaaaagtggctctactcaacttaaattctaagtctgccactgtatttagcaaccatataataaaacataatattcagggtatgttgttattttttaaccttaattatctctagatcaatctcagctctcagatcaaataagttcctcatctaacggttgccatacatcacgtaatagattctgtgaaagtacaatctcacgataaaatcatatccctaaaaatatatatatatatatatgtatatgtaatgaattgattcattgagagaataatt

SEQ ID NO: 132676 - DNA, 1070 bp, Cannabis sativa
ttatatattattttttatgttgttatattgttatttaatgttattttcttgttttctttttgtgtttttatagaatactgtgaaaatataaaaaaaaaaaaattgaatgtaaaaatataaaaattttataaaaattggtgttttatgtaattatccctagtttaattccatatccacaacaatttattgtaggtatcatgcatatttagattattttggtatatattttaggttaaatttgagccaaaatatattgtaaaactatatttggtctaatttttttatgagcattgctattaggcaccagtggtgcctagcatatcgcgttgcgattggctagcgatactctctaaaagctattatattaaactatataagacccgatacttaattggaccaatagtgatattgatatataggatggtgctaggcaccactggtaccctttaacatttctcttttttttttttatttatgccacaaagtacaaattagttataaaagttaatactaccattaatgctcattaaaaatatacaaaatagttaattttatttattttattttaatatattataaatatatattttttcattgatgaatagtatgaataagtgacaaagagataattaaaaaatgtggtatttatcgtgggttaaaatttggctaatggtataattttgtgtcaaattttaatttgggccaaatttaatactcatttcacatcactattggagttaaattttagcgaaatattctaaaaaaacaattaatcataattatcttgaatcatttaataaaaatgttcaacaactataaaagatcttaataacccatgtacatacctcaaacaacactcaaattttatgagcttgttaaaaagttaatgtgtttttatatttctagttaatttaagacaagtaaatgtatatttgaaaatgatttgaagtggtaagtaaatgtataatttatatttctcaaaaaaaaaaaatgtataatttatattattttatttcttaaaacaattaataattacaaatatatatatatatatatcatttaataacttt

SEQ ID NO: 132677 - DNA, 759 bp, Cannabis sativa
tggattggattgactattttatgaacaaccctaaatatatataagaaagtataagagaagtgcaccttaaatgtttttctttcaatttttctaagtttataatacatctcattacttttttttttttttttaaataatctacacacataaattaaaagtctcatcatttaaaaagcttttaaatgttatctaagtagattttaaataatactttaactatgtttctttccttaatataagaattttttattttattttatgggtagttgactattgtcttttcttagtaaaaaaattgttttttttttatcttttttatttgtcccaaaaattatatattttctcattcttgagtaattaattaaatcaatcttgatgtttatacattcatattaataaatatgattttttttcaatctatattcttaatttttataagagaaaatttcatattattttctcattaaaaagaaaaattacataattctttataagtttgattttgtaataatcctacattatttagaaaggatgaaaggtcttcacaaattcattataagtaaattattttttttgttatttttatttatatcaattaattagttataatttttaaaatttatccaatctataatctataataatatatatatatatatatattaattttttaattaattaataacatattattataatttaataatatatattgaatttttttaaaaaaaaaaaatcctttttaaactaaaaaaacca

SEQ ID NO: 132678 - DNA, 536 bp, Cannabis sativa
agaagaaaagaatgctaaaaatcctctgaagaatgcctccagtattgcagttgatctctgaaattcgtgctctatattctgctgtttatttccttccgaattacttcccgaaatcaacagaagttcactccttatataggcaatgagggactaaaaagatagaaaacgcacatgctaaaaatcctattcagccttgaattggaaaaccacactcgagcccacgtgagaaaaaatgatatttttgctgctgaagaggggcgggccgcgacgcccactttgctgggccacgccccgtgtggttttcaatgtgggatttatttgctttttcaaataggtgggccgcagcacaccccttcttggatcgcggcccgtgtgctccaatgcccacgttttcaacgcgtataatatgttactttatgattaagtgggtctacaagacaaagctcaacgcagatggctctatccaaaagcacaaagcaagattagttgcgaaaggatactcacaacaatacggagtcgactacaacgaaacattt

SEQ ID NO: 132679 - DNA, 722 bp, Cannabis sativa
aaaggcttttcctcacccaatggcccacattaataataaggaaaaagacaaagggattattataagcctcatgcctgatattgggcccactagtgaccagatggtggatattccacatgttgatatttgtaagtcaagaaccccacatcattttcctgagcccactgtggtgaattggcccagcaatactagcctacccgaagtggtccaaggattagtggaatcggcccaagaaggagatatagcggcccaaagaagtatttattgtgataacattgaattggagaggattgggccagtcatttcaggttcaaaaaaaagaaaagctagtttatgtattatccccgttgcaaagaactatggggactctgaacacttcccaggaaaccgagaagacactgtgttgcctacggtggaagttaacgtggtcaaaccagggcattcggcactagttcatggggaggcttcttcgtccaagtcgagaaatgagaagagaagaaagggaagtgcagttagatgctccaagaagaagtccccttcaggccaagcttttccacgcagactactgggagactttgaatcgattgaagacaagaaggaaggtgattcgagggatggtagtctggtggaagttacgatacaggaagtgcaaaattttcatttgggcgaggaggcggcccttatcaagcccccccctccccaatgaggtttctttcttggaa

SEQ ID NO: 132680 - DNA, 1277 bp, Cannabis sativa
acttgggaaaacatcttttaaaatagaacccaaagcaagtcaaattgttttagggtatttttacaatgcacttttctaaaattagtgtactgatatttttgacatgttaaatttttttaaattttacagcacattttaaatagttatgactaaatatttttttagaaattaaaataaataaggatgtatcaatgcatgttaaaatagtcccaaactattcccagtgttataaattagttattctgataaattttgtcacacgttacacttaataaataaaatgatgatgtggctctttagacaaatcatacagctccacatatgtaattaatttgaaaaaaactattctaaagttgttaatttagttttaggtaatttttttaattattaattgaattttaatttaataattttttaaaattataaattttaaattatacacatagttatgataattgtctaaacaactacatctttttttttgtcatgtgtgataaaatttgataagaggactacttcacaaaactataaatagttcagggattatttttaacgaactagaagatttagggacagaataatgaatagaacatagttttgttaattatggttacaagttttgtcatctaggaagttgtgttactccggaaagaagctacagaaaggttggtagtcattcaaaaactttgtcagtaaaactgtggccaattcagatgggtcttctgtgaagcttgtctttcgtaattgtaacgttttccagatagcttgttgtcaatccgaagatgtactccctaataacattgtcagtcacagatgtttatctgaaaggagcacatgtacgtatctagagagcttgtccatattaaagcttctagattgtttgtactgaaagcgtatcatcaaaggtgacgtagattattgttgttggtgatgtgctagaacatttaagacggtggaaatgtatcataatagtttcagaactaatttaggcaacaatacaaatctataaatagctatcaaatctttgtaatcgtgtgagtgaattagactataattgcttgagtgaaaatcgtaatggtgtaagattgagagagagtctaaactagagagagaaacatcgtaatctctgagagattgtgaggattcttgtaaccttgatagcactgatatcaataaaaatatgatagttgttgttctgaccaaaacgtagagcattgcacaagtctcgaactcgttaaacctggaattatctttctgttttccttaattcattactt

SEQ ID NO: 132681 - DNA, 637 bp, Cannabis sativa
ttttaattatatttatgtaattttcaacaatattttactgacaaccatataaaaaatattaaaactattataatttaaatatttacttataaatacttaattttttgtgtcacactctacaaataaattaatacataattttaattttatatttttttgatagttttaattataaaattaaaatattgaatgctatgtttacattttattattattttacttataattgacaaatatacatattattataataattaaattataaggttttttaatgtttcatattgtggcatttcgtgcaagtctattcgtatttacatgtcatgccttttaagtttttcaactgagttgtacttaagattaagaacatatttttcgtgttgtggcatgccaatttatacatcgtgtcgtgctaatttatagcattgtgtcgtgttatgcccaaactcatattttttttgtgtctggtcgtgctcgtaccatgtcaaaaaatacaactcatatttacaacactataacatactcatctttgattattttaaatattttttttattggagcgttaattatataccttacattgcacaacttgagattcgatcttagcaccctccacacacatatcctcccaagcccc

SEQ ID NO: 132682 - DNA, 707 bp, Cannabis sativa
gcatggtgaccttaggaagcacttagagaaaaagaagcaaacaatactagtgtcggagggtgccctaagcgaagggatcctagctgaattagcaatcctccgaaaagacattgctagggtctcgtgaaggcaaaagggatatgactcggagtccgactgtgatgactgggagccctgggtcaggaacatcctagaggcagaactccctaaatatttcaaaatgcccgaaatggcaatatacacaggagatatggaccccagcgaccatctgtcccgattcaatagagtaatgacagtcatgagagtcagtaatgacgcaaagtgcttatgtttcccattaacattgggtggatccactgaagaatgattcaagaagttagaaccaggatccgtgtgaactgctagaacaagttgcaagtcaactttcgacgacagtttgtggcagcaagaaaaattaacctcgaagtaagtgtcctgaccaacataaaacaactactaatggaaacctttaagaaattcataaagaggttcaaagaggaggcttcaaaaatcaaaaaagtcgacgatggacaatagctcgtactgctccaagccaggatttggaccggaactcctttttggaatgagctgcagcaagaaggagctgctagcctccaggacttccagaagagagtccaaaaatacatcaacctcgaagaagcccaaat

SEQ ID NO: 132683 - DNA, 611 bp, Cannabis sativa
aacccatgatatgttgggttgggtcggattatgcaaaaagtttaatgtgaatgggttataatttaataggcagatctcattgggttggcccactaaaatagcttcaatccggccaacccaacctatgcacacccctaggtaagctcttatatgattgcctccaatctagccattttgcaatctctaagaaacagtgcactgtccagcaacaaccaaagaagaggtgatccttgtctcctcttgattgttgcagaatatacaatcagaattatctacaatgccaaatctgtacaatttgtacaatttatttttagcctaggttctgggtcgatttcataattgttttctctgttaatgttaccttttggaatggttttacgcttgattttccttttaggtccctaaggcattagagttcaaattgtatcaattgttgaaaagacgggacattctggagaaaaatctgccgaagctgtcaaaaacgcttcagtagttgcgaccaccataacccatggtcccgaactaggtcgcgtacgaggctaggtagagagcttgttttttttttctcactttgcctatggtcgcgactaggctttatgtagtcgcgacta

SEQ ID NO: 132684 - DNA, 555 bp, Cannabis sativa
tcggcatggcccgtgatgacctttcattttgagaaatattaaaaggttgtactcatatatattcaaagagagaattgttattaggcattagtggtagtgttggttagtatttttagacattttatcttatgatttgattaacaatactcgttaaaagttattatattaagttatatgagactcgatatttaattgaaccaataataatattgacatataagaggatgttaggcactactgttgtcttttaacacttctcatattaaaaaatattagtaagttcttgtattattattagtgtaatttaatattaaattttatttactttaattaatttaataaagattatagaaaatctttaatcaattatagaatgtcattggttttaggtacctttatgtaggaatgcttatttaattctatcaccaagtataccaaactttatagtatacttttacatatggctgttcaaaaaaattaacaaattgttcaatttgaataaaccgctcaaactaaaccgaataaaccgataaaaaatacaacccgaataacttt

SEQ ID NO: 132685 - DNA, 903 bp, Cannabis sativa
taatgtgtggttcttcagtctgaccgacttgacagacaacctctctaagtctagctaactcgagttcttctcccaagtccacatgaggctcactcaagatcttcagtttgcccgtgggtcgctccacgtttgccatttcttcagtacgaggttccagtggagggtcgtccgtgagtgacagaggttggacattaagaccaacagggtgtgcagtgtccacctgaccagtcatggtggctaggtttatgatttcttccaagatggtagggttggccacatcctttcgcttcatggagattccaattgttgctagaacgtagacatcaggattagccgccatagggtcttaaggaagacccaatgaggcagaagttatagctggagttctccttgtgttaactacggtgtttgatcaaataaaatgacaactcgctctcaatcaaagcaccaaactactgtatgttgtgaaaattacatatgcaagtgcacgcaatcgtcaacaagtaataaagtgataaatcgagtatcgtctccacagtgattgaaaattggaaattaatttataaaactaattactcacaaattggtttcaacaaaaaataaaataaagtgatgagaatatgtaaaaaattaacgaacacaaactatgaagaaaacaagctaaaattattgaattggactaaaaattcaatgttgatataatggtacaaataattattattgtgaattgataatgtcaactaggaatttaaaatgtcataatcctttttccaaagtgtttatgatgttattctctaattcatttacatattcctatgcccaattaattttaagaatatcaatttaagcacaattccttcaagtcatacaaggtaaataatatattcctatgccatttacaaa

SEQ ID NO: 132686 - DNA, 1106 bp, Cannabis sativa
gttgtataaaaattcaatcttagacttcgcttgaaaagatcaaagggaaagcatcacggagggtaggataaacctcaagcagtccttccaagccgggaaggagagctgaagacgtgtcgcactcccaatgatttttcttgcacaaacttgcaggcgggagtcatgttgaatttttatgtaacaagctttagcttttaggaagaaaggttgaagttgtataacaattcaagcttagacttcgcttgaaatgatcaatgggaaagcattatggtgagtaggatagacttcaagtagtacttccaatctgggaaggagggttgaagacgtattacaccctcagtgatctttcttgtacaaacgtgcatgcgagagtcatgttgaatttttatgtaacaagcttcgacttccgggagggaaggctgaagctgtataaaaattcaagcttagactttaccttaaaagatcaatcggaaagaatcacgaggagtaggatagactttgagcagtccttccaatccgggaaggagggttgaagacgtatagcaccctcagtgatctttcttgtacagacatgcatgcaagagtcatgttgaatttttatgtaacaagcttcggcttccggtaaggaaggctaaagttgtataaaatctcaagcttagacttcgcttgaaaagatcaatgagaaagcatcacagggagtaggatagacttcaagcaatccttctaatctcggaaggagggttgaagatgtatcacacccccagcgatctttcttgcacaaacatgcatacgagagtcatgttgaatttttatgtaacaagattcgacttccgggaaggaaggctgaagttgtataaaaattcaagcttagactttgcttgaaaagatcaatgggaaagcatcacgaggagtagcatagactttaagcagtccttccagtccgttaaggagacttgaaggcgtatcacacctccagtgatctttcttgcacaaacatgcatgcgagagccatgttgaatttttatgtaataaggttcaggttccgggaaggaaggctaaagttgtataaaaattcaagcttagacttcacttaaaaagatcaaagg

SEQ ID NO: 132687 - DNA, 670 bp, Cannabis sativa
attacaatctgtgaatgtgaaagtacaataacagaacaaaatcatatccctataaatatataatgatgaaaagaaagtaaataacaacttttataccaaaattaattattggagatgcttcaattgccatgatcatatgtatatatagaacacttgagtattacttattcataataaataaatttaattataaatattaatattaaattattaaattttaatttaataacgaataataaaagtcaaatttaaatttttatacttaattgaaaaaaataaacatattttttttacataatatcaaaaatatatttatatacaaaatatttaagtcaaatttaatattttattaacaaaaatattttttaaattttttagtcaatggaacaactctcgctcatatacgcttcatgctttgctaccacaaaatttagtctaagagcaatacaactcaactcatcagatactccaagattcggtttgttcaactttgctagaatgatattccttaaccacccgatgaatgtttgacgatgttcgtctacaacctatttttgtttatttttatgatatctttgaaccattgattgtaataactctatgtgatcagtgaaaaatatgtaatattaattaagttattgttcatcgtgactaattaaaggttaatcaa

SEQ ID NO: 132688 - DNA, 886 bp, Cannabis sativa
  modified_base (653)..(659): a, c, t, g, unknown or other
aatcccataaaattcttcgggtccatttcagcaagtttgccaatgtgattccccacattcttcaaattccgtttcgtcatataactcgtctgtaaatcatggacctgaacccacaagtctatagtatctaacgagaccgtttgtggatttttcccttccttcagcctcttcataatcaacactttacgattgaacgtccatggtctgccttccaatacgcgactaatatatatttcatggtaaaattgaaataagtaatgaaccccaccatcgagttccttgatatacactcccatgcctggtttccaaagtgcagccaaagtttgttgcatagatcggaaatcgactaccccattagtgagaaaacgtccgaccaagcaccaacgagcatcaaacacaacagtctcttcttcctgtatttcttcacaaaaaacaccactttcaacttcatcatcaagtgtaatgttctgatccaaatcctccctatcgttactggtagacgccatatgaccaaaacacacactagacaataacaaccttaaacttatagatctgagaaagaccttcgtagactaatcatgtcaaaagacaaaacaaacacattgttagaggattttgttcttgttaaataattttttaatcacaaaataaannnnnnntttttgtttttaaaaaattaatttttcaattttaaaaacagaaaacaaaagtgtggtctttaaagtttatttttattttcattttttgattttctataagtctggtctaggtccagggttggattcgggttcaggttagaggacgagttcagtgtcaaggctctggtgaagatttaagttcgggtctagttggagtccaaaatattgattagaaaaaactgtacaat

SEQ ID NO: 132689 - DNA, 700 bp, Cannabis sativa
acaaaaacaattccctaaagatagccgatttggatgtagttgacgctgattgtgttgctccaagacactatttccaatttagtagagatcaaaatttcaatttcagctcgaaccacgggaatgttcaattcttctaccaatgcacaacaaactcgttcttaccaaatttggagaaatctttggttccttgtgcctcgaattccactcattcaactctagttgcggtggttccaaacgaccacaatttggggactactattaatgtttcgaagcagtattgtaagaaacaaattgctgtgcctgtcgatctgagtggaaataataataataataataatcaaagtattaaaagggtgaactatactaaacttttaaaggaagggtttagtctcgtatggtatggattagattctcacccgtgtgaagcatgcgagagtaacggtggacgatgtgggtttcagaataatggttttgtttgtttctatcctaacgaaactcacgatgttaatattggtaagtttcattattaatttccataatcaccattctaattttgttattagacaatgttttcagcataaaattagtttacatttaaggggataatgtttaggcacagttcttatatattatatattaaatttaagggcattttacaatattgtatacattatattaattaattacaaaatatgtgcaa

SEQ ID NO: 132690 - DNA, 638 bp, Cannabis sativa
cctttataaagagatattataaaatcacccaaaaatatatttcattttttttaaatgaaattcatcttcattgaaagagtgctaatctttcttttcactcaaaagaatagtagaaagttcaaaagagacatcacttcccttaacatacgactaacataataatgacattgtttcgcaaaaaaaaattcttaactcaattagcaaactattgaacaaaatataatgcaaaacattaacaccatgtaaaaatcacaataaacttttacaattttcaaccactaaacaaaacaaaaaaacattataaaaaaactaagaagagcatgaattcaaaatttttgatgcgtttagtaatactttttttatcaattttttatttttaaaattaaaaaagtgaaaatattttctaaaatcatgttttttaaaattatttttacttttcaattttttagttaagaatctaaattttaaaaacaaaaaaaatgcactttcaaaaaaaattttaacaattttttttaattaatattttaaattccgaccccaacttacaccttgaaaattgaactttggcatggccctagacttggacccaccccagtcccgatgttagaaccgacttcagactcgacttaaataaaatc

SEQ ID NO: 132691 - DNA, 552 bp, Cannabis sativa
ataatttactaaatactcagtttagttttttttaccagcctaaaactgttttttctcacagccacagttactttttcctacaccaatatccaattagctcttatatggataccaaaatttctctaaataaaatataagagacttaatattaaattacataaaaaattatattaatttatataaaatattaatttataaaaatttgatgtggacatattaacttattgggtctagataggggtgaatccaattaaatcgatctaatctaatttaattgcaaaagattacatatctaattacaattggattggattgaaatatctaatcttatttaatttttaagtatttttctacatatatttatgttaatgttaaaatttaagtgtggaattagatatttaattaaaaaatctatctaatagtaattagaatagatagaataattttttaaatttaattactaatttaattaaattagattaaattaaattagatgataaaaaaataattaaattggattggatgagtaaactcttcccctcctggccttaa

SEQ ID NO: 132692 - DNA, 606 bp, Cannabis sativa
  modified_base (33)..(34): a, c, t, g, unknown or other
  modified_base (60)..(71): a, c, t, g, unknown or other
actttatatttgtttatttacattgttttagannttcatattaggatgttaaacaacatnnnnnnnnnnnnatctagatccttgtaaaataattccaacaggccgagtgaccctgggggcactctttggccaagccatcttcctaatcagcgttggctgagcgactctagggtcactctctagctaagccatctttgtaaccgactttggttgagaaactctaaggatcactctttggcgaagccatttttcgctgtggtagacaggcatatactttgggggagttttggctctttgagtagtctcgctcttattgtaaatctatccttttgcttggatgggagggagctttatagaacttgaacatgctaccctcttgattgaaaaatgtttgcttactcctgagaggcgtccctctcgattcagcgttatgccatgggtgtctttcaagacctcttgcaactatgtaacttttgttgggagaagtatgagcatttctctcatcggctgagggtagctagtccatgtcaatttgaaaaatgtccccatttctctttttttttggtgcccccaagtgtccaacgtcatccatcttgactcggaggc

SEQ ID NO: 132693 - DNA, 590 bp, Cannabis sativa
  modified_base (538)..(543): a, c, t, g, unknown or other
tataaaattagaggtaaatttaattaattgattaataaaagtggtatttttcaacttaccccaaataataatgtggtgttgtaattgtaaataactcctctagggtttttgacactttacgaaactgagttaggagaaaaaaatataaatttgggcataattgatatgatacaaaaaatatatgattaagcattatacgatatgacaagattaaatatgtattgaatatataattataaataaattaaaataacaataaaactcaaggaattacatattaattttgtagctagaatgtaacttaaaataaaattttgagtttttattagtttaattattaaaattgtaataattttagtgatttttttttatttgattgttgcataatattattgaaaattataccaaactaactggaattattataaaatatacatatattttagtaactactagatgacagttacgtggctattagtcttattttaagttctaatggtttttgtttaagaatttagtgactaattgtaaattatgnnnnnnacgatatgttttataaaactaattattaagaatgtcataattgtgta

SEQ ID NO: 132694 - DNA, 533 bp, Cannabis sativa
gaattcaaccccaaatcacaccaaatgctccagaacattaaaaaaagccatacatgacattatccaaccgaaaaattcatcatcaagcaactgcagcaaattttaccaagaatgacctaagtttgacctgaaaagctcaacacatgcttaagcaccacctaagccatcaaaattagcatgaattaacttaattaacaataaaataacttagcgaaagaaaccctaaataactagcccgtatagaaatcaaaaccctaaaattcaagcatgaaaccttactttgtactaaagaaaacaaagggaaaagacttaccttaactttaactatcaaacccttggattttctaagcttaattcacctcaaatctggtctgattggtagaaaaatttaagcttcccttggtcgcttttatggccgaacaagagagagagaaagaggttttgagcttgtttggctgtgttttcagtttttagtttttaaaattgtgtttttaaaagtgagaataaaaaatagttttttgtcattttaaaaa

SEQ ID NO: 132695 - DNA, 581 bp, Cannabis sativa
agctgttgtccgtcgtccaccttcttggtctttaaagcctcttctttgaatctttttataaagttctttagagtttccgtaggcaattgttttatattagttagggcattgacttcaaggttaatcttccttgttgcgaaaaactgccttcagaaattgacttgtaatttgttccaaaactccactgatcctggctccaacttcttgaaccattcctcagtagagtcactcaacgtcagtggaaagcataaacactttgtgtcattgttgaccttcatgacggtcataacccggttcaactgggacaaatgatcactggggtccgaatctctcgtgtaagttgccattttgggcatcttaaaatttgtaggaagttccacatccagtacgtgtcaggcgcattgttctcggtcctcgcaatcagggtttgaatcatcccctttttgtcttcgagagaccctagtaatgtctttgtccaatattgaaaatacagccaagattccctcgttcaatgcgcctccagagactggcaatgcgtgtttcttcttttcaagattgtttcttaagtcaccatgcttctc

SEQ ID NO: 132696 - DNA, 1369 bp, Cannabis sativa
  modified_base (297)..(298): a, c, t, g, unknown or other
  modified_base (712)..(715): a, c, t, g, unknown or other
tggacacagacccggacccggaaccaaactcggacccagaataaaaactggaaattgtgactaggacccagacctaagacgataaccaaaccaaaaccataactcaaactcagagaaaaacctggaccgagaccttgattaggactgggacctgagacctaagacttgaacgtggactaggacttggaccgggacctggacctgacctggtcctaaaccctcaccggatcctgacactcgcaacccagacaaggatctagaccctgaaaaggacccgaacctaaacccagacaaagnnagggatcgagacctggacctgaacacggaccgcgaccaggactaaatcaagactcaagacctgaacccgaaattggaactagactaggacctaggaaccagacttggatggggcacctagaccagggacctaggccccggaacccagaccatgatgtaaattctacaattgaacctaaaccaggacctaacctggactcgggaatctgaagtccaacccagacccagacatgaaacctatcccagacctcaactaggacaggagcctggacacgaacacataccaggacaaaacccgaacccagaccgaaactcagatacagacccagaatcagacccaaacatagacctgaaccaggaccaaaaatcgaacccagaccaggatcagaacccaggacttagacccagaactaannnnagactcagattgagatcaaaacctaggactcggaccaaaaccttgacctagacccaggaccccaacccacacccaaagcctgattcggacctagactgagattttgacccaaagacaaactcgaactaggactcgaaccccgacccgaactcgaacccaaactcgaactccgaaacgcaattggaactggaactggactaggactaggaccaggacaaggactaagacacagacccgaacccaaacccaaataaaaacccagagcgagactcaaacctgaacctcaactaggacccatgcgtgaacctagaatgggacctaaaccgggacttagaccaagaatcgagatacggactgggcaacggaactaggacagggacccaagacctgaccccaaacccggacttaaatctaggaaccaactcgtgactcgacacacgaaatggaactcgaccgagacccgagatcaggatccagatctagacctggtgcttggaccgaacccgtagtgggtgtttggatctaggacctagcctcgaacttgaacctagactgggacccgaaactagacgcagacctcaacccagccctaaatcgcaacctggacccgaacccgtaccttgtgagccaaaattagaactgaaacaggaagta

SEQ ID NO: 132697 - DNA, 784 bp, Cannabis sativa
ccaaatactcggatcaccttgtctcttttccaccatccaaaaagagttccaatgacagaatttctcacgaaatatcttcacccataacttatccgcattactcaccatgtcccaagccagtttagcaacaagagccttgtttatgtcttcaaactttcggaatcccagcccccctctttgctttggctggcacaaattctcccaactagaagcagcaaaaaaattgctcttttgaagaccccctgtccaccaaaaccttctcaccatggcgtccatcttcctacatatcttcttaggaatttggaatgtggacatagagtatacgggcactgcaagggaaatagaactaatagcaaccatcctgcccgcatacgaaagagtcttcaatctccatccttcgagtctgtttttcagtttgtccacaatgaacccgaagtcattactcttgtttcttgacagggccataggatttcccaaatagaagcctccaaaattcgatttaggcatttggagaactcgttcaatatccctcttcctaacggaagaacacccagctgagaaaagaatggaagacttactcttactacacaactgtcccgaccacacctcatacttttggatacaattcttcacacaattcgcagcctgcacactaggccgaacacatatcattgtatcatcggcgaacataaggtgagagataggggtgacacccctagcaattgagatgcctttaatttctccattatcctcggcccttagaagaaggcgggataacacatca

SEQ ID NO: 132698 - DNA, 515 bp, Cannabis sativa
ttaattgttgctgaaattgtttttataccaggtactgtttcagtaaacttggcggaggctactgccttgcatttgggagttcgtctagcacacagatgggttgtttcgaaagctattgttgcttcagattatttgggaattattaatggtctgcattcgggatctgcttctttttcagattggggcatgttgggtagagagatccttgctcttaagcatcattttctttctttaaagtttacttatgttcctagagattgtaatgctgtagcaatttggagtcgaatgactcattcttcttgtatttggactgattccttgcccccttgtgctgatgcttcttttttggcagataaaccttgtgtggctgcttaataaaattattcattttcaaaagaaaaaaataataaaatatcttaaaatttattataggatattatacaagtgttattttataaacatgcaaattacttattttaaattttattatgggtattataaattatttaaaattt

SEQ ID NO: 132699 - DNA, 579 bp, Cannabis sativa
acacacatgctcttcgcagatgatagctatcttttttgtcaggcttcgattggtgcagcccaaggggttcgaaatctactttctgagtttgaacatgcatctggtcaaaaggtcaacattgccaagtcatctatatttttcaaccccaactcagatgctcaaacccgctctcatatcagtgctatccttggaatggccgaagcttcagatggtagtctatacttaggcttacccaatatcattggtcgtaacaagtcaactatctttggcttcttgaagaataaagttattgctcgccttaatagttgggatggcaagtttctctctcatgccggtaaagaaattcttctcaaaactgtcattcagtctctacctacatatgccatgagtgtctttctaattcctctaggcatctgtgaagacattgagaagcttatggcgggattttggtggaacacctcatctagtaagggtcgaggtattacttggatgtcttgagagagaatgactgtttcaaaagatgagggtggtatgggttttcgatgccttcaagagttcaaccttgctatgcttgctaaa

SEQ ID NO: 132700 - DNA, 584 bp, Cannabis sativa
taattttgatgatgcgaatacttaaattaaagttaaagttgatttattgtgaatttttagcaaaattgatatttgggtcacatagtttctgctcaaggtgttcaagcggatccaacaaaaatctcagcaatggtagattggcccattccgaagaacattaagcaattaaggggtttcttaggactcacggggtattatcgacgttttgtggctcaatatgcagcgatagcagcccccttgacagagttaccaaagaaagacaattttggttggtcatcaacagcagcatctgcctttgacagactcaagaaggccatgacagaaacaccagtgttgcagctaccaaatttctccaagacatttgttgtagaaatggatgcgtccaatgtgggcatcggcggagtactaatgcaagatgggcatccagtagctttctttagcaagaaatttggtccaaaatttgagggcacctcagcttacatacgggagttaagggcgattacagaagcagtttcgaaatggaggcagtacttactcgggagacacttcatcattcgaacggaccataagagtttaaaagaatt

SEQ ID NO: 132701 - DNA, 947 bp, Cannabis sativa
  modified_base (852)..(889): a, c, t, g, unknown or other
ggaaaagtagtttctcttcgtcacagctccagatcacctttgctcttgctccaaaacacaaccatagcttcgagttcgacgattgcatcaaacttcaggttcgccctcccctccatcccatatcacttccatttcacattaggttggtctttcttggcttgttttcgatcatttcattatgaaattcttccaaaaaattcactggcattttataaaccatttctttcaaattttgattcatttatttaagtacctaaagtgtttttctcaaacatcatcgatttccatagtatttcaatttctgataattattgataaaatttgttgattttcttcatattcattacattttataattttattattcgtattgttaaaatagtatacatgaatgatttgtttgataaatacttaattattaccctaagaaatagtttaagggaatttatgccctttttagtaacactcattaaaattatagacattcattatattatttagggatattggcggttaaatcatttgaattttacgttttgtaacatataatcacaaaaactaaaattttggtggcaaaacctactgaactcccattttgttttgttttgtacccttccgtccaaaaatcacagttaagtgccacggtggactattcacgtgtacacacttgtacacgtgggaaatttttagtagtccacgtaatattaattttaaaaaataattataaatatttaaaagaattaaaataattagaaaaaaattaaataatttttcttttttactttttttaatttaaaaaattaaaaaattattttttttttcattttctttttctttctttcttcttcttcnnnnnnnnnnnnnnnnnnnnnnnnnnnnnnnnnnnnnncttctttcttcttctttttctactaaacccatcccagaccctctctctctctctctct

SEQ ID NO: 132702 - DNA, 804 bp, Cannabis sativa
gaacatttttttaagttcatccaactgtgcctgcacaactggactaacttgttcggcctcttggccgaccagaatcgcgtcagcatctctttgagcgtggattctgggctgaatgactggtgcgttatgctggtcgtgcacctctctccttctattgagatcatcccgaagatcatgaactgtccctaaacgattaaatacgaaaacacacggctgtctcagggactggttggtttggcccatcagctggccgccaccattaacctgagtgaaagtattaggtatcacctctcctaatgaattgcaagacaaggtctaccccctaccgcttggcccacaggtgggacctgtgacaagggattggacggctgaccatttatagtctgagaggtgttcaccgctggatcttcgtctgtctcacccagggggatgacggttgtaggctgttgtccggaagcctgataggcttttcgtatcaacacagtggcctgccgggttcggtcgtcaatggttgcttgttgagcccttaacgtttccatcttcttgtctctccattcagtgaacatgcgcctttgctcttcgaatgcgagatttactgcagcatggagttcttcctgatcatgatgcaaggtgttggtatgaccttgcatgactctgagagcagcacgaattggttatgggcggaaagacagtgctaggaatgccttagttggctgctgaactggtatccctagtctcttgcacaccaggcgcgattccactcgcaggagtcgtcacactgtgacctacgatcgagggttgttt

SEQ ID NO: 132703 - DNA, 648 bp, Cannabis sativa
aaagggtgttcttaataatggggatctttttggccaataacttcttaaactagattgacttgactaatcacctattccttgtcctgcaatatttgaggattatgaaattattacattaaattatatggtgcttgactagattgctaggcaccatttggttaacgatatttcataaaagttattatattaaattatatgagattcagtatttaattgtaccaatagtaatatgaaacgttagagtgttggatagtactagtactttttagtaacgtaaatgtaaatatttttcatatcttaccaatgaaacattcatttccaatcaaaaaaggattattattggattataattagtaaattggacaatatttaaaatgtaaatttttagtaattacacttttctttttacatatttaattatattaaagcccttcaattacttctaatggcacttgttatgtaattatgcttcaaataaatatattaaattgtgtaattacatttaattatattcaaatccaattccaccacagttttctaaacgcactgttaattaatattaagtaggggtgttcacaaagtattcgatccaatccaatccacacgatccaatccaatccaatccgcaaaatgtggatatccgcactt

SEQ ID NO: 132704 - DNA, 1143 bp, Cannabis sativa
ctccacatatccatggcccgtgcagactatcaccactatgctccaacaactactaggttaaaaacctttgagaagcatatggattaccatatactctagtgaatctaaaacatacgccattagtattacgaataatagagtcaatgtggaacctcaaagacgactcaatactcacttccagtattgccttccacattaaaagtaacccacctccatctaattctatcaacagtaaataaaaaattaaatccaagattcctcaccacctcttcagcctgtctgcaagttaatttactttcagaaataaaaatcaattatgctttcaatatctcacagtgggaattaggagcaaacaatgtacaataattccccaaactttgtactttccaacataatattttcaatgttctcggtggccttggacaccaaagattgcctctttagaattaaggggaagagaagaacaattcttaagaatagaaagtaccttcagagtcacaattagcattatccatttcaaatttcaaagctccatcattagagtcgtgtaactcaaaatcacggtcatcacgattaatcctcttatcatccacaacctttatcctcaaccttcttgcttgctatttgatcgagagtttcttcttcttaccatcgtctgaaatcaactcaccttccttcattgagcttcctaccacaaaaacccctaatttctctcccatctccaatagcgggtcttctatgcacatctccatctcgcaccacctttttttttgtctctctgtggatatcaacaaatcccacaggaataacctcacctagattttgtttacctcattctaccaaaattgcaagagaagaagtcattttcttcgttgagcgagatgactgtctcttccaagttgggtcaacttgttcctgaactttcaccccaaagtaactatgtttattcttttactttggattagagagtggactattggtcttcaaggcttagaatataaattcaggcccatgagtaatattatttatatctgaaggtccatccattaaaacatctccttcatcctgtcagcccactaccacctcacaccattgaccatccttcaattctaccgtgttttctaccttcaatcttacatcatc

SEQ ID NO: 132705 - DNA, 1357 bp, Cannabis sativa
tttaaaatttttctcaaataatttttttaatcaatattttggaccgcgatcacaacttagaccttgaaaacccaactcgatcccaatcccgaacttggatccaccctggtctcgacttcggacgcgactccagacccgacttaaataaaataaaatttacagaacacatttttgttttctgtttttaaaattgaaaaataaaagtgaatatagaacatatttttgtttttcaaaatgaaattttaaaaacaaaattttacttttgttttgtaattaaaaaatttaaaaataaaagtgttaccaaacgccacctaagggtacgtttggtaacacttttttaatcagttttctatttttttaattagaaaagtgaaaatattttctaaaaatatgttttataaatttttttttacttttcaatttttaattgagaatcagttagtttttttttttaataaaaaatcacttttaaaactttttaaacaattttttttttcttaatcaatattttggacttcgacatcaacctggaccttggacacggactccagcttcggtctcagtcctggactcagacgggataagttgagaaatatctctttttgtattcattaataaaaaataccatcatattatattttattaaaatatactcacttttatgagtgagttgcccaatatacccttactctctacttaagtgtagcatataatttacattaacctaaggggtctaatggagacatcatctataaaagtgggtatattttaaagaatataaaaataaaaatgaatgtaaaaattaaaacaagtaaaataacgtaggtatacaatgtaattttctcgactgggaccatgacccagccctagccccagacgcaaacccaaacttagactcgacttaaataaaatcaaaaaataaaagttatagagcacacttttattttttatttttaaaataaaaacccaaaagtggttatagaacacatttttatttattaaaaacaaaattttaaaaacacaaattttacttttatttttgtgattaaaaaattaaaaaataaagtattactaaatgccacctaaaattttaatttatatattttaccttaaattttgacattatattgtacatcgatttttttttttttttaatttttttctttatattatttaaatattatacttcatctaataataaattataaaaaaaattgataaaacaaaataaaaatatttttaatatattttatttattttatataaataattcatacaatattacatatagggggcgtttggtatgaggtgttcaaaataatttgattacggagaatattatgaaggagaatatgat

SEQ ID NO: 132706 - DNA, 1369 bp, Cannabis sativa
ctttcctttttataaaatgggttgaaaaaagggaagctaaaaacccattttgtagtagtgattattaccgctaaaaattaaacttaactatttatttgtaaccggaagttatgccataaattgctcttaaataaaaataaatgatgtgttaattttttatcggatggacatggttttgtgataccattatttgactgaagatatatgttcattgcccctgtaaatgggacgagtgttctaaatatagaaaaaaaaaaaacaaaaaaaaacaaattatggttgtgacaaagcaacaaatgagtcacttattattatatagcttattattgaagtacgtactatatattataagctatatataggcaagctaacatacagtacgtacatatcatacatgattgtacatatatgactagtactcaaatataaatacatattgtctattcgtcaacagacattttgaggactccataaccgaaaggacgttgattgtaacagtccaagttgtccccagtgcttactcctagtataaggcagtacctttcatagaagccaatcctatctttaacagaatcattttcaccgatgccgcactccgaacctccgttgattatgttagtgatcacaccatagccgggaaatcgattagcagccacgtcagtcgctgttggtttccactcgcccacaattacggcatggggggatggtttgttgtactgtggagtcatccaaaaccatatagctgtctcgaatgaaacaactgcgtcagttgcaactagctctgggttttttaataggtccaatccgagtgctttaccagctggtccgtaattatagttgctgattttgtcgtcacaaaagtacgtagtacgtactaaaaagtattaaaacatatatataaatagtactccataaataacatgcatgcatggtatatatatatataaatatacatatgtatgtattatgtaaaacttgatgacttactagctgatctggatgggtccacgaccatagtagaattggccaggaacacagggccattctaggctgttgatgcaatggtcagatcgatcaagtagttctctgatatagcaatatcccaagtcatatggtccttttgacgatcctcctgtgattcacaaacaaatcatcaacaaatctttataggaaaattatattacctgtatggaattctctgttttttaagtggaaaaattataactcagctatatctataatctgatgctgcagttagactaaaattatagtgggtttatctaacttaaatcacatttcatgtataaattaaccaatatatatatacctgtggtgtcgtgagaagtttggccaaagaacgcagctagtt

SEQ ID NO: 132707 - DNA, 529 bp, Cannabis sativa
  modified_base (407)..(425): a, c, t, g, unknown or other
atttaaaaattatttttagtttttcaaaatagaacaactataaaaaactaatagaggtagttttgccaaattttataaaaattagaaaatagaaaacattaaaatgttattttctattttcaaaaattatttttttatttaacatattatattttacatttttgctcacatgcatactcggaccccagacctggaccccaaatccaaactcgaacctagaccccgaatccaaactcagacctggaccccgaatctagactcgaaccccaaacccaaaccacgaacttgacccgaaccccaaacttagacccgtatcctagaaccagactcaaacctcgaatccagacccagacccgaaccccaactcagactccagacccggaccctatgttgggttttgtgccctnnnnnnnnnnnnnnnnnnnctgattagttatcaatttagaattatgaagtgatttatgttaacatgtattttacatgtttatggtttaatatatgcacaaaatcagttaaatccataacatat

SEQ ID NO: 132708 - DNA, 507 bp, Cannabis sativa
aaaacgttttttgaaacaacaccctctttaataatagagcccacatttggcccaaactcgtccccctcatgtacaataccctcagcccccatacgcctcctcttactgtcataaatcaggagagaatcttcctcattacacacctcctcgtcacctacagccacactaatttgtctcctcccactatcttgggtaatcactacacctttctctctcccatcaactcctttattgctacctgaaatcatgagattatgataacctctggattcaatcctatcaatatccatgattttaggattcaccataactccaccaccatcatcagaattttttgaaccgccaccaccaccatcaacaccaccgtcctcctcccttcccgttctaagccattgagcaccaatcaaataggtcttcttcttcaattgagctttcatcccaatcccataaggctttaccatttgttccaacggctggtcaaacctccttggacaaaatctttcagaa

SEQ ID NO: 132709 - DNA, 985 bp, Cannabis sativa
  modified_base (694)..(695): a, c, t, g, unknown or other
agtggaaactggaaacaagaatcaaacacttgatatttctcatcaatatgatctcaactttaaaaaataattaattttgtaaatatacaacaacttcaatagtttttttttgtttttttttttgattttggtgtttggttgattttgtttagcttgataattttttaattgaagttttattttgattttctgatatttttcaagtggaattttagtgttacatgttaaaattttagcattgttggttgactcaattgggctcatctgcctggccttccaatttatacagtttattcagatttgttaactttggtgatggctagcaacaatgggatgatgtattttaatgagttagaagcattgtttgaaaatgttatagttttattgtttaaattttcgggggcagttttgtcctatgtggctcgctttgagaatttagcagtccatagtttggcaaagcatgctctgcgattagacgatgagctatcctgattcgaggaggttccaacgacagtggcagacgtctgcgtcgtaaattcatgagtaattctaatcaattcgtcaaaaaaaaaaaacaaatgtatcaatcatatattttacattaactgggcactagatttttaaaggtagctttttacgattgattatcgatattctttaaaaataaattttttaaattatatgagacctgatnnttaattacactaataataatacgacactaagaaaaattccctttttatatttcatctcaaatttaaacccacattaacttctctatattaatatgagagacaaagaaattaaaaatgtatataagtaaaatagttgtttaagtcttccctacatttatgacattagtgtcgtagtaagtagtaaaagaaattacacaggagttgttgagatctctttttaagattaattctccacaaaaaaataaacaaataaattgaagtttgttataaatattaataattatgtggat

SEQ ID NO: 132710 - DNA, 843 bp, Cannabis sativa
taatttttgtccttgtccaagacattttccagctagttaatttgttggtaaaagtgagttatgttgacaaaactaacttgaaaaaagttggcacgtcatttcccacaagatgaaaacgtgtgtaaaatgtaggtagaaaaataattttttcggcataattaagctcgccaacaaaatattttttccttaaatgaaatggttcgtttctttatttattttcttttaaaagctttgtcggtgagcttaattgtgcccgtaaaacgtggtaatgaggtgattaaattctcttcttcttctgcccccaatgccccgaactccattaccacgacgtccacaatctccaatcacctctaccacctccctctcccatctccaccactacccatctctctcttccctttaggtttcttctttaaaaaaattaaaatccacccattatgctctcatcggagcctccaaagccatcgaagttacctttccatctctaatttaagataatttgaatttgaattttaatgttatatacatatttgtatttgtattttttaatttagataggtatggatgtatgtgcatttgtatatgtatgtttgtatggatacgtgtgtacattatgagtatgttgtttgtatatatatatgtgtatatatatatgtatgtacatatatatatgtgtgtatatatgggtatgtatgcatatgtatgtgcagtggcagagacaaacggggtcatgtcggggcacatgaccccactcaacttctattttatatatatatatatatatatatatatatgtaatctataacttatataaaagtgtgaatgtctttgggcgcctttagt

SEQ ID NO: 132711 - DNA, 1182 bp, Cannabis sativa
  modified_base (937)..(951): a, c, t, g, unknown or other
agagagagagagagagagctatatgtgtatgctttattttcttaatgtttatcctaattcattaacttgagcttaaataaactaaataaatttatttacaatcccactataagacaaatttaaaacctcttgggtaattccaaaattgtctcttacttaaaggttaagaaaccctaagacttaggagtaaaatggctcaaaaaaataatcccgcctaaacccaatattctaaatataaataatgacggacacacttgataaaaggttctaaactaacctatgtgactctatcggccatccgtcgcatttttcatcgctaccgagcaaaaattataaaaaaaataaatttcacatatgacatatataatacctctagagtttaataaaatctccaaaattaagaaattataaccctaatacttatttcttaaaaatagggtccacaacatatataataaagtataatcatcaaatattctaagtatgcggtcattagatatttcatcccaatagatatgtgatctacattttttaccataaagtatttcatagagagtcataccgatagttgactagtagttatcccatactaagctttttttctaattatatatatggagaaagttttaatggttacatcaaatatataaccataatggttacatttattttaattgttggatcattgttaaacggttatgattaatttagaaattaaataaaaataattaataaattagctgcaacctgatactaactttattttatttatttatttataaataaaaaataaaaaatatttataaacattagttgtgaaaaatgtcttattaaatattttaattaaaaaattaatttattttaagtatataattaagggtaaatactattttagatcctatattttacaaaagttaccaattagaccctctatttnnnnnnnnnnnnnnntagaccctatattttctaaaattgaataaataggaccctgaactgattttttgtgaaaataaaacttaataataatttgatctagagatcttatgacaaaaatagttatattttctgtatctgttcgtgttagaaagtatcttaaagttatttataataaaaaataaaattgttaaaaaattgagctcagggtcctatttttaccattttgaaaaatacagggtctatttt

SEQ ID NO: 132712 - DNA, 816 bp, Cannabis sativa
attttcagagctcgaattgtgtctattggatcgttttcgggtaatttgtggaaaaaatcgcacttatcttgggggcaaattcgaacatgaaatcttcagaattctgatatgtgtgaaagaaatgacttaaaagaaatttgaaagatttttaaaacgcaagtgaaatcttttaatcggatcaatattaaagaaattatggttgttactaaaagttgttcaagacccagcgcccaaattaacatattgacgttaatttggatgttgtgtgactgaaagaacgtcccaagcatgtattttttttatgcctaaatgatattttgacatcacttagccaatttctttgttctggtgaagttgttcaccagttcttgaaggttactgtttcgtagaatcgggagactcgaaactacccgatttgctagtaagtcactttgcaaaaaaagtgaaaatatgaaattgtggatgtgacttgtttgagttcataggtctcatttacaatgaaaaactatacgaacgcttgagacaaaattagaatcgaataagcagttttagagcttctggaatgtcattttgatactttcaaggttcttgaaattgagtacgaggttttctaccctatttttgaccatgtcgaagagaatgtttggagcagaatttgcatttggatgatcgaaaccaatgcactaggacaacctgagcactgggcttagatttttgaccttcgagattcttattttcttcctgagtttgcttgtatcttcgttaattttgatgaaggaaaaaaattctcgaaacacttttttcaaaaatatgatt

SEQ ID NO: 132713 - DNA, 782 bp, Cannabis sativa
gggcataaaacccaacacgggtgtattttgaaaaattggaaaaaccacatgtgcagattggtttaaaaaaatggtcagaaactgcaccacccacaccgcgaacacccctaagagatactgtatacctaacacatttatcttgtgttaggatattaactaatgcctacatccgatcctagacaattgtgttggtgaatatcgttgactaacgccaaaagcccttttggtgtagtgagtgatctcagactaatctggtacaattcaagaattcaagtgacaaatgttagaaaatcataaaatgccaggataagaaattgtatataatttagacacaatgataaattcaataatatacaaaacttacttgactagttcataacaataacaaagatttgatagtgcaatgctaacaagctagatgattttcctccttaggtctctaagactaaagcagatcaattgatcacaaaagtatacaattgtaataagacaatatttattataaaattagggaggggacctaacaacaaaattctagttggattggacctcctcatcatcaaggcttcattaactaaaaaatctcacacttctactttaactagatcagtctattaattatagatcactaactctatgtgctaaaataataataataataaaaaaaactattcatcaacccatattttaataaaataattacaacattaatgtaccgctaaaataaaatttttacgaaaattataaatataaattataaatccaggttcagatcttgataa

SEQ ID NO: 132714 - DNA, 991 bp, Cannabis sativa
tttgagtgtagcgtaatggtattttataatgaaattcttttatttttaaagaaaggtaaaataaataataattatataataatattaataaatgtaacaatactatttatcccattaaatttgttatcataatcatttgattatttatttatttattattatttgtaaaggatcatttgattatctgtaaaggagaaatattgtgtgacatatattggtacattgtaatattattaagtgttataaaatatatatatatatatatatatatattttgagatattaagtgttatattttttaatttaataaataatataaaaaagttacttaccaattatatataaggtattccatcactatagtgttaaaataccaaatagcaatgatctcaacaaagatgtcctataccttatttaataaataataattattggtttagtgggtgctacaacttaataatgcatataatatagatggtggtgtttattttttaaagatgaaatgagttaatatgaacacaataatcttaatttatttttctaaatattttagccaattaattaattaataaagcaagaagatttgatatcgatacatgcatgcagcctttgaacctagacgaattgaaactatgaacgaaaactagtggccttggatttatggtttaatttgatgagtaattaatttgacttagtaactaattaagcaatatataaagggagcttttatagttcacttcacccaccaaaaattggtgtattaatacacctttttcatgagcattgttattagtgttcagtactttttagaagtacgtagataattagtgagcgatattctttgaaaaatattatttcaaattatatgatttctgatacttaatcgtactaacaactagggctgttcatcagattcaatccgcacttttttggtcaaacaacatccaatccgtactaagtgcagatttcattttttggatccaatccaatc

SEQ ID NO: 132715 - DNA, 961 bp, Cannabis sativa
tgttacagatccgcttgcagcaggcagatcacttgagaaagctaatgaacttgatttggagattcaccttagctccacatctaggaaggaggactcgtggggtaaaggtgcaacgacacgtaatctccaaatcaactactaatgcacaggtttctagatctacaatgaataatcaaaatggcaacaactcattttatcagcatactgaaaattcttcctcacatagccagcctgtaacaggtggctcctcatctggtgtaccaagtaataccatcgatgaatttatggatgacattggtgaccaatcgcatcaggagattgtgatggaacaggaagagttgagtgactccgatgaagaaaatgaagaaaatgttgaatttgagtgtgaggagatgactgactctgaaggagatgaaggatccggctgtgaggaaaccactgaaatacagaatgaggtaatatagaagttatgtgtttagtttttcggccatttttgtatgttaagaaatgctttgtgtatactggctattcagacttttgtttcttccaaattgaaaggcaatatttggaagtaaaatattttttttttcttctgtagattgattgtgaattcaacgaaatattatctcagctacattacatttcaaccctactgttttcaaagtttgtggccatttggtctgctatgctgttatttttgcgtagtccaagttttgatacatccgtttttgacactattttcttttgttaacaggaggggcctggttttgctacagaaaatgctaccacaacagattttgatgaaaggaattgtgaaccaatatccaactttcattcccaaagcaatcttcaaattccaggaaagaacattccctcattagagttaggtttgacaagtgaggggaatgatgataatagcaggtcttcatggttgagtttagatccaggtgcaccacattgt

SEQ ID NO: 132716 - DNA, 559 bp, Cannabis sativa
tatactaaattaatgatacgtgcaatatatacatttgtttagttttttttattttttaaaaaaaaaaaagaaaataaagttcatatgtaagttgaaaataaataatgtttaatctagagtattaacatagaaaatgtaatagtaatttcaaaaagaaatttaagttatatattatgtaatatatagagaaataaaaatcaaactcaaaatattagtaaaatatattaaaagcaattgaaagcaatgtaaagttttaatagttaaaaaaaacaatgtcttaagttttgataatttaaagaaaatactaagtaaagttttgaacaagaaaaaaattgtttaaaattttgaaaattaaagagaaagacttcataaaatttttaaagaaaggaaaactaaaggaaaacattattgaagtctttttttctaatcctctatcgcctcactgcaaatacaatagcgaagtgtttgtatcgcttgaatgttgagaatattctaccaggatctagatttactaataagtatgttgtttaacatcttaaatatggatatctctataaca

SEQ ID NO: 132717 - DNA, 1997 bp, Cannabis sativa
  modified_base (29)..(43): a, c, t, g, unknown or other
  modified_base (70)..(84): a, c, t, g, unknown or other
gttgatgttgtttgttaatattaaaatannnnnnnnnnnnnnntaaaatataaattattttttttttaannnnnnnnnnnnnnnaataattatttattttattataatgtttactttaatcttttttatttttttaatatgtaataaataagtaaatatgattttagtacaaaaaaaattattatagtcttttaattaaaacaactttttttaaaagttgggttggagcaatttcagtttttagttgtagcttctctaaaaattcttcaaaaagctattttttgactgtttgccaaacacattttttcatagctttctcaaaaagcagcttttaactttttcaaaagctctgccaaacgggtcgtcttataataataactaataaataatcgtcgttttacggcagatatttatttatttttattaaattatatatatgatataaattgtgtattttattaaataataactatacaataaaagttgtatcaaattttaacattattgatagggctgagcatgggttgggttggccggattgagagtattttaagggaaatttacaaaaatactcaaatttgggttaacttttacaaaaatactgtcacacaaaaaagttttaaaaatattgtgtttttataaaacatcagtagaacacaaaacagaacaactaaaaaataccagtagaacaccagtaaaaacttaacacagtatactacagaatgaaacttataaaaaaacacagtaaaaagtaaaaaataccgtctggcagtatttttgtaaaaaaatggcaaaagttagtatactatgtaaattttcctattttaatgacccaacccaatgacatcggcctagaaattttcaactcattcacatcctaaattttttataacccaacccattttttcttttacgggttgggttgggttgggttataacccttatcccataattaaaaaaaatcagatttcaacattatcaaaatcatatataaattaaaagaaaaattaaaaattctaacataaacatatccatccaaaattacaaatcattcaagatcaaatattacagttatctatcatctaaaatctgaaaactattaagattgtccaaaacaaactcaaacaaaataaaatcagtttagatatcagcctcactcaataatctcattgtcaattgttgatgatttcttgaccttagattttttgttctgcaattataagaacacagtgttagtcaaattattatgaataaaaaaacataataattattataaataaataaagaaaaacataataattaaaaaaaaaaaaaacatattcaatattcatcaaggaaatgaaaaaaaaaaacagattataataataatagcaactaataaaaaatttgtttgctatatactaaagatcatagtaaaaaataatagtataaaaaataaccaaatccatgaaatcacaaatagaaaaaaacagtacaaaagaaaaaattataatacatttatttgcaactaccaaaatttttacgctaattgctatatgctcaaaatcatagcaaaaaataaccaacgaactccaatgtctggccaaccatgaagattcttaccaaatagaaaaaaatgagctccggttccttcaacacgaaaaaaaaagaaagaaaagagaagacaaaagaaaacttacttgctgttatctccgacaaggcaagcaacgatgtggtcgtttgtgtgtgcgaatagggccactagagatggcggaagggtggaggatcggagccgtttgggaatggaatcacaatcacaactagtttctttttttttttgtaagaaagaataggggcagcagtgtgctagggttttctcatgtatgtatgacatatgaatattagagaggggagatagtagtgcttatttaggccttagggtttgaactgattttgttaattccatttttggcatattcaattgacaaaaatattttattattctttgtatatttcgg

SEQ ID NO: 132718 - DNA, 787 bp, Cannabis sativa
aataattattctgtgcttgaccaaagtgataattgtgtaatgaaataatttagatctgtttgatgattgttatacttctcactcatttttttacttgtcatattgcatgcgatggtattagtgttgtatatatttttaaaaattctgctcaacattaattcccaaacaaaatatattgatattagacatcattttatcaaggaacttgttgacaatcaaaaattttaattggaatatattgatattgaaaagaaattgataaaaattcaagcctctttgtgtcccttagaaaatttttggtgctttgtattgtctaatttttcttttgttttctattttgtaaaatttttgagttgttgttttcttacatttatcttttttacattgttagttgacaaaatatgtttatacttttaagtgataattagcttagtgttttgtacatattatacttttgagattaagttaaaagattcaagttacttgcatatactgagataaattaaattatcaatgtacaaagttgagcaatttttgtttcagttacttgttaggccctttgctggaatatagctacttatactgaagtgtgaaagtcatcttttgagtaagctgaaactttgtaattaattagaagttatgaatacaatgcactaccatgaaaaaaggctagctacattcggtatggtgtgacaacatccagctgcgggaccactttaaaaaagacaaaaaataaaaatcatgccaagaacaatgatcttatttttcactgcacacattaatgtct

SEQ ID NO: 132719 - DNA, 1134 bp, Cannabis sativa
tcagactgggttgatgtttgatcttcatcaccatgtcaaaaaagtgcagaaagacacgaagaacagagtatcagagaactgagaacgatactcttcaccgaagaaggtgatcggaaggaagggcatcaagatcgattgaggaaagcacctctttctcgttctgataccatattacaaaaaggaaagaagagaaatagtgtttattcattaaatgaaaagtcaagaaccagtacagtatatatagcttcaaggaaactaagacacacaatggtcgagtaacagaagaccgttatatgtcaggctttgctttgtatatgacatgtcaattcagttgataagttcaacaatgtgcttgcgttgtgaaagataaagccctctgtcatctctaaatactttagtgcccagaaagtaatgaagagatcaaagatccttcagtgaaaaggacttgttaggttgtattatgaactagtcgacatgtttagagctatttcctgtaactattatatcatccacgtatataagtacaataacgacatggttttggtacttcaacatgaacaatgaagagtcagccttggaattttcaaaattctatttcttagagttgtttggagttgctcataccagtcccttggggcttgtttgagtccgtacatggattttctcagtttgcatacataatgtggattttcatgatcctcaaagctttgtggttgaaccatatgaacatcatcatccatcgttccattgagaaatgcattattaatgtcaagttgacgtgtttcccaactcgttcacacttttaaagttagcacaactctcactgtgtggatgctttaaccacaggactaaaggtttccccaaaatctactctaggtttttgatggaaacttttagctagtaagcaagctttgaagcgttgataggaaccgtacgcattgtacttaattttatacacccatttattgcccaccacattggaataaagagaaagaggaactaaataccatgtcttgttccattttaaggctacaatttcatctaacatagctatattctacccctcatggttgagtgcttcctacacagaatgggtgtaacaccctaactactttaggcgtattacgtgatttt

SEQ ID NO: 132720 - DNA, 537 bp, Cannabis sativa
  modified_base (467)..(469): a, c, t, g, unknown or other
  modified_base (500)..(505): a, c, t, g, unknown or other
aaaaatattaatacaattaaaaaaaggctagcaaatgaaaagaataatattattgatacaattaatttaaattaatttaaatcaatttattaaaaaaataataactaaatctttatatattaaaagtggctatctaacgacatttttttagtttaacgattttttttaacgttatatttttttagaagaaaaatagacggatcattaacatgaaacgttaactatccgtttatttctacgttttacaccagttacttcactcaatcccagtcccaatcgcataacaatcgcagaaatttcagttcttttctatattttcaattgcagagtttcactctcaatccctatcccaaaaaaaaaaacccaaatcccaattttaatgagaaagaaccatttgtcttcatcgcccctccttccaacagcaatggtcagaaattgcttctcatttattgtaaagaccgcttagnnnaatttagaaattagcagttaatcacgtttannnnnnaaattatttatagctatttatataatttatta

SEQ ID NO: 132721 - DNA, 564 bp, Cannabis sativa
  modified_base (73)..(85): a, c, t, g, unknown or other
  modified_base (498)..(524): a, c, t, g, unknown or other
tttctcataccttttatgtgtttactttatatcgttttagaagttcatgtttaggatgttaaaaacatacttnnnnnnnnnnnnngatcttggtaaaatatattccaactggtatacccccaataaatgcaatacaccgagctcacagactctcgagaacgtgtgtattttgcgacttggtaaaatacgcattaccagaaacctcctcccttgtagatagacagctcgcggagagatcctagcaaaaggtgtgactatcacaacaacatttgtcataccacgaacgaatgcaaaaatttaaagcatgaaattgaaagtctaatccgattgggccacttgtacaagtggatcaaaaataggttgccacacctaaattcggcccaagtcggagtcctagtgcctcaaggaggacctctgataacactagagggccgggtacctcctggagggatgacccatcagcaggctgttggaaattttttaccaggatcttagatnnnnnnnnnnnnnnnnnnnnnnnnnnnctaaatatgaactttcaaaaacgataaaataaacacatat

SEQ ID NO: 132722 - DNA, 623 bp, Cannabis sativa
gagcagtgagttggagcttagcagtgattgtacatatcgcggcagtgcagcctggagggtttcggtctttcaacattttgagttgtattttacggttacctgttgtttaaaaaaaaatttatatgaaactttatgtgtggtaaatgttcttttcaactaccttttaaaactcgagatcccaacctataaggttatataattataataaaattaattttggtttagcaaagttttaaatacgggcgttacagacctctcctaggatgttaggcccccgacgttatttctttcatgtcacgtgttaaaaatagtgtcctcgtcattaagccaactttttgggtaaaaaatttcccccaagtcagtattttctgctggtatactgttgaattgcagacgttaacattgcctacttgttatcacgaagtaacctgattggcattattttttacactagctgcctctagcttaggctcctctgcatcttaactcaattccataacctcaaatcgggggtcaaaatcttccccatgttagatgtgttgggttttatgccctaaataaaattctatttcaatgtaatctttatcctttaaatatcacaaaagaaacagaagtatttttca

SEQ ID NO: 132723 - DNA, 610 bp, Cannabis sativa
tgggggatgtatattagagaaaataaagtatcgagttggagcgagattatggtttttgaccattttacacctagactttattttgcctcttggtgcattttagtctttttgtcaaggagtgttggtgcctgccttgggtgttgacagctgccctttttgatggttagtgagtgcattatgtttaaaatcaagaaaatatgaaattaaagagaaaaatccaaaattgaagaactcattcttttctctctctttcttttggttcgactcccacacatcagaagaaatcaaccctagttgctgtaattttgcttgaattcagcaaggattcaaggtattgaaggtgaaggtagacctagaaacctttacctcttgattttctaagtttttaagttgaattttaggctaagtgttgatgattagttgctgtggaagttaggattgttgtgtgtttggtttatgatgtttattaatgatgatttaggtataaatttgctggttttatagtttaattcttaggttgagcaagtttgagttctaagaactcaaacttggctcaacaatggcatgttttgattttatgggttttgttgagttctgttggttgaaaatt

SEQ ID NO: 132724 - DNA, 722 bp, Cannabis sativa
  modified_base (346)..(349): a, c, t, g, unknown or other
  modified_base (677)..(696): a, c, t, g, unknown or other
agtcatcagtccataaagctgctaaagtggcgtactcgtgtataagagtcattagttcgtgggtgtaagggtccaatgaaggcttgaagcggggacgttacatcgttaatgattctaaacttaaacaacttgtctcttgtgcgcaaccttctttgaactgctagccacatagtaaaattatgtttagaaatgttattttagattctatatttttaaattttagtgtgatacgaaatacaaactgatgttatgaagtcttattaagagattatttcacaaatacacataaacaaccaaaaaattataaaaaataagtttcaagaaattttaaatatttttacgattnnnntaattttatttacagaaaatacggtctttttatattgtactcttattaatttattgttgattttttgttattttttgttgttattttgatgttattaagatgctatttttatattacttttatgtagtttttttgttattttcatgctgtttttataaaaaaactgtaaaaatatataaaaaaaatatttaaacgtaaatataattttttttttttacaaaaaatagtgcctgtaattatcttttttacgcacaatattatatcacctttttttgtacacaatatatctaaagggaaacttatgcttttatatatatatatttatatnnnnnnnnnnnnnnnnnnnntatctaacggcatttcttggtttaac

SEQ ID NO: 132725 - DNA, 771 bp, Cannabis sativa
ggggggggggggtattgagtctgggtctcgtcggagtccaaactagtgattaagaaaaaaaaaactgtttaaaaaaatatttaaagtgatttttttaaaaaaaaaaattgattctctattaaaaaattgaaaaagtgtaaacaattttataaaacatggttttaaagaatatttttattttttcaattttaaaaataaaaaattaattaaggtgttaccaaacgtcactttaatttatagttgtctttttaaatccatagttatgtaacattaaatacaaacataattaagttgagatatgtaaaatgatggttaaaatgtagaaaaagtattgtttctaaaacttacaatgtatagtgtggattaaacttttaattgcaataatctttttcttgaattaaggaatttgctttcaaaataattaaaaaaaaaaataatcataatgtatatattaactttattatttttattaaagatttgttatgatattcttaatgttgtatttattaatttacttgataatccacaaactttgttttggcaaaagaaattaaaatttacttgattgttcattgcaagaggtatgtatattgacttatttattttgtttaataatattaatgtaaattttagaagagtttgaatattttagatattcattcatagcgaagtatgttctgagattaaatatgcactgcgacttagttcaggttttgtcccactgagttttcctgacaagatttttaaagaggcaactttaaatcatgttaa

SEQ ID NO: 132726 - DNA, 715 bp, Cannabis sativa
tacccggtgtttccccttacggatcacgggactactgactgtcatagagagagagagagagagagacgaggacgatggtcgtggtggtggaccagcgtcgacgatggatgggctcgtggaccgttgtctacgagaaagagaaatgaggacagagtggctcatatggtggttcagtcacagacagagggtagaacgagaagagagagcgagagacgtttgaatgagatctgagcaagattaggggttttatattaataggggaatccttaaaagttttaaatcgtcgggatgccctttaaaacctcatttcttttttttgttttgtaagtcttttattaaactatcgaaaaaagtacacaagtgtttaaaattgtgggaataatctactatagctataactgacagttttaaacactcaatcaattttatatgcaactttcaaaagaattgaaataaaaatgcatacaaattaaaagttcaattgtaaaattcataagtagttgagtaataagataatattagcaatctctgtaattattaagataaagattagaaaagtttgcaactataaatttaaataattgttgagttgattgagtataaccgactcatattattttttggctaattagtaatatttcccctgaactttgacatgtagtaaatcgtgtcccctaaatttttttggccattaaaaattcccacgaactattga

SEQ ID NO: 132727 - DNA, 748 bp, Cannabis sativa
tactaacatcagtatttcaatgcaagattgcctgagaaccgaaagcccagtgatgctgaaagaaatatttatgtgggagatggcaagtcggtgaatgtggaagcaatagggtattttaggttgttgttaggtactagttactatttggacctaatagatacttttgttgtatcgttatttagatggaatttagattctatttcttgtttggagaaattgggttattattattcatttgaaaataattgttttagtttatctattaattcaaatactattagaattggttctcttgttatgacagcttatatttgcttaacactattgcttcttataatgaaacattaaatgttgaatcaagtggtactaagcgtaaaacagataataaaaatttaagtttcttatggcaaaacagttaggtcacatctctaaaaatagattgagcaatgaaattctaggttcaattggttatttagactttgatatttccattgaatgcatcaaggaaaacaaaccaaaataaagaaattatgtgtgaaaagagctatggatgtcttagagttgatacgtacagacattaatggtcatttcctacaccttcctcgattggtcattaatatttaattttcattatagatgattactcaagatatgcatacctacttctatttcatgaaatgtctaagtcttggacatgttcaaatcttttaaggttgaagttgagaattaacttagcaaaagaataaag

SEQ ID NO: 132728 - DNA, 866 bp, Cannabis sativa
ttgataaaaaaaaaaaaaaaaatcccttcaaattgcaatttattgcacatagtgaaaaaaaaaatgtaaaaatataagatattataaatagagattaacatgcaagatgcagtagtaaataatagagtgtagttgttggcatgtgttcttacttctgcatttattataatttataacacaattaatttataaacaaaataaaaatataaaaattggtacataaataataataacaacaaaaaaaatataagttaaaaatgaaagaaaataattattaaaagattaatgtaataaaattatattatatgaactaacgtgaaatttttccatctttttaagtctttcaatccacaatacatcgaccaaaaccaaaccaattaatatttgtattgattggtttgtcctaccactatcatcaattaaactaattatttcgttgcctttgatttactctttttttttttcttttggtacaaaatagcaatttagtatgttttttttttctaaaattttgagtcaactttttttttattagtcgttgggctagaactagtttttatgtcctttaattcgatgttagattgaattttatggctatatgtcattttttttttataaatattattttggatttttttttaaaaaattattgatttgattatttattttattaaataataaatttaatcttatattttttaaaataatataaaatagtattatggattcaattttgttgaccgaaattttcggcaaccaatttaataagggaaatttgaaaaattatactttaaaaactctaatattttatacctaaaccaatacattttaaaataaaaaaaaaatatgacacttttatgaaaaac

SEQ ID NO: 132729 - DNA, 617 bp, Cannabis sativa
aaaaattgtcattaagcattagtatactgccataaagtgacattttaagaattaacaaattttcattataattattaaattagattatgtaaaattttaaatttaattacactaataatcaaatgttaggattaagctaagaaactactccacgacatgcttgacctaaaccagggagaacaggtggtccaaaaccaagaggaggattggaagagggagcacctcgtgagtagcctccattgggatgagatgaggttggatacatgggaaaagtgcctcgagaggtacttgggaatcattggcttcatttcttggtgatgtcaagctccttggaaaccttgtcaatccctacttcttgagccatgagaagggactcaatttcaacaacactataggcacccgttcttgtgttgacagaggtggtgaaaggctcatactccctaggcctttgtttcaactgagcctcctatagagcatgaaatattaaaactacatgtatctttaagctctggaggtagtttcttctacaagatagcacttcactctgagtaaatgctacaacctcgtaatcctcaaatctcttcttttttgataagatttccttcataaacttcaca

SEQ ID NO: 132730 - DNA, 926 bp, Cannabis sativa
cgtaaattcataagtgattttaatcactttgtcaaaaaaaaaaaagtgttactataaacaaaaatagtgacttttttaatttattattatttttaaaaattgcataaaacttatatttatttcaaacatttatagtaacagttttaatgtttatatatgataagtaaccgaattcatgattttaggaattcttttcaaggtttcattatttatgaaagattaaataaatgaataataacataggattattataataataataataaaaaatgcatagaaaagttaactccctaaatgaaataattaagataaaataaaaatataatttaagtaaaatattaataacaaaaaaattacattaatcactaagattcttcatcttcatccatgttatttgtactaattgtcaccgatttatcaatagttatatcttcaatatcattccttactaaattaatatctctatcctcaatatcaaaagttgtactacaagtctcactttgcaaataagactccacattctcatcacgtgattgacgctcatgttataataatctctaggttttatttttaaaataacatgccatcctttgtgtttgaggtcttccacatacattacttgttcagcttgagatgctagtgtaaatggctcgtcttcacgcatcaattttgaaaggttgacttttgttcaatctttttcctttttaatgccacttcttgagatccaatcacacttaaataatacaacacgttttctcgaagaataatctaattctataacatcagataatatcccataaaatgtaacatattcgaaaataggatttggatcgctgctacttgcaaaactttgagtcttgtcagtcataataactccattattttgaatttttagcttcttctcaacttctttttttttttttttt

SEQ ID NO: 132731 - DNA, 1989 bp, Cannabis sativa
  modified_base (1345)..(1347): a, c, t, g, unknown or other
cccccccctcttttcttgtcatattagcgtcaattttggtgtggatctttgttattaccttctcctggaactactgtttatgcttctaaatctgcaactcacaatagatttcatgccatgttttctagtctgagcaaaagaaagaagatgatcccccaaatgagaacaagtgaagcctttaatattttctttcttttgaaaatactttaatggtatggcttcaaatgtagaacttgaattcttaaattataccatggatgttcaaacctcagattcattttttgttcatcattgtcttacagagttacaacgtcactgatcacgaggttctttcagtctcttagaatgctttttcatctcagagcatgcttcaaggccagattaaataatttttatgtcatccactttgtgggatttgtatggactgtactctaccgaatgctattgtagtgactattataaagtgagatatttttgtaccaaatgattgcttacttgatagaaaggaaaagaaaaacagatacagattctagtttttctctgacagtgctgacagttttcattttatgatgattgttctttattatttttgagagagatggatagggatggcaatgggtaaaccattcacaaaaagtttaattaatatcatcactaactacatttagattggctggcggcacttttttttatttaaaaaagagtattgcttttgagcaccaggtgcccaataccttgtataggtgactttctacgattggctagcaatatttttcaaaaatattttcttaagttatatgaaactcgatatttaattacacaaataacggtatgacactaaggagggtattaaacatcaataatatcttttaatattttttttttaaaagtcacatactttgaggcatttaccaaatcaaccaatatatattttctttaagagagttatttctatatgactgaatttgaaaataaagtagcaaaatagaggagattttttttttattccaagtgttaaatcatcttattcttataagatggtcccactgcctctattgtcttgatacaaccgatgaggttaatatcattatgttcttagacagaaagtcacggtaccttgtcgtagtgagagggtttcaaagaaatcaccctgttatgacttgggagacacttgtgtttaaaatccattgttagtttaaacaagtaatggataatcagaataaggaactaagaagcaaagccaggaaaactatggttaaaaccattcacatggagtttccaaaagtttttctattgcaaggacaagaaaggaagttttaacaataagtctatccaatggacttannnaaacttcctgatcctagtattaaaggtttgagattttctaaatctatgggttatggtatacctggtgatttaattcctctagtgcaagcaacttactttcgtaagatgctggagcattttttctaatggcttactctataggaagtcttttgtctcctagacatataattttatttatctaaggaaaagtttcaactattccagaaaagataaatgccatgaaaagaattctttaggatcaatagtgagaggtctcagatatgcttttgtgtgcattagaccagacaatgtgttatggagagtggagtaatgagtaggtatcagattaatctagaaaatgaacattggaagacaatattcaagtaaaccttaagatcaaaagaggaactatatgttagtcgataagggtggtgttttaatactcttagactacaccaaatcaggtttttagacttgccttaatgctgaaaagtctactgatgagatggtgattactcttggggtggagcagtgattttagagaagtgtaatttttttttttctgaaatctctaactctaccagtgagattgaatgttaaagttgtatgaaagatacttattcagcctatggaaagttctatactgtttttggcattgtacca

SEQ ID NO: 132732 - DNA, 1145 bp, Cannabis sativa
gagttgtcaatcaatattttcacacttctcttctttgaatcccatgcccaaatatttctagaagctctttgaaatttcatcttcatcaagcctttaagtgttcctcatcccccaaggtagaaattttttttcctttttttttttccttttcctttttggcgtttttttttaaaaaaaatttcttgctctcctcatttatttgtcttgctccaaggattctcaaactcccaaaaaactttgattttttttttctagacttccaaaattacaaacactttcctagtaaattaaaaaaattctccttcaaatttgcttgaatttttccacaacccaataagacttttcttgagctgtaagaaacttgtattgttaagcagtcatggctaggatgaagagaagtagaaggtttcctgatgagtacgaccttcatgtgactcagttcattagagctaagctaattttgcctaagtctaaagaacatagacaaggtgtgtggttgtaaggtgatggcaaatgaacttcttaaaggtgccattgagagtgatgatttgagaggtcgagctttcagggtaagacctcttgtgttagcactcttgctgaatatgaagctcaattaatatgagatgattactgtcttcctggaactgtcatccataagacacgatatggtggtcctaatagctcctagaacacttgctgtagtgcttggtcaagattccatatgaatgtgggtgcttactaacccttgcatccatggtttatatccatagctgatttttttggagtctgccctcaccaaataaacccaaatggctatagtgtaacaccctaactagcataggcgtgttaacgtgattttaaacatactgtgtagctcgctgctaatcatcgaggttattgaaaatcgtgattaattaaaatttgcttatttaattaaaacttaaagtattacatagataatatttcgggatcccgtttacaaaatactttacaaacgtttgctatacatataatcaaaagtttgtcggccagcgactaatcaacaaaagccatgatgtcccgaggatcatacgctccaggcttgaccgccccgacatgtacaatcttcatttgctcgtccccacggttcttcggccttagccttg

SEQ ID NO: 132733 - DNA, 1003 bp, Cannabis sativa
  modified_base (45)..(65): a, c, t, g, unknown or other
  modified_base (120)..(128): a, c, t, g, unknown or other
  modified_base (976)..(976): a, c, t, g, unknown or other
atataattaagattatattttactgtgctgacaatactataatcnnnnnnnnnnnnnnnnnnnnnggacttaaatagaattcaaacattatatgcgcataatcatgaaataaatcatgtnnnnnnnnnaacataaaatgttatttctgatatttattaaaaagtaaatctgattatgctgaaatgatttttatttagggcacaaaacccaacatcaacgtcaaccattgtcctagctaggattgacacaaagaggccctccaaagtctcggccctcttcatggctgaaagcacattggcccttttttgcaggaccttcttttcctcctcgagtcgttctctcaaggtattttcaattttacccgccctctgcatagtagtggggtcattaggaacgaccttcatggagaattcaaaacccacaggaggaatttttgagaggaaaaagaatggatggcgttgatggggctggctctgcgattgctattcatgtggttgttgggggtagtgtccgcagagttgttggatggatgttgatggatcgggagacacaatgtggaaagtttcatcttgtctcttcgtcttccctctaaaactacctccactaccaagttttgaagaacgagcttccttccctgagtccaacattttactctaggaggtacttgtaaaaaaaactagtgcgggctaaatgaggcaactcagaataatgaagtcagtaaaactaatctttctggaatgcaatggtcgactctcaatagtgtacgaggggacaggttagcttcttcgtgcggatgagcggcccctcaatgcaccatcacctaatcaaaccgccacattttttgttttgcttgaccaagctcaacctaaggtttggagctctgtctgttgggattttatgccctaaataaaacccatttcaatttaatctgatttgttatcattagaagattagaaatcatttatgtttacatgtngttttcatgtttatggtttaaagtgta

SEQ ID NO: 132734 - DNA, 1913 bp, Cannabis sativa
aaagttattatatgataaataataatttatacactaaattaatattaatattatcaaaatatagtttaaataatattagaatatcataatataactttaaaataattaattgattattaatatagatgtctaaaatttttactaataaattatgtgatttattttactttattgtaatgtgatagtttcttcaataagattgaacgtaacgtaaatgtgaacttaaaagtaacataaaagtatatatcttaattaatatgaacatacaatattaaaagtaactaatataaaaatcaaaacttatttatatgagatatttttattttaaaattgatgattttatcaaaagtagctaatttgtatcttatcgaaattataactaattggtccaaaaaatgtgtcttatttgtaacgatttaaagttatttgtaacttcattctttatttaactaattaaaatgtatatattaatttatatttaaaaaatatgagtgacttaaagatttatgatagaataattaacatttttatctcctgaactttcgacattacctgattttgtactctaaaatatacggtttgttaaaaattcttactaaaatataacaattacataattatgcccattctcttaggttctatttcttttaccgttgaaaattagtatttttaccccctaaattttgaccaacacaaaattttatccccttttattacaaaaaataattttaaaaattatagtattctattatttttgaaaaaaaattattaataaacttgataaaaatattcaattaattaaaaaatattaagtttacttaaaaaactcaaattattcttaaaaaatatttcaaattttattttatttgcaaacacgtgtcttaaaaaataataccaaaattattgaaaatccaataaatatttacccaaattaagattttgtttttttttttgaagaaaaatcaattttatttatatatttaaattcatatcttcaaaaataatcaaaaaaaaaaaataatcaaaaaattcaataaaaatataaaattattttgaaaaaaaagttaaaaattaaattaaaaaatattatgtttatttaaacaaatctagatttttgaaaaaaaaaaatagactcaaacttgctcccgtaaaatttagtttttacaaaaattaaatttttaatatatcttttttatatatctaaatggattatttaatataaacatttgggctccgggggaggagatgtaagaaaaattaccaatttgacctttagtctaagcattgtatttggttatttactcaaatttcactttggtggagatgggtggattgttagtgtggacaatttagaagatataattagaggacatgtatggttagattctatttgtatatttggtggaatctggcatatcttaatcaaaaatcatttgcatgggctcgtcgtgcacttgtatggcctaaagaggcttacttgtcttatagtttaggtgcataaatgctggtttatcaagaacacgcaaaaaaagtacttcgaattgttgatttatcgccagagatggcttagaaccaatagttcattatctaatggatttttccattctaatactccttttgagaattatctcccctataacataaactaattatttgttttcttagattcattcagattctagaatcattctttgaaacatccacaaaaattatcttatagggagtagattacatacacctagttcgatctcccctccttcgctaataaatcccctttgtttttgctacaaaagttcctataaaaatgggaaatgccctacctttgagtgcggtttgaactattgatttgcgtaattggaagtaaccaattaggtttacgacgaaacctagaaatcgatcactgatccaatttg

SEQ ID NO: 132735 - DNA, 959 bp, Cannabis sativa
attaaaggatcatttataagctttatcttcctacaagggtcaaagtgtgacctttgaccactcaagttatggatattacatatctattacaacctagggctcgggtcgtgacaactcaactccatcaatattttcctttttgttacaagttaaacattgatgtctatgttactagggttagtttttgggtaaatactctatttttgcattaggtattgatttaattacaacagttatattatttaagctttttaccttcaatatatatatattgagggaaaaaacattctttgttaactattaacaattatttagaaattatagaaaacacaaaaacaattatatataaaatttaaggaacgtgtttaaaaacgtagggaaaacaaacaatatgtttacaactatactacacattcaaaaaatgatattattaaatatatttttcaaccgcatgtaaaacattaagtttttgtcgatctggattttcaatggtaggtagcatttttttactcaacattttaggtgtatgtgtgttgttgtaggattataatgtatttgtttcatctgtacatgtaaattttcttcatatttagaatctccctatcaacataatgttaggatttataaaacactcaagaaatatatatatcacagatctaaacatattcgtaaaagtgctttaatatagaaaatcctaaatcataaatctatagagcctttactaaattaaggaagaaaaagatgataaaagatgagcagaagcactaacctaaagccattattggagattgcagagaaggttatgatctttcaagaatacactagttctctaaagtattttctctaatgggagaggagagaacacaaaaaaccctagtgtttcttggggaccactatcgatttataggctcattatataatgagttttgagtatttataatttggtccctcaacaaatt

SEQ ID NO: 132736 - DNA, 742 bp, Cannabis sativa
ggtgtaaggacccaatggaggcttgaagcggggaagttataggttgttagtgtatgggtaacaccattcgccgatcgtggaatggcactgcaagaaccaccaccaatagcagctaataaagaatatatatctaataaaatagattacaaactaaaattaatgtaaagcttattactccaaccaattgtcacagtagagtcactattaactatagagatattgaaaccaaattgatctgtagaagccaagctcacacgaatggcaagcaactccactacattagcaaagaaattacctaacacacttgatgaccacgccaaccagaccacaccctctgcatcccctatcactccccccaattcaaaaaagcccctccccagaatcaccaaagcatccgtcggtatagcaaaggattcaggagaaggtggaatccatcgagtagctcagtttacaaatgggtttgcaaggctcaatcccaaatgaaggcctcaccgatcattcttcctaaactctgccagatggttattggctaaatctggaataatatccaatcttgactgcttgttgccaaataatactaacttcctatcattctacagccaccaaaaaattgtcatcatcaattcaaaagcctcacgagatagcctgtaaaaaagtaataggagaatatcctgcattggtccatatgcatatcgacggagtacctgttgggttttatgccttaaataaaacccattacaat

SEQ ID NO: 132737 - DNA, 989 bp, Cannabis sativa
aatttcaatattattactttgtttataatacacacatctaaatgttatattttagattatataatttacaaaagttgggcaacacgcgcggcttagttccctagttataagctaaaacaaataaagtacactgaaagtatgacggagtatctgtatcatatttatatatttattaaaatatttaattaatattttgtactatttaacaaatattttcatacggagaaattcataccacttcaatgaaaaattgataaggaaattcatcaataagcttgtaataaaattcatgaaacttaaagtatccaacaaattcaacatgtttcaaagaaataaaaaaactttcatcaaaattatacacatttcagataaaagacaaggctttaactcaaagaatcactacagctttcatttaaaaaacaatttggagatatacatatcacgtaatacaattcaaaaaatcttttgagctttcaagacagagcaaatcatgctaccatcggacgcttcatctaccagctcacaccccatagcaggatccaagcccccatactgatcgacgtcgatgttgattggtggacgctgctacgtcgtcgctagctcccagtggcctagcaagtccccccccaaagttacaccgtcttcgtctcaactccacctggtgccaccgaacaaggacgaagatatctaaatatttatggttttgttttctttattttattattatttatttatttatttatttatttattgtgaatagatatgtatatttaaatataatattattaaaataatataaaaaactttatcaaatacattagaatctattctacaataatacactcaacctttatattgctgtttgatataaaatacacggctaagaaagcttccccactggtaggattgtaacgcccgtacttttataaaaatattaattttgtttacaagcgttaaacgcggaaaatcataatgtcgcatttttattt

SEQ ID NO: 132738 - DNA, 1359 bp, Cannabis sativa
ttcactgaaagagcttgatattgaccttatggcaatcgatatacctaatgaattttgtaataattgttcgcataattcatttccagttttagaagagatgcgtctcagaaggataactgcattagattggtcgtctatcaatacaaattatcaaaattgtgacattttcccctgtttgaagatatttattttacattcctgtagtagtctaaatgtggcattacctatgggtaattttccatctttggatatgatcgagattggtgattgtgatgaattggtgactgtatttccatccagtagtactgatattgatgttgcatatccctcccttagaagcttgctgatactgaattgttcgaggttggagtcagtttccgaaatgggattactgcccgcttctttggaaagactacattattgattcctgcaatacggtgataggaagtcgtatgcaatggaatttgcagagattctcaaagttgactgaattaacacttttcaattatggaggagtggtggattcatttcctgaggaagggctgctcccatctagtttgacatttctttgcatcaagaactttgataagcttacagctctaaacaccaatggttttcaccacctcacctcacttcaagagctgagtctttggaagttggaaaagttagagtgcttgccaataggacttccccagactcttactactttgtgtatagtagattctcctctgttaattccaaggtgcaagagagaaacaggagaagattggcccaacattcaacacatacgttacataatcatagatgatcaggtaagttttccaaagtggtaattgaaagtctttattctttttagttgtacttagtttcccctaagattttctctcatgtcctttgtctttttttctttaaaaaaaatacaaatatattttccaagacgtaggaatgaatataactcataacttttgaatctcttttattcaccacctaaattttctttctcagccctaccaattgtacttttcttttcataaattttgtatttcaatttatatcacctaacatacaaatataatatcaaatataaaaatattttcattgaaaagatactctgcaatgaaactatagaattggtataatgtgagacaacgtttctttttaattttcctttctctcttgcagttacttaagtgaggtgaggactgaggagccgttggtgtcatttcggacagacttgtgtgacttttgagttttgatggtgctggtattgatgtctttggtctagtgtcgtgctgctccttcggttagtatcaagttttttttgagattgctggatgtttgttgagagttggaatgtaa

SEQ ID NO: 132739 - DNA, 1231 bp, Cannabis sativa
  modified_base (56)..(68): a, c, t, g, unknown or other
tgtttacttataatcattttagaagatcatatttagagtgttaatcaacatacttnnnnnnnnnnnnnagttcctggtaaaataattccaacagttttgacatgttttgcttggttgaaaccaaacctgtcaaggattttaaatatgtaaccactttgagacagtttaagagttctctttgatatgtctctaatgatgtcaatacctaaaatcctctttgctgaaccaaggtctttcatttcaaattccttattcagcatagctttaattttgtttatctctagaatatctttgcatgctatgagcatgtgatcaacatataggaggagataaacagtgactttatttttcttgacatatagacaactatcattagagctcttttttagtacaaattcatcaatttttatgtactattgccttagtgattgtgtcaatccatataaggatctctttagctaacatacatgatattcttttccttcgacttcatacccctttagttgcttcattaggatgttttcttctaagtctccatgtaggaaggttgtttaaacatctagttactcaggtcattgatggctacaatgcttagcattagccttatggaagtgtgttttaccattgggagaaaatatttcattatagtctatcccttctctttgtgaaaaaccctttacaactagtcttgctttaaatctagccttttatactcctggaatcccatctttatgcctgtaaagccacttgcagcctatgactctttgacctttaggtctccttacaagatatcaggtcttcttcttggtttgagaagtcatctcatcatccatagcattgtctcggtcaagtttatcatctgattgcatggcttcttcataagttgttggttcctcaattcccattgcattgttgtggtaattttcaacacgcaagtatgcgtatcgtttgaacaagtaatactcacgaagagtgaggtcgatcccacgtggattgtagttaagtacatcaaaattaaattcctacttctatttctctatataaaatttaagagaaaatttaaaactaggaaataataaaaacaatgaaagtaagaagagaagcaggtaaattaataatgaagttgacgatgaataaaagttagggcttccgatttcaattgcatctattgattatggtttaatatgattatagtcctaataccaatttctatgcaatagaaggtttacta

SEQ ID NO: 132740 - DNA, 537 bp, Cannabis sativa
  modified_base (26)..(45): a, c, t, g, unknown or other
ggtaaaagttacttttaccagcgcannnnnnnnnnnnnnnnnnnnaagtgacatttcttgtagtgtgacgaccgaccgatcaattccaatgtaacatcgatgcttaatgaaggattttcatttaaaaaattaattgaaatacttaaaatatttttttgtttcatttcgttatcataccatttattgtaataagttcgtaaatatttttaagaaaatttagataattaaatgtacataaatcagaataagtaatcattttccatatgtataaagttaaaaaaaaaaaaatgtgtaaaacatactggtttcaattctattttgtagatttttttttaaaaaaaaatcttgcaaatagcgcagataaatatcatcattaaaaaacaattaaaaaaaatatttcaagtacttcaattagagtgtaccccatgactatagggctttttttttctgggccttattgtaattttttttagggaaatttacatggtatactaacttttgtcaggcggtattttttttatttttttactgtttttt

SEQ ID NO: 132741 - DNA, 969 bp, Cannabis sativa
ttttgttgtttttgtgtatttatgaaataatctttttaattaaagactatttacaaaaatatggggtaagaaagaaaagttttgatatatatgatatgcaaacttaaatgcatcaaatatgacatttttttcttaaaaaaacttaagaatatgtgataatcaattatagaaaagaaggaataccataaaaaacttaagaactcatacataaattttacttctatataatcgaaaccagtttcctgatgaaaaaaacagttttttttttatatagaaagaagttaaaaataattttgttaaggaaatgaattaacaaaccagttacttctatataatcaaaactagtttcttaatgaagaaaccacttacgaaaatcaaaactcatatagatttgtttattatgaaaccaattttcctatttaagaaactggtttctaaatctccaactacagtagaatccgttcgatcttttgggatttttgtggtggagatctcatatcttgatttgtttgagtcgtcggtcactcgatgtgtcgttgtttaccagaggtcagtagatgaactgttgagggatatggtaggtagggtacatgaatggaggagaaataactttgagattttttatttttattttttgaaataatttctctaaccatcaaatatgggctttaaaaattatatttacacatatatgacataaaaaataccataaaataatttaaaaactaaaatatgtcataaaaaggggtaaaacataaaggtgccatatttttgtatcaaagctttaaaaaaccacattcaatgtaattttttctttaattaatagagaaaataactatttacttgcctataaatacaagacaatatgagagcattttatatacttgattttaaaatctagaaattcagaaggaaaaaatgctatctcctattttttctagccgccactctctttctctctctctctct

SEQ ID NO: 132742 - DNA, 711 bp, Cannabis sativa
ttaattgatagttgactaacaagcggaaacatttatttattgagaggattggattaaaaaaaattagagaaaagaacttatacgacaattacggattaattattccttaatcagaattattatatctgcaaaagaataaataaattatagatcaaacaggtgtactgtttaacatgacaatattcttttagagaatcatttcattgttataaagtgttgacttaatttatctaatgcacaaaatctactttaagataattgaaaagaataaaacagtgtacttgtaatggtgtttttttttttcttgaaaccaaataaaattaacggaagtcgtctttttccataatcaaggattgtgtaaatatatttaatctaattagaactaattgatccaattactattactatcaaaaattaaatattcagttacaattacatcgactcgagagtaattttcagaaaaggatgtgcacaaatccaacacaaccgtaggtgaccatgtcaatccaactatatttaaatataattgataaatttgcggcgaaatttctttattttttttgtggcttttatattttaatttttatacacttaatctttttatctttttttttagcaaaacctctttatgttttaatttttatacacttaatccttttatttttttttttagtagcaaaacccccttatgtttatttttctttgcaaatt

SEQ ID NO: 132743 - DNA, 1329 bp, Cannabis sativa
accttactctctcaatgagagttctattcattctttcagcaagaccattttgctgaggtgtatctctaacagtgaggtgtctagctatcccatgttctttgaattaaacaaattgcttagagcaatactcccaaccattatttgttcttagttttctgattttgcattttgtttgattttcaatcagccttttccaattgataaaggcattaaatgcctcatccttgcttttcaataggaatacccacactttcctagagaagtcatctatgatgctaataaaatagctaacaccaccaagagtcttgatcctagaaggcccccacagatccgagtgaatgtaagctaatttctccttagtagtatgttgtctaatatcaaatttcacactgcagcttttgccatatacacactcctcacagaaacctagtttcccatttaatccaccgtaaaacatcccttacttgtcaagttcagtgagccctctctcattaacatggccaagtctcaaatgccatagttgaacatcactatctgcattatttattgatggtgaagcattccctgttacagctgtcccaaccatataataaagaccattcttgagtcttcctctaactaccacaagtgaacctttcgagatgttaagagtgcccttgtcgattttgacagtataaccatgattgttaaacattcctatagatagcaaattcctcttaagatcaagaacatacctcatattctgaacagatctcataataccatcatgcattttcatgttgacagtgtcaattccaatgattttacaggctttgttgttgcctaagaggactgtaccaactgaactttcttcaaagtgtgcgaacagatccttgttgggtgtcatgtgaaatgagcaacccgagtcaaggatccattgaccaccagagtcctcacaagaaaccaccaacacatctgctgaatgatagccactaaacacaatgtcagcttctcctctttccttgctcttgtctcttttaagcttgttctttagtaggtagcaatcatccctaaagtgaccatctttcttgcaatagtagcatttctttcccactgtatttctgttcttggagtttgatttgtgaccaaattttgacttcttgaaatctctcttttctgatcttcctcgagcaaacagtccttccccaccagtctctaacttgtcatcaacctttctttgaatttccttggagttgagtgcagctttaacttcggacatggttaatgtgtctttgccataaaggattgtatccacaaagtgttcataattctttggtaaggaactcagta

SEQ ID NO: 132744 - DNA, 569 bp, Cannabis sativa
aaagttgttcaaaagttctttgaaacaggggaatttgaagaaggttgtggagatgcaaatatagtccttatcccaaagaaaaagaatcccgaagacatgacacaattgaggccgattgctctatgcaatgtgatatacaaaattattacaaaagtcttggtgaatcgtatgaaaccttttatggactttattgtttctgatactcaaagcgctttcattccggggcgtcttatttcagacaatgttctcatttcctttgaagtgcttcactacttaaagagaaagaggaaaggcaaagagggttttatggctttaaaactagatatgagcaaggcttacgacagaatagagtgggagttcttaaaggctatgcttgggaagttaggctttgagaaccggtggatccgtttattcatgaaatgtgtgtcttcagctcgttatactgtgactcatggtgggtgtgagatgggaccaattttaggggtgttcattggatcacatccaatggatttggactcatccaatccaatccaattatttattggatatttgatttttccatccgatcc

SEQ ID NO: 132745 - DNA, 552 bp, Cannabis sativa
ccatattaatttttttttgaaatggagatccatattaattttaaacattgaaaatatatgaaaattggactttaattttaaggaaaaatttcaagtccaaaaaaacatattcataagaaaattttgatattttaatgtttattcaaatcacattcatgaacgaaatcactgtataacatgatatgaatatgatagagcaaaaatgattcaaaataaacacaaaaaatgaaaacaaaattaattttaatttcaatatgcacacactaattaatccaaaaacacatctaatttaattagagaagattgagttatttaatttcaatcactaatgataaaatgaaataaatgtaatattactttagttatagctcagaaatacaatactcatattattatttataaacgatacttctgccaaaaaaaaaaaagaaatgaaatgatcataatgtaactaaatttattaattttataaaataaataagggtaaattgcggcataaatacctaatgtttcagattttttacactaaaatacttaatgtttatttttgga

SEQ ID NO: 132746 - DNA, 606 bp, Cannabis sativa
cattcatggagattggcgaggctgagcatcatcctgcgccaaagaagcaccattcccatcagctttcaatgagagagttgacatttcagaggaagggtctggatgttgatgcgagagagtgttggtggtatcagaaagtagagtcaatcttgtgcgacatcgttttaggacattacgtacattaccacccgaagtagtcaattgccgcttggagaacagtgaagacattctgctatccttacccgtagaagatcctggttcaaaacctgtaatggaaattggttgaaccaaattgtcttgaggaagtgacgagaccattgttgagtgtgaaaagatgattttgtcctactgtagtgggctactgctgacatttgatggttgaatataagcataggctgttggtgtgggcattgacaaccttattgaagaattaggcacttcagagttataagtacattccttaatgtttttctgtgaggaacttggatttgtagcaggtgtgataggcaataaattctcagtatccaaactggaagttgataaggaaatgagtttcttgttgcaatgcttgacactagtggtgttaccatgtgatgtagaatcatt

SEQ ID NO: 132747 - DNA, 669 bp, Cannabis sativa
taaaatatttttttagtgacactggtaattatttgagttaaaaaataataccatcgttatctacttttcaagaggatcgttttaatatataagaaacattttttatacagttaaaaaaataaccaaaatcaaaagtaacgttttggtttcttttttatttaattataaaaaacaaatttttaaccacaataaaatttaattaccaaccaatttaataagttaccattttttaatgattatttcatatttaaaagttactaaatcatattctaattttataaaacacttttcacaagttcttaaaataacttataagaaaataaggtagtaccttacaaacgatagaataatggattcaacatactaaattttacaatttcttttttgatggaactaaactttacacaaacaaactttaatgtagtgacaaattttatgagttattaaaaagtattttatcacttactagataatattctacatgtttattttatagagcaatttcaataaatatttgaaaaaaagtaactaaattgtattttatataagcttctttttttcaattttaataaatttctaaaaaagtataccctactctctctctctctctcttaacagccaaatattcacatactctgatctacctctactcaccacctatatatatat

SEQ ID NO: 132748 - DNA, 832 bp, Cannabis sativa
ccgtgttttgagttatgttcagtctttaacattctgggactttcactgccatatattaataaactttaattaagcttttattcttcttagagacatatatataattaatatatccagctagctatgtagtactatgatatgtaattaaatgtgttcattattatttggctactagatcttattacgatttaatatagtgcttcatcatgttaagaaaataaaagataaaaatttggatttctcactgtgtacaatctatgtgttgcactaaaaagaaaaatcacatttaaaaaaattaaatttttttcttttaattaattaaataataaaaaagcccccataaaataattataatttttaattaagtaaatataaatatcttttataataattaattaagctctgcggtagaataaaaatcttgatttaactttcgattttagataaatacctaattatattttaattcaaagtcaaaattaagtttgttcttaattaattaatgagtaatttatacttatgtttaactccggtttcagataaatacttaagtttatttttttacagtaataatacaattatatatatttttggaactttcgtaagtatcaaatcaatatcaacattttattttcttattaatatatttaaatgaatttttaagtaaaaaataaaatttaatgacctgaactaattatggattgtcatatagtcattgacttgacatttaaaggtcagatacctactgaatttaataatataatttttaagtattattatcgttaaaaattaaacttaattaaggctaattagcaatttttccccccgaact

SEQ ID NO: 132749 - DNA, 730 bp, Cannabis sativa
ggaatgtgttatttttggagaaaatttgattgagtgttttttgaatgggtttaccttgttttcgaatggttattatatggtttttattgtgaaatatcgagtttattttaaaactcattaatggagaaaagctcatttcgggttcatatttttggccattattttgtaattttttgagctgaatggatgttggaaattgatagagagtttaaaatggaacaaactccacatttttcatcaaaaacggttgtcggagaagtctgttctgatcaggtcttgaatcgggtcccatgggcccgagatgtagacccgcttgacgtgtcgttttgcccctattagacaaaacgacatgtcgttttgcacaaagttgaagcctccttacagctggaaacgatgggttgtttaagacccaggagaaagtcatttgcgccaaacgataagtcatttccaaaaaatgacatgtcgtacatatattaaagaaagaaacagggcacatggtggcgcgtggagggtcaatttttggccattttcactattttattctatttttagcattctatgattttcacgtattgtgtttatgcacaatattaattcataaattttattcataatctttgtaattaattttattgtggcataatgttttgtttatttaattatttattaatttcaacaactaatgcttatttttcttacctatcgtaagattaagcatgaaaaattattt

SEQ ID NO: 132750 - DNA, 961 bp, Cannabis sativa
aaaagcattgttttgagtttgacggagtgcatcttggattctatgatttgaaaacataaaaaatataaaaatagtatttttattttttaagcctaaaactcaaaatagtattcaaattttgtttttgaaaacactcaaccaatcaaaaattcttaggtggaccccactaatttaatttttaaaaacataaggtagttttgaaatcctaaatgcacacccaaatatccatgttcaactgtgaagaacacggcaactgaagccaaaatctcaaaataaataaataaatataaaataacactaaactgcatagaactttttttttttttttgagaaacaattgcatagaacttcacagtacatatcataaaccttaaaaacaatatgtataatccgcaaaaaattaataatatatagtgtcactgtcaggcatcaaaagatcaaaaaaactctaattttcctaattctcaaattacataataaaattttcaatccatttagtaaaaactaaaaagtgttactaataccactttataaaacactcgagaaatacaaatattcagaaatctaatcatatttcgaaagtgttttaatataaaaaatcctaaattatatttctatagaaccttactaaattaaagaagaagaatatgaatactaacctgaagttatttttggagattgcacagaaagttatgaatacagtcatatactatttctttgaagtattttctctgatgggaaaggagagaatacatacacactagtatttattagggaccactatctattaatagactcatcttagaatgagttttgggtccctcaataaattataaattatataacttatgtatctatacattatttctataacaatttaatacgtttttgatatttataacataattagtcatttaaataaaagattacattaatggtaataaataaaagatttggacat

SEQ ID NO: 132751 - DNA, 1532 bp, Cannabis sativa
actaatcagattgtaaagagttttatttagggcataaaacccgacaaaagattggacggtcctgacttcaataaaacatcctaaccagctctcgataatagtttactatcccaattttgaatacgcttcctaaccttctcctttaagaaaccaaatgccacattcttatttctaccaatcgcactcggcaatcccagacaaaagctattctcataagcagcatgcatatgaagagttgacaaaattccaagacgaacactaccaatcgtgttggagctaaaaagtatagaagacttatttagatttaccttctgacccaaagccttctcaaacttattaagtaattccagaacacgttgagcctcctctatagtagccgagcaatagaggaagctatcatcagcaaatagcatatgcgtgacatatggggctctacgagccacacgacaaccatggatccatttcttctcttcataaagccgaatgagagctgagagaccttccgcatagataataaagaggtatggagaaataggatctccttgacgaatccctctagttggaacattaggcctaagaacttctcctccatgtacaatgttataagaaattgttctcagacattccattatcatcataatctagtcaatagagaaacccatacgaaggaagatttcatgcaaaaaagacaactccatcctatcataagccttacccatatccaacttgagcaccatacaaccttgttttccttgctgtttacgtcttaaaaagtggaggatttcaaaagagacaagtacgttatcagtgatgagtcaaccaggaataaacacactttgaaactcagaaatcaccttagacaataaacctttgagcctattagcaaaaacttttgaaatgaccttgtaaagcacattacaaagagcaataggcctcaaatctcccataactgcaggcaatttcttcttcggaataagcacaagattagtaccattaagatctttaggcgttacctcattccgaaaaaaattatgaacaagtcgaaccacatcttgaccaactatatgccagcacttctgatagaacgcaggtgtcataccatcaggacctggagacaaatctggatgcatctgaagcaccgttgaacgcacttcttcttcagtaacattatcctcataacttatcgaaggttgaatcttatcaaggatatcatcaccatgtgaccccaaggaatggaaaatattagtaaaataattaactattacattaggtaagccagttttttacttgacccaatcacttgcctcattcttcagttgatgaatgaattttttttttcaacgagagtttgcagcagcgtgaagatacttcgtgtttctgtccccctcttttaaccaaaacttattcgatcgttgacgccaaacaatttctttttggcgataaatttcagcaagcagttttttagcttcacggtattcagaaatcgagtcaacatgtaacaccctaactaacataggcatattacgtgattt

SEQ ID NO: 132752 - DNA, 745 bp, Cannabis sativa
gaagctgcggtatgtcgattagcttatgagacggctattctgatgaagcacaatgttgttatgattgagagtgattttatcaagggtctaaaaggaaactgttccaattagagtattgataattatattcatcaatgcaaacatttctctaatgttttgtttagttgtaattttttcgtttatttttagactttgtaatttcgcggctcataatttggcgaggtgggcttttgctaacaatgtaactggtatggttagggaaatttacaaaaatactagaatttgggttagtttttacaaaaatacagttacacgaaaatcttttcaaaaatactgtattttgataaaacaacagtggaacacaaaacagaacaactaaaaataccagtggaacaactaaaaacaaccgtagaacaacaataaaaacttaacacagtacacattataaaacttactcaatatttttaaaaaaaaattctgccccacagtataaaagtaaaaaaaaagttgaaaatttcagtatgtggtgtaattatccctatggttaagctttcttctatatcagatagcatcttatgtaatgattgggaggtctaactcttactttatgtatctataaacgcttttatttaaaagaaaaaggcccaaggatcttaatttgtcctaaaagttatttcctccctcatatgaacacttagagaaactctaaaaatgctcttaaggatttatcaagcctcatatactc

SEQ ID NO: 132753 - DNA, 1452 bp, Cannabis sativa
aactaagaattctgttatatagccacactttatataaaatagatatatagaaaaacttgaagctatatatacgtctaaacatgcaataataaagattctgtactatcgaaaaggacaatgatactaccatattattatttgatttaatggttcattgatatatggttgtgtgtgtgtgatgtgcgtgttgttgcttatggtagttcatttattatattattttgattattataaaagtcttattattaagttttaatggcgtggacccatgactaggacacaaccacattaggagtttccttggccattgggtatatgatcataagagactagctgatcctctgaatagcatttctgtgtggtctcaaatctctttcaattataaaaatagtttaatgtgtacatgtatactaattatgtaatttatacaatatacaacaaccatagctcattgtggtaccattccttaaaaccccaacaatcattcgattagttagttagtctttaactaaattgtcaattatgacagcttgtatattgagttcctactcatctcattttcgaaagaaaaataaaaataaaaaaaaaaaggacaagacataaagagacacaacacagtagaaagagaagttaaagtgagaaatgaagagagatatctgagagagagagagggattgggaaatcgtattgaacaatattattgattatgttggcttgagttagtgagttaatgagtgttgagggattacactatggatgactacttgctgtgattattttcttgtagctcctgagattgatatctctaattgtcattatcaataaagatttgtggcaatactttcaaactggagtatgaccaagttcacattaaacttaggatcgaaaccagtataaattatgtctcatgttattgtgtcttacagttatctagattcatctgtgttatatttttctggtttaatatctttgtcggtttttgttcttgatttgtttgttttgatttaacttttatttgtttaagtgtgatcttgaagctagaattacagaggttaattcttatgtatcagagctaaatttcctacaaattagagctaaatttcctataaataagagcttggttcttcgattatcaagggagattcaaagatcacttacttacgcacaaagaactcatcaaaaaattctacaagaacacaaattgaaggaggatgtcgatggctaggttcgaactagagaagttcgatggatcaactgatttcgcactatggcaagagagtttgaagggtatacttgtgcaccaaaaggtggcaaaagtactcggggataaaaagttgctcgctgagaagaagccaaaggaaagtacagagatagaggagatgtcattgttaggctatttttagcctatgttttgggtcactctttatagttgttttccttctttattattat

SEQ ID NO: 132754 - DNA, 2136 bp, Cannabis sativa
tggtatttgtgtaataaaaccaactttgtaagtaaaaatgtagacataagcgtgtagaggtatatatgtaataaattgtgcaaaatggatttttcatgtaaaaatttctataaattttgtagaacaattctaaattataaaacaaaaataatactgagtaaaattattttataaaaagaaataatactatctaacaaattcaagtaaattaactagcaaaactccaaagttactataactaacctcacaataccatagaatattgtaataataaatatattcatataataattctaatctcacatgatcatagaatagttctaacattttttttgcttttttgtatcattgtagacttgtagtcatgaattctctcactctcacttatattagtatgataaatatgatagtggtattattaatgtaatttcatatatattgataaattttagatgcgtaatgtatttaaaaataagtgtatatattaatcactaatgtaatttattattctaaatgattagattagatgttaataagaaaataaagaaattagttttttgaaaagttaaagcgccgtgtcacatactctaacaacagcattatgtagatatataaatagatagatattataactcttaaaacctcacttatttgactattatctgactagagaggtatggtgactctaagttgtatatactctatatacaaatgtatatatgcatgtagactatagagaaaagagagagggaatttgaattccctatagtcaattgaagagttgtaatgttgagtgtataatgtgtatatgacttgtgtatatgactgagagctataaaggtatatttatagtattctcttaggggttaggttaaaattaaatggaattaaaaaaatataaaatggcttttaattaaagcccttggctgaattctactagtagaagtcaatgggtttcaaaattcccatttttgttcaaacttatctttttctcaataatacaatttttttttcctattgtaagcctttaattgttaattttttctatttaataattatattaaattttcaaataaaattaccatttaatataattattaattagactctcccaaatctcttaattaataattaaaccataggttttttctttcttcttaaaatcgcccttgcatggtaaaattcataaataaggcataatctcatttgaaatcctaattgattaaataaaaccaattaattgagtgtacaagatagtatgatctcagctagtttggggatcgtgggcctatataatcaagctcccaataagtagttttagaatttaccaaatgaattctataacttattaattcctccttactccactatagattcaaaattacactcttgattacatagaacgctctattctccaagaatagatatgctgttagtatccattatttcaatataaataattaacgatcctctatagatggtctacatcgagtagggactgaattactattttaccttcaatatattttatccttaaaatacttggctacttgtaaatggtattttgggaaactaataaaattaataaaatgagcgctccatcatttatcgcgttaagccaagctctaaggaaaccatcgtttcacttctaagtatttatagaagttataacttccatatctattattagtgctgccaatcaattatattacagtgttcccaagatgtaagtattaggccaatcctactggtcaactataatgaacaagtcaaagaacacatgcaatacctttaagccagaacctaaccatcttaagatttagatcattgatctaagatcaacattgtgatatttacttagaaaagatattatagtaagttacgatatctttttcactgtgaatatcgggtccagtccgatgtatagtcaatacatctgatacaagtttactttactgatgtcttggaaaagacactctcaacttaaacaagtgcaagtaaactagatcatggattatcacgtcagtgtaaatccagtgcactgataaatcgtgagacttaataatttgaagcatacaatcccaattactttccactgtgatgacattactgttggaagttattttaccaggatct

SEQ ID NO: 132755 - DNA, 1144 bp, Cannabis sativa
  modified_base (40)..(50): a, c, t, g, unknown or other
tgtgcaatcccacatcgcctgggaaaggtcaagtgggatnnnnnnnnnnntgtgtaggtatgggactacatagttgaagagggtttaaatagattaattggcactacctatattaaaaaggtgcatctaatttttcgatagctcgtcacgaaagaactccacagttaaacgttcttgacttaggataatttcaagatgggtgacctcaagggaatttttccccagaagtgtgcgagtgaggacaaagcatgctggaaatactcgtgttcgtttgtagggtcagtcatcagtccatgaagcagccagagtgacatactcgtgtataagagccattattctatgggtgtaagggcccaatagaggcttgaagtggggacgttacactatcagtggcaactccacttgcttatatttgtgttttgaacactaataatactagttctcctttggtttaagcaaatcaagtaaattctattatccatacttcagtttcgatctccacgactgcaactactgctattgctcctttgaatactcaatttcaccctggtatggaaatggttaatgagaatagattgtcatatatgtcgtttaaaaggtaattgatgtccttgggtggcaatattcaacatgttttaaagtacttctgcacaagaaactctcctctggctgattctaaaaacacctttcaacaacctctttctgattgcctctctgagatttatggtctttcattaatagaaaattgcagggcagcttattcggcataggttgagactcaacctcactagtaaccatgaatatcatcagttggaatgcaaagggtttagaacgtccttgtgcttttcataaactaaatctgcttaattctcataactttcatgatgtaatttttattatggaaacaaatttgaaaataggttctctttttaagtttaataatgccttatatttttctaatgggatagaagttccagagatcggtctaggagtagtttaatgttgttatggatatctcatgtaaatgtaactattttaaattatgaaattaattttattggcaggtatatgaggaaattacattgtatacccactttactttacttgttttaatttttaccttttattttcatattctttaaga

SEQ ID NO: 132756 - DNA, 719 bp, Cannabis sativa
tgtatgggcgcctagttataatttggtttatgctatgttatgattatgtttttcttggtgagtctgttgacttacatatattgtttatatctgtaggtaatagaaaatttaaggctgaactgagcatacatattagggcggttagacctggagtgttagatcttcgagataacatgctttattttgatagtcgctaggtgacaacttttgtaaatatatattttgtaaaatagttgtaactttaaagacgggatcctggattatgtataatatttatttattcaagttcaaagtttaattaagaaaattttcatcattcacaatttttctataaatcctttgattagcaaaggagtgcacaatattaaaaaatcacgataacatgcctaaactagtaaggtgtcacaatttggtattagagctgccaagttatcttctgaagataaatcatgatatgtaaaaacatcattagagttatgctctactcacaattcagtaagcctttttatgccttagtagttttctttattagtatgctataagaaaagcctaataggaagcatgttagtagcctgatagctgcataggtgcatgttttattttctcaggtaagcggtaattaaaaattaatcttaatcgcgatttcatcaagctagctcatggttatgcaggttgttctaatagaatggacgccaagcagtgttggaattattttacca

SEQ ID NO: 132757 - DNA, 1725 bp, Cannabis sativa
ggacatctatctaattgggtaagagttctagtcatttatcctggacagggggttgcacatggataatttttcattacaggataatatggagccataaatcctcctcagggagtagaccatccacaagctccaaaaatccaagctccaaatgcataagcccttcaggaggcccaaaatgctccaacaggaagaattgttatagccctcggtcccgaaaacccatatcctcttagagcagctcagcctgcactagatggtcacgtgaaaactatttttggtgggccacacattgttggaagcacctgaaatgcacagaagtatggtgcttctttaatttattttttttttactatttctttcttgaatccttagtccttttctacttgagatgtgtacatggaccttgattaaacctgaaaaaaagttatgtatgcatgttctcattataatagtgcacacttgaaattttgtgttaagaaggaacaatgcttcctttctatggtttgtggtaatgactaataattctttcaccagatgcgttctgacatgttatatttgagtatggttagaaatcttgaaatgttccctatcagttagcattgcaacattgtcttttgattcatattctttattgtggcatttgtattaggcctacatggagaaagtgttttaattcctacttccctcctagagttttctttgtaaatgtgtcaatgtgctggacgaagaatttggtgacttaaatatatgttttaccttgatttttggataaccctttattgagtacattatttcttttccatgatttgaaatttgagtataccttcatgccttccacgaatattatagtatatttattactcggacctttacttattttttctcttttacttttacttaatctatttggaactttcaataagtctcttcttcacttccaacttactagatcttacaatcttttttttttttaaatatttcatgagggctatatagtaattttataatgacacatattcattttgttttattaaatgaaatgtatatatattgttttattttttatcaagtctcacaccacacttattttatttgcttagtaccccattaaatgcatgcaaatccttttaaagttaaaattaatattatttataatattatatttagtatgaccaaaattcatgactcaaattgaaagagttaatttgtttgtagaattaacaaattataccattcttaaataaatattacaagtaaatattggttttggcaatattaatttaaacttctaacactttaaagtaaatattaattttggcaatattaatttaaacttctaacactttaaagtaggttagacatctaattacaattaagttggatgttaaaaaataagatttaattagattggattagtaattaaatgtatatctcaaaatctaattaaaaattgatctaatcatctaatccaattatattagattgaattttgaggtttaattaaattagatcagatgataattttttaaatttaattactaattagattgaatcagattaggagaaaaatgattggatcagatgtccaatcctactttaaagtattactcacattttattttctatttattaattacttgattcatattttctaaaatatttataaaaattatgggaatggtactatatattattttttaatttttttttatcaaatttacggtt

SEQ ID NO: 132758 - DNA, 987 bp, Cannabis sativa
atgactttttgcacacccctacttcctctaagtcaagtgtaggcatactttagcttgacataaagaaaagtaaatttggatacttacatgtcaagacaataagaagatagtcagagcagtcatacgtccatagtgaagggctttaaggctaaacaatagtagtgttcaaaaataaagtgtctataggccaaaagcaagaacatgaaagcctcaaggccgaatatgaataaaaaatcaattcaaatgcataaggtcaaggcctcacaagaactatgcatttcaaaatgcataaagttgaggccactcgagaactgtacagccagagaagaaccagactgagttcctataggaaccacgtaccaggctaaatctctaaggcaaggcagagttcatggaaggtcccaagccaaaaggcagagttccttgtaggttctgagccatagataaaactctgggcaactgtaccagggtactttccaaataatgtcattgtacaaggctgagtatcagcaaagtacagtctcaagtgtaacaacttggacaaatattaagtcttaagttgagcattcaactataatagactctccattgagtttcatatagattttctaaggaaatcacgtatggactaaggttgtatatgcctacaaggtcatgacaagattcttgctaaggtcaaaataggatagaaaactggccacccgcttggaatcaaggcctaggccagtaagggttctcaagatttgagagggtacgccagggtcccatgactcaactaagaattggccagggtcaccaaacccaagcatgaactggcttgcttcctagggtgaaaccctaaagctgaacaactcccatgattaaatcctagggccggccaggtctcaaaggctggcaggcacttgatgtgcagcctgtaggctggcagacacttgatgtgcaacttgcaaaccttggcaagcacatggccggctagactgtggcagg

SEQ ID NO: 132759 - DNA, 1146 bp, Cannabis sativa
  modified_base (1050)..(1066): a, c, t, g, unknown or other
gtttgaccgtctttctctgtcgaacctagaaacatcgggttggggttgcctactgacggtttcagtccatttgggaacatgaacaactcttatagcttgaggcatgttatttgtgtcccatataatttgccaccttggaagtgcatgagatcagaattattgttgttgactttattgattctaggtccatcatctcctggaaaatatataaatgtgttcatgagaccgttaattgatgaactgaatcagttgtgggagatggttgttcaatgtcaagatgcgtacagtgaaattgtacttttcaatgtgtgtggttgtgttaaggacaataaattatttccctatttatgctctaatttttggttggagcacaaaagggtacatggtgtgtcccacttgcaatgaacacactccttccattgccctaaacaataagataggatatgttagccatagtacttgcttcaggagtacctttgttccagacattatctttaaaacaaatggcgagctctttagcctcgcttaattgttctcggaattgatgttgccaatccgctaaccactattcatcagatttgacggccttcaaggcctctttcgtagtgataactgcaatggcttccttaacgacaactagatcgccatggaaaagatccctaactggatctgtcacaattagagtctcaatcactacaacaaatatcagaattcgtgacggtcctaaaaacgatttttttagggggactgtcgctaaaaaaattgagtaactatttaaaatcgctgggaaaaatttagtattcccgacgagttaaaattgtagtaaacaaaataggcgaaattttttaataaaatgcaatttttaatggacccttatacccgacagccgtcgggtataagggtccattaaaaaattgtcaacaacttctcgccacatttccacgttgccaaacctactttttttctatttttcacatgcccacctatttcttctcacctatttcttctttatttcccacaccctgaaacgaaaatcttaactctccaaannnnnnnnnnnnnnnnngcaccatcgccctcctctcttgtcgtcttcctccctttctcgatctccctttcttttcgtctttctcgtccatcgatctc

SEQ ID NO: 132760 - DNA, 562 bp, Cannabis sativa
ttaggtaagacaagtatttattcttccttgattgacgtgataatatgtagccgtcactaatccccttgattagggcgtaatcattgaagaatgggtttaatgcatctaacattcctttttagatccatctgtagacgcctcctccatgctgcatttaatgcatttatataattaatctctacggccttgagttcggtccaaaaggctttacctagctcccaaagaggaacaaaacatctccttctccagacacagctacagctctcgaagggacgtctccatcatgttcattcaatccggacaagtttacttgagacatcctaaacccttcttgatcataagactaatttgccacatgcccaattgtgaggttgccacgtatattggggaaaaaagggcaacaacagttaatctataacgtattatagatttggatccaactgttagcacttccagaattaacacaataaaggaactaatattcgatctattaggaaagattggattctactattttataatatattcccaaccactcatgttattaagttcccaaaataga

SEQ ID NO: 132761 - DNA, 678 bp, Cannabis sativa
cacgttttaaatcacatcattctgggatgtctcgacaggaacttggttccaatgaccttgatagcgagctggagctttctcccctatcttttcgaggtcgatgatgtacaccttgttgcttctttgtttgaaggcttaacgcttcattttgacaatcacagttctttttaacagagagtacctcagtagtcatttgaatgtcagcttctaacttgccaagactataagtctcattgaaagatgtttaaagttaattagtgaaagtaacaagaatgcgccttcctatagcgagatatgtgcctcgcttattaggtcttgaatccaccctactgttatacttagtttgtacattatacgctaagtgttttcacagtcaatatgcgtagctttttgtcttcctaggtataaagaagttgatgtctcacgttatgcattcaatgcagtatggtttctcgttaatacccgaggcaacaatttgtatatcgttacctcgcataagaccctatagtcagcgagttgcaagtatactctattacttacgtattttaatgagttattccattagaagtgattattgttccacgcatcgatccatatttcccttaactttacacgtgtcctctattgaaatggtagccagttgtaaagcccgcttcgttaatttggaaattagcagtt

SEQ ID NO: 132762 - DNA, 621 bp, Cannabis sativa
caggtgttgcaactggtgatggcttgcctggttttggtctgaaaatgaacccagaatatgagcattgggttgtctgtgaccaattgctcatggggtggctctatggatctatgacagaagccatagccactgaggttatgggttgtactactgctagatctctttgggtttctcttgaaaacctatatggtgctcattctagagcaaagatggatgatctgaggacattccttcaaacaactcgaaaaggatctacaccaatgtctgaatatctcagacagaaacgatcctggtctgatcaacttgcattagctggagatccatatcctgagccacatcttgtttccaatgtgctcagtggtctggatgtggagtacatcactattgttgctcttcttgaagcaaagaacaacatatcaccaatcacctggcaagaacttcaagagactcttctgagttttgacagcaaactcgaaagacttggtggtctaattcctggcaacaaaacaggtcaaaactcaggaaacaactcaatgccatctgctaatgttgctcacaaacaaaaccagaatcacaacaacaacaatggaggtagaggcagaggcaactactcatctaatt

SEQ ID NO: 132763 - DNA, 1231 bp, Cannabis sativa
ttatttatttattttaataatttttttgatatagggttttatttttttatttttaaaaatatttctttatttatttatttttattgtattgatattaataatttgtttttttctttgcttatttatgttgttgggacaaaatttcaaaataaccaaataaaaattccaaattccaaattaattgttgtaaggtataaacatcaatttcattcatcataaatgaaaaatccaataaaatttcagagataaacaaatacaataaaattaaagatctagctaatcccataaaaattaacatatatgaacacaaaataaaaaactaaccctaaaaaataatttaaaaaataaaatccaagggaaaacaacatatttcagattcagtaaatccccgttctaagttctcaccacttctacaaactcaaaaccaccgcctatatcagtaatcgatcctcctcacgcgtacccaaatcctgaaaggttctcaatccaatcctgaagtcacctgagaaggaaaaaccattagatctaagactaaaagttagagtgggagatgagcaagagagagcgagagagggagatcgggagagagaagtattggagaaatggtggacttcttggctatgcctgtagacggaggagttgggcatgcgaggaggattgacgacaatgatgacaggttggtggagctgcaattgacgacgcactactacaaaaaaggggtatttttgtcggttttcaagtgactaataaagattttgcgtcggtttaaaaaaccgacgtataagccatagacgcaaaatgtaatttatttgcgtcgtttttaaaatgacacaaaaaactattttcgtcattttataaccgatgcaaaacattataaaagaagtaaaacattctgcgtcagttttgaagtgacacaacaagctatgcgtcaatctttaaccgacgcaataagtgttttttgcgacggttttaaaatgacacttatgtgtacacagaacctttttcacggtaaaactttccacatattaaaaaaaatcacaaataaactaatattattttgtccatatataaaagataagttaatatcatatatccatattaaaacatgtacattattaactgaaagttcactattgaaaaaaataatataaagttagaattaataaaagataaattcaaattgagactgaaattccgtattttaatattcctagtttgattatttaattaa

SEQ ID NO: 132764 - DNA, 978 bp, Cannabis sativa
accatgcaacataaaatattatttatgatctttattaatgagttaatctgattatattgaaatgagttttatttagggtacaaaacctaacatcctgcaccacgaaacgccatgaacctcgaagcactgtgaccggcgaatggccacagatcagctgtgttaacctaagaaaagaaagaaggagagagatctagaatgataccgagaatcagagttttggaaaataataataataataataagaacaagataaaatattacctgaatgttttggagggtatgaggctcagattttcccttcgttgggtcgttcgtggttggagaaaggtggctggacgagctggtccttcatgtatcattatatattcttgttcaatatgagcaaattattatttttatagagtttgaatgttattttaagggaaatctacgacacaagaacatacaatatatatatatattttaatgttttatcattgttattttataccaacatccttttcaatttgaagtagcgtatatactgtggtactattatatattattacagtaaaatttttatcaaagaatactctatttaaaaataactatggcatgtttactgataagtaatgggaattaatggaaatggaatcatttccttacatttgtttatttaatttattaaatttaggaaagagagaacttaattaaataagggagaaaaagaggggagaacttcctccaccaattttctaagaatgccattaagggtaatggattttatttatttttattttattttttaatattatttttttataagttttttaatattaaatttataatgacaattttatcctttaaaatatgtcttaattaaaaataactaccatatactatagtttaagctcatacttcgctatcttttttttttttttttttttcaaaaatttcctactttgacgattgactatattttagctataactctctcga

SEQ ID NO: 132765 - DNA, 770 bp, Cannabis sativa
ttataaagtaatactgttatgtattaaataatatgattcctattgtattaaaatttgtggggtaataattaataaaatataaaattttatcttttatagaacctaataaaacgagccctcagtacatatatttcctagtaatcaatgttggagatctttatttgatgtgttctcacctgctaaacttaatagttaatacatcctttggtatcaatagatttttatggtcatgaacacaaaattatatacatacataggcacactataatggagcacacaaacaatgtctttatggtgtgaggtacaatctaattgaggcatttaaaatataattttttaaaaatatttttccaataggatttactttagatgaatgtttaacatattggtacaaacatattgttatgggaaattttaacacgatactttaaattcttttattttaaagtttttttaaattttactatatattatagaatagtattcattgtaaaatagggaaagtagaatttgtgatctattaaaggatagagtaaagtaaaatttttatgatgtattaatatcgatgcagataagtgatcataagtgatcttaagctaaaatatagagggaaatttgaaaaaatatgcataaaatatctaaactaatacaattcaaaattgaaaatatatgaccaatttatcaaaaatctaagaatactcctctcataacaataccccaactctctctcttcctctatctctctcggttctctctcaaccgaacccttc

SEQ ID NO: 132766 - DNA, 3061 bp, Cannabis sativa
  modified_base (778)..(780): a, c, t, g, unknown or other
  modified_base (1178)..(1179): a, c, t, g, unknown or other
  modified_base (1338)..(1340): a, c, t, g, unknown or other
  modified_base (1460)..(1464): a, c, t, g, unknown or other
gttgatcttaggttaatagatcttaatcctgagatggttaggtttgatctcaattgtattattaatgttcttagagttgttcgtgaaaactaaccaatggttcgggcgaacagaacatgatagtataattgagtgagagcgctaatcatatatatgaaatctatagcttccataagtattagaagtgaaacgattatttctttcgagcttggcttaatagtgataaatgattgggatctcattttagtaattagattagtttactaaaatatcattataagtagctaagtgtttcaaggataaaatacattaagggtagaatggtaattttgtccctattcaatgtagatcatatatagaggatctttgactatttagattagaacgatggataattcatagtgtatctatatcttggtacatatagagtgttctatataattaatagtgcaattccgaatctatagtggcgcaaagaggaattaataagttattagagaatttacttggtaaattctagctctacttattggaagcttgagtatataggctcatggtcctcacactagttgagatggtattgcttgcagactcaattaattgattttaattaatcaattataatactaaaattaggctatgtcttatttatgaatttctaataagtagggacttaattgtgaagaaaagaagttttggagtttatttgttaaataagagactttattaagtctaattaataaataaaataaatgacattttatttgataattaattnnnattattaaataaatatttttgatatttataggattgaaattaaaaaaatatggcattattaaaagaaagataaatagttgaaataaagtggtaaaattttaactagtgaggcccacattaagtggtcggccactagaagggatttttacctattattttattctttttttaatccatataattaaatcctaaaccctacttggaatactataaaagaaacatgatgctctcattctcatccaaaccaatttcaaccaaactaaacttagttttttaactctgttagacaactagtagatgagagactcattcatagtgattttgaactcctcttgctattcttaatcaatcttcaagcctttagtgatagagtatcatgcccacacatagcaagtcanntactcaatcatagtgcggaagacgatggttaaccaaaccgaaagagagaaggagatccaagcgtaaatctagttattactctgcaatagaaaggaacaaggattaaagatctgagcggaaggagtcatattactttgttgccatcaatgtaaggttttnnnaactcttatgtgtttattttattgttttagagaattcatatttagggtgttaatcaaacatacatgttagtaaatctacatcttggtaacataagttctaacaactggcctcagagccannnnnatgatttattttcatgaaatatggatttaaaatgatgattttgttgattttgatatgttcatgttggtttatatgtgaattgatgaatgtatgtgaattacgaattttttccattaaaataattttattttttgttctaaaaataatttatttagattacttttgaaaaattaaacaatattggtttttacggaacttagtttcaataaaaatttaaggagatatcgaggtttgaaattcgggtgtgtttggtgttgagggtggtgcaccatcacactaggacccttggacaagacgaggctcatgcgcgtgcttcaaacatttttttgtctgaattccttggtcacgccaccttcagacacgaccttgcacgcccaggaccctacactcgctgagaatccttggtcaaggaacctgctgatccttccctgcgcgcgcgtttaaccctgctagtagcctcttcgtgggcaactacgtgattttcacccaaagatccctattttggtgattttttcgccaatttcagatttttcaatttcaaatcactaaatatctacataaaatataatttacaatatttaaacctaaatatcaaacttttaaattaataatttttttattatttaatagattattattaatttattgatattttaagtttaaacttaaaaattaccaattttatattttgaattatggttagattttaaaattttattcatttcattacatttataaattatttaataataagatcagatattttaatattggatatattttaaattaaatgatagcataatcttttaaataattagtatttttgtccttgaactttcggcactacctgatttcgcccattctgttaattttgtttcttttaccattaaaaattagtacttttacccctgaactttgaccaatacaaaatttttccccttttatttaaaaaaaattaaaaattataatattctattttttctaaagcaattataatattctattaattcaaaaaaataataaaattaattaagaaatttgataaaaaaatatttttaaattttattttacttatcaacatgtatcttaaaaaatcaaatcaaaattatagagaatctaataaataatttaagtaaactaagattttatgaagaaaaaaatcaaacttatttatatttataaactcatatcttaataaataattaaaaattcaataaaaatataaaattattagggttttctcctagaaggactcaggtagctactagtcactaatcatagaacttatactttcatcaatatgcagtccaaatttttggggaggtaagtttgaatacaattcaaagtttaacttaataatctttgaactgcataaccaaatatttctccacctcgatcagttcgtaagatctttaaccacttaccttaatatttttcaatattattagaaattcataaaattctcaaacatttcaaatttctttgcataaggtgaagcctagagtgatcatcttaagaatttaatgatagctcatatccacccgtgaatgtacatccatattcgaatatagatgatcttacttttaagtggatattg

SEQ ID NO: 132767 - DNA, 1127 bp, Cannabis sativa
tgtaattgtgtgatatatttagtacaacactcttcatataaaatttaacactatttcatttaaccatatttgcttttacaaaattataaataatttgaaaattacattatagatttttgggttggagtcccatagtaagaaatacggataattttaaaaaatataaaaataataaaaatattataaaaatatagtctgtacgaaattttcaatctttttatgaatttagattttatttacataaaacatgatctttcaatgcctctttattggacttttgttattttttgttatttgtatattattttgtatgttcttttattgttatttttatgtgatttttttgttgttttcttgtatttttattaaatatggtaaaaaatgtaaaaaaaaaaaaaaaaactttaaacgtataaaatttttacaaaaattaatattttatgtaattattcttaagaaatattccaaaaaatattttacaagagtagtacacattttactaaaatattttataatttctttatataccaaaaacaataggaaataacatatattaagggcaaaaatgatgcttctacgtaaagtgatactctaattaccaaaaatatttgttcgttatttatcaagattagttagaagttagtttgagttagttggttttcagttaggagttggttatgctgagctgtcattccttatttgttttttgctgtattttttgtttccagctactggtataagtagcttgttcttgtgtattgtaagatctgatcattcattcaatacatcctctgttttctctgtttgtttgggctggtttagctcatcagagctgttattattcgaataggttggggttgatgatgtaaagttctaaaatactttgattaagttctctatacgtattgattctttctttgccctccatataaatatatagtcatatatttgtattattgctatgatttaaggctattttaacaacaaagccagtgcaatgtttggattttgctagttttgttttgttactttgtaatagatattgtgttagttattaatccccctttttaataatttatttatttatatacacaatccacgacatattatatatctttatatattaa

SEQ ID NO: 132768 - DNA, 750 bp, Cannabis sativa
atttatctccaaataataataattaaaaaaaaagatgtaatacaattatctcatctcatgtcatcagctatatcaagtttttgagtaatgaagagaatggtaaatttggcgaagaaagagataagaggctaagaaaccaacactaccaaacatcaagaaaagggcatagcaaatgcaagccatgtatcctaagaagaatgagagttgtaaggaacctgacatatctgatctcttatacaataagtaatgtatgcaaaacccataaacatacaatccaattgatccaccatacacaaatgacctgaatcaaaaatgcacaaactttattattattattaacttactaaacaaaattgattcttttcaattccatttcatttcaatacctctaaccaaacacagccttagccactacctctctaaactcaaatgctttcattgttcagaatatattcccacaaattgtaaataaatcatacttatagtctagtaatttcccccatccaaccaaataagaatccctctaaacaagaaattattttactgaaacatataatcatttttatcaatggatataaaataatcctctcagttcctgcaagagatgagtagctcatgttcttatatatgacggacaatgttctctaataatcacattatagggtccataatttgaacatgccaaacaactctactatagctaaaattaataacctcaaaagaaatttaagtacatacctccaccaccat

SEQ ID NO: 132769 - DNA, 599 bp, Cannabis sativa
  modified_base (336)..(344): a, c, t, g, unknown or other
ggttgtttgaacattggtaacgggtggaacgtctgtgttatgaatgccctggttagctgctgaactggtattcccagtctcttgaacaccaggcgcgatttcaaccacaagagttgtcacaccgcgacctacagctaatggttgtttaggattcgtggttggcggaaccctcatgttcccagggtttttgcaatgcaggatccacccccagtggattttttgggtcaaccacgcctctgcgagtctgtaccaccattgtatttgcgattagatttgagataaagaacgatccttgatttcaactctcaattaaagcaccaaaatgttgacctcgcnnnnnnnnnacgacaatgagtctaatttgtaagtgacaagtagtttaatacgagtgtaatataacaaaacaaataaagacacaagaactttatagaggttcaaccccaaccagttcagtattagcctaatcctcgtaggttttattgacttacgaataaggaaaatgattcattttcttatagctcttacaatagtatctctaaatatgaattcttagatagatttttcgaccatttgcccagtgaatatgaatcactatttat

SEQ ID NO: 132770 - DNA, 975 bp, Cannabis sativa
caaaaattgagcttcaagcgctgcaaaactacaaggtactgtcgcaatccgcctattctaaactgcaaaaaaattgtttttttatctttttttttagctatataaaggtcctttttcaacacttttcagcagacaatcattagggatgaaaattgaagcaaaaagcagctctggagacttttatcaatatttttcgacgagatcttttcttcaactcttttcttatgttcttatttagttgttataaaatatttataatgattatgaatagttagactttttattagattgttaatggagattatttgacactttattttggttttaatatgatttagttcttctttttttaattttgtatgtgtatctatttcattcatacttattttcttttaattgcctaattactaattaattatttaatgatttcaatgtgaaatctgagaagtgagtgttattttatgctatagtgtaatagacatagatttcgatataggacaagagtacctacatagtttatgtagcatttagaatttttatgcctaatgccttctatgtattaaatttatcacgaaagtaaaaaatttacaataggttgagattcatatgttctagcctatatataagtttttttagtgaatccgctatcacatgaaaattcaaatttaagaattaaattatattaaatcatacaaagcagaagcaatagaaattaatcaccctaaacttgaatcattgttaagtttaacatcattaattattattatttttttgtgtattttgttatttaatttttgcttagattatttagttttaaaatcatttcctttgattaccaaatagaaataatatttaattatttggtacttaactatagtcctgttgtgaacgatctcacttacctgagtattacttgttaaaaaacaataagtatatgaaattccgtattttaatattcccagtttgattatttaa

SEQ ID NO: 132771 - DNA, 527 bp, Cannabis sativa
ggagaactgataatccagaagactctggatattgaaaaattcattgaagcagttgatagagcagataaaatacctatgttatccattggcggtccgaaacaagaaaaagcaggagctactgaccccgcggttgctatctctggaatggtaatgtttgaaaatttatatgaatatatgaattatttatgaacgattatgaatacaaaattttatattgaacatatagttaacgttattaattttatttgagctttaatcctacacgagctttggatttataaaaaaaaaaaaaaaaaacattgagttagtgtgagtattcgaacttttaaactctctcttcctctcttagatagaattactgtattagataatatgagtagtgagcttagggactagtaccttatatatacaagtgaaataaattaaaatatttagtaattaaatagtaatcatgttagaattattataatggactaatacaatcataggtttaattccataatacacaatcattaattatgtgccta

SEQ ID NO: 132772 - DNA, 3042 bp, Cannabis sativa
ttcttgtacatgttcgggccacactagaccaaacaggttggggtctaccagtgattgtatttcgtaacctctgattttgtcgcttaggtcggcacatgaagtaaactataatattttgtgaaaaggtttatgggatcccgaaacttgtatcttttggtttattgtaaagttaaaaattattacaagttatattttcattccattgttaataaagtttaaattttcccgtgcttatctttcaaataatcccggattagagggattagggtttcaatatcggttgtcatagcatgcctatttgttagggtgttacaatttggtatcagggcgccaaggttttttaacttcctgtagaccggctggacatgtacaatcattgtcaaaggcaagctcggctcgtggtgcagtaagcgttgagagtaaatgcttaactgcttatgtgattatttatttaccgctttccattttaggcagtatgtgagcatttattatatttatgtgacatggaagccatgtttagtatattaattgataaatgattatttatttgaaaagaaatagttgagttaggggtttaaaggcaataagtgtgtaagtgtggtattggtgcctgactcgtcggggttgttgattacagggttatttgagaaaatggaccctccacaatcatctagaccataggacgagcaagtagagcctagtgtagaccaaaccaatccactggcaccgcctgctgactggcaacaaatgtttcaagaaatgcgatgcatcatacttcgtgaagaagaataattacgtcggttgaggcaaccggcaccggtagcccttgcagaataagtgttaccaccagctcctgtgttagtggtgggtaaccagggattcatactgccgcacagagattcaatatttgaacgctttgtaaagatgcaacctccaacgtttttgggaggtactgatataattaaagctgagcaatggatgagtactatcacctacatcctagataatatgggggtgacgggaacaaagagagtgaattgtgttgcctttatgttacaagatcatgcctgcgtctggtgggatattgtgggccagactcgagatgtaagcacaatgacctggaatgagtttaagagtctatttgaggaaaaaatttataacattgttgtgaggacgtcacatgttgaagactttgtgaaattgactccgggaaaaatgattgtggctgaatacactctaaagtttgcttggctgtctaaatttgctagtgatttggtgtcgacagatttcactaggaaacaaaagtatgtgagaggactgaatgccataatcagtcgggacttcaagattaccactactcacgacacattatataagaaagtggtcgaattagccttaatagctaaggaggctgagaaacatgtaattaaggagcagactgcaaaggatgccgccacgacatcgaatcctcttgtaagtggtaatgtcaaaaggggacagacaatggtaaccctgatcacaaatggaagactgattctttcgaaacatcagggggtaatagaaagttttggggaaacagaggtggtcgttaggggcgcggatcttcattcagatcataccctgagtgtccgaaatgcaagaaacaccatcaggatgaaagtcgggccaagacttattttcagtgtggcatggtgggccactttattagagattttccttaggccaagaaagaagagttgaagaagaataccaaccagaactatggacggctatttaccatgactcaggctgacgtggatgctagtccttcagtggtgatagatcagttatctataaatggttgttcttacactgtgttgtttgattcgggagctactcagtcctacgtgtcgtgtagagtaatagaaaattttcataaaccatgtgatgtgtacgcctcggggtttggtatcctgttaccttcgggagtcctaatagtatccactaggtggattcggtccttgtccttttggattgacggttgtgaactaaccgccaatctaattgagttgcaactatctaattttgacataatcttgggaatggattttctgtctaagtatggagcaacgatcgactgcaagcgaaagatggtggtgtttgagcccgacagtgctaacccaacagtgtttgtgggtaaagttcagggacacgcatacctagaataacacttttaaatgctaaagatctgatgtgcaaaggttatttgggattcctagacactactatggataccagccaacctgtgtcatctggacctgagaatacaagattagtgtgcgagttccttgacatttttcctgaagatctaccgggattgccaccttcctaagagattgaatttgtgattgaattagtttcgggagcgaaacttgtatcaaaggcaccgtaccgaatggctccaacagaattgaaagaattaaaaatccaactctaggagttactaaacttggggtttattagaccgagttactctccttggggtgctttggtattattcgtagagaagaaagatgggtcactgcggatgtgtattgattatcgagaattgaataagcttactatcaagaacaagtatcctctacctcgaattgacgacctatttgatcaattgaagggaaagacggtcttttctaagatcgaccttcgctcaggttaccatcaactgagaattcgagaggaagatatcccaaagactgcattccgtactcgctatggacattatgagtttctggtgatctcttttagactcaccaatgccctagtgacatttatggaccttatgaatcgggtgttcaaggattgcctgaacagatgtgtgatcgtgtttgttgatgatattttagtttattctaaattagaagaggaacatgaactacatctcatatcagtattgcaacaattacgagatcacaacctctacgctaagttcaaaaagtgtgagttctggttatcacatgtctctttcctagggcacatagtggataaggatgggatcatggt

SEQ ID NO: 132773 - DNA, 670 bp, Cannabis sativa
  modified_base (614)..(639): a, c, t, g, unknown or other
atgttagcttctgactcgccagggttgtaagcctcgctgacgtaactggatgaagttataggaagtcttcccatagtgagatgggcacctcgcttactcggtctcgagccgatccgactgttacacttagtttgtaaattatacactaagggctttttcaattgatagatgttgcttttgtcttccgatgtgtactgtccttgatgcctcgctattcgcattcatcgacatatggtttctcgctaatatagcaggtcacaaatatactctcgatccatattctctttttatcttgacacgtgtcctccactgagatggcagccgaatttcgggtatagcagtatcatagtgaactatagttatttgagtgatccaccatgtaccaagtttcagtttcctaatcgaatcgtactatcattttaaaagaccacttaattaggagaggtgtacaatatttaatgcacattttaggtcttgatccataataatcgagtaaatttgaccacatagtgtcgtactgaattacagttttttaagcgatctaacatgtagcaagttttagttgcctaatcgagttgtaggatctttatggtgctggaaattattttaccagnnnnnnnnnnnnnnnnnnnnnnnnnnttattaacatcctaaataagaactttctaaa

SEQ ID NO: 132774 - DNA, 1122 bp, Cannabis sativa
aaaaactaaattttaaatctattttaaataatatctattttctaaaaaataaaattaataataattataatattttttagaaccaaatcaatttaatttgttttattgttcacaaccctagaaacgagaatcgtctaaacccagacaagtcttcttcttcttctccatagactcagctccaaacgccaacggttcgaacccttaccgttctgttagcctgagaatcttaaatcgatatggttcataagaacccttccggagaggagaaggagaaggagcaggatatggattctattgatgccaacactgatgaaatcacgatgaagaagaagaacataaataagagacgtcttttaaaggaagcttcggaggctagacggcgtggaatttgctacctcagtaggattcctccccatatggaccctttcaaccttcgtcagattctctctcaatttggagatattcaaaggatttacttgactcctgaaagtaaatcacttacaactaccatactctttgctatgctatggctatggctatccaattcctttgtttagtgttaatgatttgtgggtaatttattgcagattctgcccaagttcgacgcaagcgtcctggtcgatatcaggatcaagcattttccgaagggtatgtatatgcataaatgaatcacctttagctgttggaaaattgttcttttgttttcttataccattttttattgtttgttgaaattttgtacaatgtagatgggttgagttttctgataaaagggttgctaaaagagttgctgatatgttaaatggtgaacaaataggtatgttttatactgatcaaattttattgttatgaacttatgattgcactttctctttgtagtgaaatattcttatgaactaaagctcaagattaatttttggagaattagtatttttctcctaaaactttaacatttaccaaattgtgcctctgaactattgagattattagattcaagaacttgtaaatttttattttattttactaacgggcgcttgatgtgaatggaagtttggtgacacgatttggtacattaacaatcatttcgttaggtgtttattagtaaaattggacaaaagtact

SEQ ID NO: 132775 - DNA, 698 bp, Cannabis sativa
taatatatatcctcatattagtacatggaagagagattctatgcatgttcgggccaacaagttaataaactcaaaacttcaatcgtttttagtaagaatacttccaatgaaatgaaaagagatatcaaggaagctttggggatcggcacacctgaggagaacgtcaagtatctggatctttccctgttcagatcaagatataaggacgcatacttcaattttatcctggataacctcacttcgaagttacaacggtggaaagcaaaaatcctgtcaaaggcgggtcatgctactcataaaatttttggtcttgtctctgcctttatatgctatgcaaactaccaagctctccaatttccttgctaccaaagttgatagttttgtgcgtgatatttgttggggattcaaaaaaggtaaccatgggttgcatctaaaagcttgggataagctctgccttcccaaatctcttgggggacttgggttccggaaaaccagagaaatgaacttggcctttctgactaagtgggggtggaacattttgaatggttgtcaccctctgtgctgccaaatttaggaatcaaaataccctaaatggaaggagttcctttattgtaactacaaagattcagactcctagttctggaaaaatgttgttaaagccaattcgatcttaaggaaagatgcctataaaatggtga

SEQ ID NO: 132776 - DNA, 527 bp, Cannabis sativa
ccaaacgagttgtgcccttaaagcggcactcttcttcccctatactgaaacaaaaataaaacttaaaccgcgtttgtgatagactatattactctaatttgaggacttattagaaactgatcttataaaataattacaatatacattgtcaaatcaaataatcccttttcatggaaactattaaagatttatcctagttcagccaaaccgaaagaccaacattgagttgtcctctcaagaattaaagattttagccgttatgaaacttttttacgacaattatttgtagaaaattactatttgtcacattaagatgttcaatacactaacataacatcttataattggtattaatatgctactttttgtagtgcttgacagaaaatttctcgcatttgtatgatataaactttagtaaggaagatatatataatatatggtcacctggagaagtagtagaattgggaagagggcaaagaatttggagaatcccaagtgttgaaaaccattgaataggccattgaaat

SEQ ID NO: 132777 - DNA, 696 bp, Cannabis sativa
acaataaaaatgtaaccattgaaacctcttctatatatgtataaatattaactatttatatcattaaataaggaccacatttcgtggaaaagatcagctcagctgagatagtttgggaaaaaatcagattgtggaccacgacttgggtttatagaataaaacatttcgaggatctctctttcttagatctgtgtcgagagtggaatacactgatgtaatagatctagaagagagtttttcttttttgtatgtattatattgatatgggtgctttttttatgctgccttttagtttgtcttactacaattcttccgccacaagtgagggttttagtaacataacggggggaggtcggtctaagacaagcgacctctttctcttttttcaaaaaattaaatagggaccacatcacttttaattgtatggttgagattaattacatatcattgtgtataaaaaatgtgtgttatttgggagtgtctcaatcattattcattttattaatgtgagacaaaaatttataacttaatacaatttagagaatattcctatttataagtgactcaagtttggaatgagactatttttttatactaaaatagaggttttcttgtttagaaaaacattgtgcgtttggagagtcataatgtaattgaatttgtgtgtaattagaggtaattacacaatttgacatg

SEQ ID NO: 132778 - DNA, 654 bp, Cannabis sativa
tttatttagggcatataacccaacagactaggattacatcctttgcgcccacaaggcaaaattaaactatcgtaattaggaggccaataacctatgaaggaaattcaatgagagaactgctataagaggttaggatttaatgagagatcctttacaaaggaggctcatagagagatcaggaagggtccacaggcatgtagacaatggacaaaaattctaactaagttccttgaccacgatgacaaaacctttcatgcttgacaacgatcgaatcttgtcggatagaccgtatggcacaagcagccagttcctagtgccaggagacattggaagacaacaaagcaacataggagaggaagtgttacatgctggccaggcccttgccggccaccattatgactctctctcctagtatatttgagaacaagttgttccaagggctatagaccctattcttgataagctgggtcctaggataaccaacaacacacatgacaacaataactcgaggagcgagagctagaatgactttgttctgtcactgaacaatagtttcaagcaggtggatcaaccaaactcaagaagttgatgaccaacctgttgggattttatgcctaaaataaaactcatttcaataaaatcagatttactaat

SEQ ID NO: 132779 - DNA, 959 bp, Cannabis sativa
  modified_base (898)..(912): a, c, t, g, unknown or other
ggcccacccagtccaggggcccaacttttttttttcctcttttaaaattatacatttttttactgattttgaaaaataccacattttttctaacataagagcctaaatttttttttccctatagcccactttgtttcagggccggccctgtggacaagcattgtcatatagtgttgtatggtattgtcttgataatgttgcgattcgagctcatgttaaagatgaaatacactatattcttgcacatattagaaagatgtgcttggtggtaattcgatgactccaaaaataaataaggaacttgttgagaaaattattaaggcattctctatgttacttacaccacagtcattgtcaatatgtatgaaaatcctttaaaaaacaataatattttaaattaataaaaaagctaccacaaagaaaataaaacttgttacttaccaatttagttgtctacatatagacattgattgaagtttatatttgtccttgtattatagaagttgatacactccataaaactagcaaggcattatgtgtgttgattcctttgtttatggagtatcgatcgacttctatactacaagagcaaatatagaagccgatacactccataaaactatcaaggcattttgtgtgttgattcctttgtttatggagtatcggcttctatactacaagagcaaatatagaagccgatacactccataaaattatcaaggcattatgtgtgttgattcttttatttatggagtatcggcttctatactataagagcaaatatagacttctataaaaaaaaggaaatggcattatagtgagaggagagaaatcacaatctgaaaggagacgatgaaaatgtagaagagactataatatgggaaatttacatggtatnnnnnnnnnnnnnnnttttttacaaaaatactgttagatagaattttttacttttttactgt

SEQ ID NO: 132780 - DNA, 855 bp, Cannabis sativa
aatattattttattttttaaaaataaatatataattaaatattattataatatgtataaagttttaattgtatacaagcagtcctaacgtaagagtatgcaccttatatcttaatgatcacaggatctaaaatcaacagtcaaaaaagcttccctaccgatagaaaacttatgctaagtcctaccataatcttgccttgcccatatatatatatatatatgaactaatcaaatttattatcttattaagttcaaacaaatggaccttagtccaaaacttagctctctttatttcatgtcatgaacatgaaccatatttgtactagaagtgaaagttttaaatattgtagagaaatttaaacaaaatacttaaaaccacatcgtcataaatatatacatatatatttatgtttttttacatgtattttttttttttagaaacaacattatttcttgtagcaacaatatgataataactttgtaaaaaattaaaagagaaaattacatttattattggattttaaaagttcttaggataaatatggtacatttaagtttgaccaatttatatggtattttttttgtttttaattaggtctttttatggtatttgatatgccatatatgtgtaattaagttttcaaatcatatatttaatgtttttatttatttaggaagttttatttgtcattgatgccggaaaagtcaccggagtttgctcccggtgctggaaaagtcgtcggagcagcgatcggtgccgggaagtcgtcggagttgttgtcggtgccagaaaattcgtcggaattggcattgtcgccagaaaaatcactgaaaaaattaccaagaaaccgatttc

SEQ ID NO: 132781 - DNA, 837 bp, Cannabis sativa
  modified_base (26)..(48): a, c, t, g, unknown or other
tttaaaagttcatatttagggtgttnnnnnnnnnnnnnnnnnnnnnnntctaagatcctagtaaaatatattccaacagtgaattcatgagaagatgggggaaacgaaggagtaactgccagaggaaaaagagggaaaatggagaatttgaaaaaaaaatagttaaaaagaaggaaagtagttaaaaagaaaataaccgcaacagaccaaaaattggcacattttgctatgcaatgcatacttcaaatattttattaatattaaaagaaaaataacaaaacaaaattttcttctaaacctaaaaaatgatttctatttttttttacacaatccaatgccacaaatcatttctcctctcatcttcaatctcacagaaatatttagcgttctacaattgccctcgtcaaccacattttatttttttaattgagtttgcaaatttctgtttagcctacatatatataaatatatatataaagtttagagtaggatactttagccttacattgtatatgagagttttatatttaggttgtatttatttatatattgtatacttaatttatatatatatgatctgagataaaaatatcataaaaatataactacctcaacataaatgcccaaaaaataatatcagtttttttcaatgaattaatgttattttttaaaaatattagtaatttaacataaaaaaaaaaaaagaatcgatcaaaaataaccttaattggatttgaactgttatgtggattggatcggatccaaaatatgaaatccacacttagtgcggatcagatgttgtttgaccaaaataatacggattggatcggatgaaca

SEQ ID NO: 132782 - DNA, 1511 bp, Cannabis sativa
atttcttctactcaaggtgcgtttctctctgagcgaattatctttgataacatttacattgctcaggaacttgttcatgccataaatcatcgtaagcatgggaagattggctgggttggtcttaagctggatatggagaaagcgttcgatcgtgttgaatggagctttcttacggctatccttcaacgcttccagtttcctcctcactttattaaccttatttttcagtgtgtatcctcaacatctatacgatttagtatcaatgggcaaatcactgatcccatttttccctccagaggcatcagacagggtgatcctttatctccctatctgttcctgctttgttctgaaggtttaactgctgctttacgtgttcaggaaaacttgggattatttaaaggcatttctattgctcgaactgcccctgctatttcacatttactctttgctgatgacaccctcattttcaccactgcctcttttgcttcatgtaattcccttaaagaggccctcactctctataatcttgcttctggtcagaaagtcaactactccaagtcttctatccattttcccccaatactccccctgcagtctcttcttacttctttgatacacttgggcttgaagcaaaaccttttattagcaaatatttaggggtcccgcagtgttttggccggtccaaaaaatccagctttgattttattcttcataggataggttctcatctttcagcttggaatgagaaacttttttctaaagctggtaaagaggtgcttctgaaagctgtaatccaggcaattccctcttatgctatgtcttgctttcgtctccctgtttcagtttgtcagaaaattgaaaagatgatggctcagttttggtggggttcgatgggtaagggttctaaaatccattggaaagcttggaccaatctttgcacttccaaattctttggtggactcggattccggtctctagttcatcataaccaggccatgattgctaaacaggcgtggcgtgttttgtctaatcccaattctcttcttgcggctatcctcaaagccaagtatttcaagcatactagtttccttgaggctaggcttgggcattctccttcttttacttggtccagtcttctttggggtagggatcttcttaatcaaggtttgatgtggaaggttgggaatggatgttctatccgaactttggaaaactactgggtccctgattctcgatttctcaagttcgtagccaatgatccgcctcctttggataaggtaagttttttcattgatgcaaatggtcattggaaccgtgctaagcttgatcaatactttgaccctcacactgtctcttctatccttaaagtcccgattggtggccttaataaagaagatcatctaatttggaataaggacaccacaggtatgttctctgttaaaacgggttatcatcttgctcacactgtttcccttcctccttcctcctctaacttttctttcattaaaaaa

SEQ ID NO: 132783 - DNA, 933 bp, Cannabis sativa
ttaggcctggagcgtacggtccttaggacagctgggcttattttgtatagtcgctgggcgacaaacttttgtaatatgcacagtgaaacttttataaatgtttttgtaaaacgagatcctagttcaatataagtatgttattttgatacttacaaatagttaaataaagtttaaattatccacaattttcaataaactcattgattagtaacgagctgcacagttaagttaaaaatcacgttaacacgcctaagctaatagggtgttacacaaggctagggttaaggcttttatataagaggcataaatcttaggttacagtttaaatccctagatatttgtataggttgctagataattacaaaagaataaagtgcccttgaaagcagatattatctagctattttattgggcttttagggaccaattcgcagcccaatcagcagtcaacgtgtaaagttatctagaaattcttgtcgggtcattcctggccggccatggtcctgccaaggtttggcaggtcatgttcctgctaggatcttgcaggtcactatagctataccaagaggaggccatcctttggatgtggaggccagccttttgcaagttgaggacatcattgtacattgtttccttatagaggtcaggttcccttggtcgaatggaagctcccttagtccggaagtcacttcttgaccggccagcttatgcacagaacctggccggcctataggatcaccctggccaacctataggcttttcttggctagctagggatgttggtacagctccttgagggctcacttcaccccattcagttaatgattgacgatattgttatatcttgcatggaggccttgttctgctactggcagggatgtactccacctgtactttatctttggcttacgtgaacatgccacgtcaggtgga

SEQ ID NO: 132784 - DNA, 974 bp, Cannabis sativa
tatggactcgagtggtttgggattggtggcatggaaggaattatgtaagattaagaaagaaggaggattgggtttgaggaggattaaagagtggaatgaggcagccacaaggaagtatgtgtgagcaattgaatctaaagaggatacattatgggttaacagggccgaccatgaccatgagtaataatggacccaagaaattttttgagtgtgttttatctaaagtaaaatcagagtattattgggcctctttttataaaaatttcaaaaatactattttttcaatgcaaaaaaatatactgtataaaaactttgagtcttgagtttaagtgggccctaggcacggacctagcccaccttagcccaaaattgagcctgggttaaatgggtgcatagaatgtagagaaaattagttttagatacggatttttaaataaatttacatgaatacactctaatattttaatatattaatcataacgatttgtttttattattttagaatgcgtgtactgagagtctctactctcttaatcttcttctatttattttttttcaactatttgactctttttttttaacatattttattgtgagtctctatttactttaatctatattttaaagtaaacattttcagaatatatatattcgtcatatcactacatcatcagtactaataagattaatataaaaaaaaatgactttttcattattttttcttttttcatttaattaactaaattctaaaatcaacaaaattagtgctttcaaaaaaaaaaaaaatcaacaaaattagatacctcaattgattctaatagattactaaaaaatattttgttactcatatttaaaaattagcttatagcattttagagaaattaattttattgaatcattttgatatacatatttaagaaacaaaatggtatcttaaatatcataaaataagttacattacataaaaaaatatc

SEQ ID NO: 132785 - DNA, 1001 bp, Cannabis sativa
atgcttctatatggtctttgtaatgtcttctatggtcttctatctcaatggttggatcaaacacctccttcaaatggataggttgactcttcttttataatgttgttgctgtatgtattttgttgtgttatactgagaacgttagttgagaaacaattataaaactgttatatttatttgtttgagtcgtgataagttgttggagtcttgaagagtttgttattttgtgctataaagagctttagttgagagctataagattttagcccatgaaacagaaccgactactccaagaattataatagtatgttgacgcttgtagaaaatcttgctttatattccttgtaacttattgaatgtatttcgttatgaaacaattaatatggagatttatccaatatgaagttttcgtacagattgattttataagtcttaattagattataaacttctttaactcaatttatcaattgaataggaagaagagaaattgagtaattacattatgatgtaaaaattagcaaaaaaactattttgagaaaaaaaatagtgaaaactcaatttttttttaattattattagagtgaaaactcaaatagttgattatgtgtacttttttttatagtacaaatttattgtgcacttttagttgcatttatttgattagtgaatttattttggtgacatttggtagtatttttgttattaaattttaattacaaaactaaaaataaaatttttgtttttaaattttatttttaaagaacaaaaatgtgttttataaccacttttatttttcaattttaaaaagaaaaaacaaaagtgtcatcagtaaatatcatttttattttcatttgttgattttctttaagtcagggccaggaagatcaggatcgggggcaggtccaagtctaagttatgatcagaatctaaaatattaattaaagaaagaataattagtaattttgtgccctgaacttttgacaatattgattttggcc

SEQ ID NO: 132786 - DNA, 839 bp, Cannabis sativa
aaatataaatatatttaaaaaaaaacagtgaatgtcattgctacagtactatagcacatatgtcgtgcactctagtcacacgacatatttgatgaagtagttgaagtctccttgattaattccacccaccaagtataatttgaaagagtaatttgcaattaaattccttaacctttaaagtttggtatagtaaaatccctagactaaaaaaattatggttaaactatccatcctctacaatcgttttgctctaaagtcctttcgtccattttggtttgttaagtgccaaagtagactgtcacggtgtatacaagtgtacacgtggtaaatttttattagtccacccataaataatcataggccagataaacgagaaactactctttcaataagtaactgtgataaatgcctagattagactggatttccatagaaaccacagaaattaaaagacatgtaactctcttttactgctatagtgcaactaatatgatgaagataatgaatagtaacctgtaaattagatccccacactaaacaaagtccaccacttaacccatcactcgtgacttcaaatccattagagaaggaatacttctggcataatatagacaaaaaaacctactggaagtcttgtttcttgtaaaaacaaaaggtttgatttacaatctttaaggatcaaccgtaaaaattgtttacctttgttttgaccacgaatattccaagagagaaaatttaaagttcttttttggcaagttagttgacaaaatattttttcttttatggtaagattgttttgcattcatacccgatttctattgggttttatgtcctaaata

SEQ ID NO: 132787 - DNA, 819 bp, Cannabis sativa
  modified_base (767)..(780): a, c, t, g, unknown or other
tgaatgcatagcaatcttaccataaaaaggaaaaattattttgtcacctaacttgccaaaaaaggactttacatggaccaaatttgattgtatgtaattaaaagaataattacatttgagtgttatggagttatgtaggggttataaaataatgtggatgagttaaaaacttattaaataaatatttatttcacataacaacgttggttatagggttatcttgtagaggagattcaaagttttaaattggagctgaaaaaacagttcaagcaacatgtatgtcattcttactgagtgacatgttgcctattgactacatgagaaactatctcgagtgtttaatgatattgctccagccacatgtcgcttggtgtctcttttgagataaacattgtgaaacgttaggtattcaatgggtgacgtttttccaggtttcttgacaatgttttttttacctcgattaatccctcttacacacctagtaatagtcatggagagtaggatttgaatttcaaagtttgattcacgctcactataaatagagacctagggattcatttgagaatgctagagagtttctataaaagagaacacattgctagaaactatatacacatgataaatctagaaagttatttccatatttcttcatccctaagtgtttatggtagggagaaataagttttggacaaaggtgtaaaatcttgttcaagttttggtaattttcatacttgtcacttggtgcttgtgttggaaattattttacnnnnnnnnnnnnnnactaacaagtatgttggattaacaccctaatatgaattc

SEQ ID NO: 132788 - DNA, 1468 bp, Cannabis sativa
aaatgaatttaatctataaatatataaaaaataatgaaaataattaatatttatttataaataaatttagtttaagtaaatatttttttaaaaaagattagtacttctaaaaatataaataatatgttgtatattattttttagaagaaacaatgttcataattttatatgtgtagtttgtttttctaaatagaacttatagttttttttttaaacaaattaaaactcaaattttttttaaaatagaatgaaaaaatgtaagatttcaccaaattctgtattaaaaaaatattaattaagatattaattaattaccttctattaaaaaatattgtgaaaaaataaaaaatattatttatactttacatgtacaacacctaaaagagtatttaaacaatgtgacatgtgacacattacacatttttttttttttttgtaaataagaatgtctttatttacaaatttaaatatatataactttaaaatttttataaataatatattaaaaataataacatatttatatgtataaacaattcctattgtattataaaaatatattattatatatctgtctatttttatattttaaaaaaattataaacaaagaaaaacttatatataatttgtaaattacttaattactaaaaatatataattatttattatgaatgataaattatttaattttatatattaaataaaaatttaaaagataaaacataaatcaatactcttaaaaaaatatttattggacatggaaaatagcataataaaagtgttatttataatttacatggatagcactttaggtatttctaaaccatgtgggactttaagtttgaatgtgtaagtaatttatttctaaacaaaatataaaaatgtcacaaaactttaaaaatacaataaaaaaaattaggatgccatctattgatatatagatatagattttatatatttagtaaaaatttaaaacttattgggtaagacataaatcaatacttttaaaagaaaaatatttattggatatggaaagtagcacaacaaagtgttatttataacctacatagatactttaaatttgtatgtgtagtagtttatttgtaaacaaaatatcacaaaattttaaaaatacaatgaaaaaatatttaagattccatctatagataaatagatatagattttatatattaattaaaaatttaaaatttattgggtaagacataaatcaatacctttaaaaaatatttattgacaaaatgtggtattaaaaataaaaaattcaatatatatgggatatgtcatatatattagcataacaaatattaaaagtcatttcatatattttttttaaaaaaaataaaataaatgaaactacaatgattgtcggagttgttactgttggatatattttatcaggatctagatttactaccatgtatgtttccttaacatcctaatatgaatt

SEQ ID NO: 132789 - DNA, 568 bp, Cannabis sativa
tttttgtggttaagtgttataaaccgtaaagtttaagtagtttagccgccaatatccctataattaattaataacaaagatcgaaatagctccatcaaaaggtaattaaaatttttgtaaaattttgatatataccaatcatgcttcttattttaattaatatttaaatattttaatagtattttataatttaaatttatcaaatataaatcaatttttataaaataataaaaaaataatactgtttttaattaaaatactaacttactatctattctctattatagaaagtcatttcttatatgactgtaactcatgcaagcctactttaattaaagagtgtgtttaaaaagtacattgaagatgctctaaaaattaaaaataagagaacttgattaaatcataaataaaagaaatttcccatggtttttccaaggaatatatcaaggataatgatttttatttacttttatttaattttttaaaattaaatatataattacaatttttccttaaaaatatgatacaaaataactaacttaaaaagataatttaattaatttaatta

SEQ ID NO: 132790 - DNA, 813 bp, Cannabis sativa
  modified_base (34)..(66): a, c, t, g, unknown or other
ctatgggtgtgaatatggaagaacaatgaaggannnnnnnnnnnnnnnnnnnnnnnnnnnnnnnnnaggtttggttgaatagtcaagttgtcattaattggatgagtgagagtagggttgtgcatttaacctggtgggccgaccaacccggcaacccgcgccgaatataggccgaacagcccattaaaatgtgggccgaaaatagaatgggttcacatatctttaacccgtatttattgggtcagaaacgggccagggattttgtggcccaatcaacctaacctgggccgacactataagttaaaagggtttaaatatctcatctctctctctctctccttcttatctttttacactaaccctaaccctaagttctaacacacgataagagagagagagagagataaacccacttatatcgaccgcctccatctctctagctatcgacccaactccctccctctccttcctgacacacataaactaggtaggttatggcattcttgactggaaaaaacttaggcaaacgcatcgaaggtaagctatagatcttctgggatctccacttttcttttttgatttttctttgcatgaatggaaaggctttttctcaatcttagcctcttttttttgttttttttttgttgttgaaaaaatctcagcaaaggccatcgtcgaggtccctcattctcgctcttaagtcgcattctcttcgcccattttgtctctctcaatcatggttcgtctctccatctcgtttggcacttggtagagattgtgaagatttgttgaagacctggacatatttgattt

SEQ ID NO: 132791 - DNA, 760 bp, Cannabis sativa
  modified_base (46)..(48): a, c, t, g, unknown or other
attagcaacgagctgcacagtatggttaaaaatcacgtaatacgcnnntgctagttagggtgttacaagagtatctaattatggagtgcatacctaggcagcaagcactatgcactacaagaaatgtgacttcttttggcacattattgcaccaaaaaaaggagactaaatgcgctggtaaactttttctggtgcataactacatgcaccggtaaaagctgtctacgaatatcgtaaaagtgcttttgccgatgtaatgcgcttttgcataggcaaaatcggcttgtgccggagctattatttattggtataaacaacttttgttggcgtaatagggcaccgacaaaagttttggctgaatgctttggctcttcattcaacccctttatgctggtgactttcgccaacgcatttggctaaatgtgctgacaaaaattacatttcttgtagtgatgccactcaggtatgtagctctaccacctgggtggtatattcttgctttctgagtagtttttagggtgcggttttgttgatatcaaagttgtcttctacaaccaacgatttgagaccttttggaagaagatcaatcataggacttaaactaagtgttttaacaacttgaagattccctccccaggtatacacttgggcgatgtacaaacagagcacgaacgaagaattatctcaactacacatgtaatttcacgaacaacccttggatgtggggtttacttgagagtaggggtgttcgcggtgcggg

SEQ ID NO: 132792 - DNA, 934 bp, Cannabis sativa
cccaatcctatatctcatggaccagtaccatcatcaaacaccaaccaaactaccataatcccaacccctagtcagttaccagtccctcaaccacccacaaattctcatcctatgacaacaagatccaaaaatggagtccataaaccaaaagcataccttgccaccaatcaccctttacctgaatctctaacccccactgaacccaaaacacttaagcaagccttggccgatcctaaatggtttaaagccatgcaagatgaatacataacactaaaaaaaaatggaacatggaccctggttccttatgattcatcaatgactttggttgacaacaaatgggtgcatcggataaagctcaattcagatgattcagtcaaaaagctcaagtctaggcttgtagcaaaaggctacctccaaactccagggatcgatttcacagacacattcagtccggttgtcaaaccagcaactattcgattgctcctcaccattgttgtaacaaacaattggccaataaaccagctggatgttttgaatgcattcttaaatggcttactcaaagaaaccgtgtacatgccccagcccctggctttgtagatgctgagaaaccaactcatgtatgcaagcttcacaaagcattatatggtctaaagcaagcaccacgtgcttggaatgatacactgaaacaaaccttatttcaaaaaggtttttttgcttctcgatcgaacacatccttgtttatccgaggctctacaaaagatttagtgcttcaggtgtatgtagatgatataatcatcacagggccaaacaacacagtcatcaacagtcttataaaggaattgaatcaagtgttttgtataaataatcttgggccattacactactttttgggggttgaaattgctcgaaatgccactgaaatgtatttgtccca

SEQ ID NO: 132793 - DNA, 763 bp, Cannabis sativa
ataaacaatgtattttataaggctttagatctgttgataattgttatactctcacttttattcttacttattattctatttggaataatactagggctataaatatttttgaaaatcttgttcaatattcttatacaagacacattgacataagacatcattttattagggaacttgttgacactcaaacattacagttggaatctattgatactaaaaaggaattggctgatatttttacaaaggccctagattctagtctgtttgactccctcaaaaaatctttaggggttttcattgtttaattctttttatttggttctctattttgtaaaaaattttcgagtagtccttttctttcatctatttttctttcattcttggtagacaaaatattcttatgcttttggttgataattagcttagtgtcgtgtactcttcatacttttaaggttgattaaaatattcaagttacttacatatgtgtgattgggataaactatattaataataaatagttgagcaatttttcttttagtttcctcacaggtcccttgctggaatagagctacccatattgaagaatgaaagccatttttgagtaagctagaactttgtaattaggagttatgaagaggatgcactaccatagaaaagggataccttcagtatggtgtgaatgtatccaattttaggatcaaattgaaaaatgtgaaaaatgaaaaccatgccaaggacgatgatcctattttcactgcacaca

SEQ ID NO: 132794 - DNA, 564 bp, Cannabis sativa
  modified_base (38)..(38): a, c, t, g, unknown or other
  modified_base (73)..(73): a, c, t, g, unknown or other
aaacccttatgtctatatttcattattttagagaattnatatttaggatgttaatcaatatacttgttagtanatctagatcctcgtaaaatattccaaccagtttggaaatgcagatcagtcagcatgggatctgtagaatcaattggttgagttcttcaaattgttactaccatttgaattaaacaaaatcaatccaattgtgttcttgagttttgctctcaaagaaagcaccaaaatattgacctcacttttggccaacgacactaagtcttaaaagcgataaggaatcaataagattcacaaagaatataattaatattaagaataactaagaacacgatatattatatgggtttatccccatttttttggtaatagtttacttccctttttgttttatttaacttatgagtagagaagcaaaaatggcttgatctccctcaaaagccttacaaagaaaatgagcagagtaatagctctcccaaataaatgattattttatttttaaattatgtttagattttaaaaatttattaatttctttaatatttatatattatt

SEQ ID NO: 132795 - DNA, 693 bp, Cannabis sativa
ttaggtgtccataaaagttaatgcaacatatagttttgcataaaaatattgcataaaatacaatttaatataatactatacaatataatacagtgtgatacagcgtaccaaacgaatccttaatgtttagtttaatcacaatactcaaaaagtcaaatagtctcaataataatatgtccatatccaaaaggagatgcattaaaatagcgagttgcggatagctaaggcttcagccacttcaagaacaaaataaccatccaaatgccagcttgtcgaagctacaacgattccaaactgatcacgaatcaccatatacccaagccactactacaaatacccagagaacaaatatcagcatctgtattgactttgagaaaatcaagcggagagatttccattttagaaccacccaaagagggagtatttgagtcaccaagctattagtagagatgtccaccgctggctgacaggtggaaggagactccgtcgaagtctgttcattgtaaaacgtcctaaggtaagcaagagcctaacgcacaatgagcacatgaggcaaatcaatgttgttatggtctaaatatccataacaattatcacaagttgatagtacaataccaatactatcaactaaatcttttttgctagatctctaaattaaaactagttttattttatctaattatcaaaaggtat

SEQ ID NO: 132796 - DNA, 664 bp, Cannabis sativa
gttaacgtcctgttaatgttccgtatgtttttattaaaaaaaaaagctccgttaaaaataatcgttaaactaagaattgccgttaaataggcacttttaatatataaagatataaatacacatggattccctttaaaagaaaatactacttagattcctatccaagctacaaaacacaaagcacattcattttcttagtgcaaatatattttacaatattatgctatataaaaatgtgagatagattagatattttaaacattatgcaaaattttatcataacttatgtcatattattatttatataattatataattaagtatccaatcttatacattttaatttaataattagtatgaaaaattattgatcatttgcaatgtatcatctcatgatggtattgaatattaatagtgcctaataattatactcaatttaaattaaataagaaaaactaaaggacagaaaccataaggttgatatccaccttgctatttttcgacaatgttttctattttttttttttttagtattagttagaatttgtaggttttggttattgtttactataatttacaaattagtaacttttggaaaaaaatattatgatttatgctgattgaagaagaaaaaaaaaagatgttttgattgttcataaggttt

SEQ ID NO: 132797 - DNA, 1682 bp, Cannabis sativa
gaatgggaaaataggtttgcagaaatgcaagccagaattaatgaacaagacaaggaaatctgacgcttgagacaatagggtgcttctgcaatccctgctctagaaatgcaagtagctcctgaccctgctgtgcaggcaggaccagtcgctgcagtgaaccgaatggaaccactgtatgaaaggttctgcaagcaagcacctccagcctgtctgggaggtctcgatgttgtgaaagtcgagcagtggctaatggttattactagaattttgaatttcatgggcgttaccggcattgacagaggggcctatgccacattccagtttcaagatggcgctcttgtattgaaggacatggtatccctgacccaagatgttaccaagatgatctgggaaaagttccacaaactgtttaatgcaaagtactataattaagtagtcagaagtgcaaaacgagaggaatttactcagctgactcagaaagcaaatatgagtgttactgaatagacagctcagtttgaccgctccgcaagattggctttgggaatcgtgccaaccgattttagtaagaaagagaaatacctggatgggtttaatttgaagataaggcatgacctaatgatcaccactgatgacaacacctcctatgctgatatggtggggaaggcactgcgagctgagggcaaagtggagtgcacctaggagtctcgagggactcaggttgttagtggggctcctactcctcctacctcaggctttagtatgggaggtagtggctcaattactaaccagaaaagaaaggaacctactgcatctggtggctcaagtctgaacaagatgtttagagggaaccaggggtgaggcaatcgtcagagtagctctgaaacccaatatacttacctaaatgccccagttgtaaaaagtatcatctgggtgagtgtagagggtaagggtgctttcagtgtggtatgctagggcactataaaagagactgttcacagcttaagaaagaagaacagaagactggagcaaaacccgctctaactacggtgtttgctctaactcgggctgatgcagaggctagccttttagttgtaacatgtcagctctcggtcaacgaccttatttctctatgttatttgactatggggccagacattcttatgtggtagccagaaatttcagtaaatagggcagaccgcaccatagttatgattcagggtttggaaccctactgcctggcggagaattagttatatccaaaaggtggattaggtctatgccgataaggattgaggtagggagttgagaggtgacttaatagaaatgaatttagcaaattttgatattatagatgggatggatttcttatccaagtactcagccagtattgattgtaaacagaagatggtaatcttccaacaagagggtgaggaagtgattgtcattgtcggatcggtttagggatctcgaatcccagtgatttgagtactaatagccagggaattgtttcgggatggatgtttagggttttttgccgtggtattggataccacacggcctgagttaatttggccaaaagacatcaaggtggttcgagatttttagatgtttttcctaatgaacttctgggtttaccaccgcagagggaaattgatttgatcattgatttggcacctggagca

SEQ ID NO: 132798 - DNA, 659 bp, Cannabis sativa
  modified_base (138)..(144): a, c, t, g, unknown or other
tttattttttttgcgataataatatctaaattataattttagaacttctatatgcacctgactggtaagtgtcaagtaaattaccatgtagcaatatctgaatggttcaggtcattaaattttattttttatttaaannnnnnnttaaatataccaataagaaaatatcatgtgggtaatgatttgatatttaatggctaggtacctacggaaatttttagaaatataacctaattattattaccgtcaaaaattaactctcgtttgcaaataaatacttaagtttaatttttgacaataataataattaagttatattaagtcacccttaatataataacttttatataataccgttaactaatcttaagtatcatctttaaatagtactagacaccactagtaccttatagcaatactcaattttttattagggttggtatgataagatacattaacatcacatttttcaaaagaaacatatattatacatggccttttcaacactaaagtgaccaccaaattggaagtagaagcccaatcattattatgtgtttccactcatcatttgtaaaaaatagattatttaaaaaatacacaaaaataataaaaaaattataaaaatacggttgtataaaattttaaatatttttacagtt

SEQ ID NO: 132799 - DNA, 724 bp, Cannabis sativa
catgtgaaccatgaaacataaaagcgatttctgatcttatattaattaataaatttgattatattgaaataagttttattttttttttctattagttgatgatggattatttggatgaattatgctgtttatgttccaaataggtgttctcgagcttattgaaagatttgggttagttttgtgtgagaaaagaggttctatatgtttctacagttaaaaacaacaggccatttttgtagagacagtctaccatttttagcagccaaaacaagcatttttctcgaaatatcattttttagtatgttcatactatctatcaataggaaaacttttagttttgagttgaaatctcgaaaaatgatttagcatatcacttactagttttatatatgttttgactaaggggcctgtaaatcatcaagtagtagtttccactcaggttgattgacacacataaagtaagactcaaggtgtaacgcactaatctataggaacgccacgtgtgtgaatttataaaactagtttaatactaatatattatttaattattaaaaacggtgaggataataaaaacttgactaaaataaaatactaaaaacggacattataacgacagtaaaaaagagttgggaatccctgctataaaatatttatccaaaagacgatatacaataacaattcaaaacacaattcaaaatacagcagacacagccagtctaaaaca

SEQ ID NO: 132800 - DNA, 610 bp, Cannabis sativa
tttctattcgtgtaaaccgtcgtcaactcattcggcttcggctcaggctaaagctcaagctcaagccgcaggtaagaggcagcaaccagtttcaaagccggaggagccagcctcatcgaacgggctcttagccgggtacatggcttacgagtttctgagtaaggggacgttgttcgggcagaagttcgatccgggtcgagcacaggcggttgctgtgggaggcggcggaggggagtggaagagtgagaaggagcacgagagttacggtgaggtggcgagcattttgaagagtgatggggcccacattccggatgttgtgaacccgacgcaactggctcggtggattcagatgtgaagggacgtagggaaacaatttagacgtggcgtcctcttattggttcatcccttttattttttgttatttgttaaaaaaagaaatagtccaggtagatcctctgtggagcattggtgactgagtttggagttggactctcctttccttattaaacaaaaaacaaaaaattgatgatgatgatgatgatgatgagaataatgatatatgtcaaggacactgttacataggctcactgtgccaactgtcctaacggtt

SEQ ID NO: 132801 - DNA, 1349 bp, Cannabis sativa
ttttttatttttaaaaaaaaatcacccaataatttttcataaacaaagaattatgttatatagacacattttatatagaatagatttatgatatatacatataagacaatagaatatatacgatataatacagagttagagaatattctaacgctaatttttgagtcgcccttctcactctctctctacctcatgcctctctctctaagcgaaggtggtgactctcatctgagttcacaatgtcttatgagttgaatacatactgtgatagaaatttcatccctcgccttactcctataagcctactcttatcctgaatattgaggatgatctgggagaaactagtgtgaagttttcattgtgtttatatcgcttttgggttggatgatcgatgttaattatgaaaagaatcgagaaaacccttaataggcattaagagttaatattcttttactcgtagtgtagatttaatttatgtaatcatattgagattttgacgcttatggttcagatcaattttatgtaaaattaagtcttttattaaaacatgctttctacattgatttgaaccatataaaccaacatatacgtcatatgcattgtaactgcacgatacatcgtacatgaagagacgggacccgacactatcaatttgcccataaaagatattagcatgccactattaaccataaatatataccaactgagtactcccgtggggggaaattgcagcgacctcctcgctgataatatagcaatatgagagaattttcatgttattactagtggagtgttctatcccttaatgtttccttggaacgaaatttttcaggatcgaggagatgggtcgccgaaaggaggtttcaggagggtaggacaaactgttgtggtggtggtagctatggtttttgggtcttagtggtagtggtggctgatagaaagagagagaagagaggaaaggagagagggaaagataggttaggaaaataatgagtaaggtattttgggtaggttagtgtaaatataggggtgttcatcccatccaatctgcattctttttttggtcaaataacattcaatctgcactaagtgcgaattttatattttgtatccaatccgatctgcataacagtttaaatccaatccaatccgcaattgtgcggaatggatcggttatttttggatcggttatttttttaatgataaattatttaatatttcataaaaacaataaaaaaaaaagacgactatgtttcttaatctccaataataatatatttccatctccatttatatataaatcaaaccaatatacatatatgtcaatacatatatatacttatctttag

SEQ ID NO: 132802 - DNA, 981 bp, Cannabis sativa
aaaaaaaaaaaaaaaaaaagcatgcataaacacataccagttcttctaactcgaccatcatcatcaaaagcattactcttgtcgcttgattcaacatcttctattgaaaagttttgatcactagtacttctactcctctcatgattattattattatctacattcatatctactaatgatactaaatagttatgttgaatcttgtatctcttgactggaagttataagaaaactgaagaatattgtgagtgtagaattggaatcttggagaagagatttataatcaggggatcatggtagggtgttagaatgttattgtctctctatttgtccacttatatgaatgtaattaaggatcacatatttcacaacaaattggaaagagcaataaaatgcaaacccaaaatggaataaataaataaataatataattttcttttaaaaaatagaaaaaggaaaagaataaacaaaaaaaaaaaaaaagttttaccgattcaaatgtaacttttttggtatctgaatttgtgcatgaaaagcatgtaaaaattaattgtcaacgttgacactttttattattttcaccaatggtaatatataaatgccataaatgtatataggaatgacatacacttgtcttctgaaaaatatcatagagaaattttatctgaaaaataatgtcaatttttattttgtttctttcaagaacttcaaattcattctagaaatactgaaaattaattttgaaataaaatacttgctatttagttgattttccattaagggaatttaaagaattaaaaaaaaaaatgtttccacatgtcttggtttttgtaactccatatagatatttaattttaaaatacaccctttcttaattgaggaaattacacttagtatgggattttaaaagtttttatgataaatatgacatatttaagtttggccaatttatatggtatttttttgtttttaggttttttt

SEQ ID NO: 132803 - DNA, 629 bp, Cannabis sativa
cttgtttaaaacatatggtcagatcacatatggtctacttgcttattggttttcttttaaaagaaaaaaataaaataaaggaccaatatgctaagtgaaatattgttctttcatgttaacttcttttgaattgtttaatgcaaatttagataattcatgaacaatattattacaataacaagttacatcttaaacacaaattcagtgtaaggaatattgttctgtttttttttatttatataattaaataataataataacaaaagaacattaattcaataatgttgctttcaatcgaagattctagtaatgaaagtattggattttgagtttaataccaaactttatgagaaattcttaaaaaaaaaaaaaatattaatagtacttaatatttttcttcgggttaatatcgtcattggcacaattaaatttcaaaacaatttctccaattatgtcctatttggtaaattaaagagattcagggatggaactgcaaataaagtaaaactctggtgactatatataataaataaactttcaggaacaatgaattcaaatctgaatgagacctttcgattgtatttatatgacttgacaagtacaactcccgcaaaaaaaaaaaaaaaaaa

SEQ ID NO: 132804 - DNA, 565 bp, Cannabis sativa
atataataatgtcaatcgatggtactatagtagtaatgaataagaatgttatacatatgcatgtatgcatgtgtgtgtggcttttggttttttctttatgtacttgtacttaaaccaagctactttttatgtatggttttttcttaaatggaaattataattactatacctagttatatagtatattgtggaacattgcaattactattgaagatcatttttgtttggtactttaaggtttaaggtgttccaataccacgatgagatgatattttataattggtaagagaattttgtatattattggttttttttttttctcaaaactagctatttctttatgtgtgattttttcataaattaaatgatttttttttatttgcagtcactgcctttgggattagatatcctcgacttataaatacagccattatcatcatttgtaaaaagtctcgaataagatcaagagagaaatatgcactacaagaaatgtcacttttaccagcacagttcgttgctgcgctggtaaaagttaccagcgcatttcacaaactgtgctggcaaa

SEQ ID NO: 132805 - DNA, 1512 bp, Cannabis sativa
  modified_base (968)..(972): a, c, t, g, unknown or other
  modified_base (1480)..(1483): a, c, t, g, unknown or other
aaaatgtgaaaaatgaaaagtgaaaaaggccattccccccaaaggtacttatatagtacatgtgggaccctttcttcacttgtttcaccaacacattaaaaagacaattaaagtagttattttttaatagcaaatgagatcaaacagtcaaggcaaagtgttttaaaagctaaaaacacaggaaattttattcagtcaaggctacaacagtcccgaccgcaccaacatagctggtaagtccctgtctttatagacgttcgcacagggacttggggggttatgctatcccaatttttttcctcctaatgtggcagtgcttgcgtggataaaactggtgccatgtggtagtacatctaaccaataagaaggccaagtcattacctaagcaaatggagaccctagcactcaaacgggcatcaagtgatagacaaccctcctcatggaagctggcagcccacccctagcttgcaagcctttggactgctccatgaccggccagcctgctcccaagaggagtctagccagccaagagggaccctacatgattcagtgtgcacttctacacgtggacatcattatctagacttcatattgggccctaaaagcctaatagaatagctaaataacatctatgttcaagggaattttagtcttttataattaattaattaactatgcaaatatcctaggatttcaagggtaaattagggttttaggctttcgttataaaggccttaactctaacctagaaaatctaagcttagttaaacctgatactaacctttaagctcttatcctgtctgataacttctttcttcttcacttcctctctcacacacccatacaagcactatcacttgagatttgccatttctaattcatacattgtatccttcagcgtgctatatttgatcctactgataatgatctggataatattaaccctcggtattaatacaactaaaagnnnnntaggtcattacccgctatcacaggaggccgaacctctataacaaatctgtgtatttattactttttcgttctatgtatgtaatacgtggcaagcatcagattcatacgaccccgctgtcagttgatcactttttgaggtcaatagtttttattttattatgtattaactttttggtatgtatacatattttagtcgtagtatttttaatgatatatattttttgattattaatttaatattgttataattttttgtggtatataattttattactagtaaatttttagtgatacgatagatcaaatactattgtatttatttaatgatctaatatatctattcgttttgttacaatataatattatgcagtactaaaaaaattatacaaattaatttaattattatatatttttttaaaaaataatatgtagcaaatttacttttataattttattagctaatattaccccatatactatttttttaacattttttttttcaaatttnnnntttgagtttctaaagtggttgcaccgcta

SEQ ID NO: 132806 - DNA, 525 bp, Cannabis sativa
aaaacaaaaaaaaaaaatcacttttaattttttttttaaacagtttttttttcttaatcaatattttagaatctgacccaaacttagattttgaaacttggacttggatcttgaccccaacctcggatctagattcggcctcagattcggactcaacttaaataaaatcaataaatggaaataaaaatgaaatttacagaacacacttttgtttttcgtttttaaaattgaaaaacaaaagtcgttatagaacgtatttttattttttaaaatgaaaattttaaaaataaaaattttacttctatttttatgattaaaaaatttaaaaataaaaagtgtaactaaatgtcacccaagttagttgacttgttaaatcagattggtataagatagtcggagacatacattttaagatcttgattcactattggcgatgctctaaccttataaaatacaaaggtaacgcaaaaacagtaaaacttctatccaataatacatttgggaccaagcaaattatattttaat

SEQ ID NO: 132807 - DNA, 800 bp, Cannabis sativa
atgtttcacaacagttgcattatagttgcataaatattttgctaacagttatttcgtctgatgtaactttcggctaaccaccaaacaaccacccagaaattttcgtcagattgaaaccttcgtctgatgcaaccttgccaaccacccagcaaccatcgtctgattgtgtaagtgatattttggtaattaaaatcacataaaaggtataaatgttgtcctaccttatggaggtattttttttttaataaagtgtcaatttatattttctatataataattccatataatacaatttaatataatactgtaaaatttccaattaaatttaggttcaacacaataagccactccttcatgggctgctcaagagaactaaaggcccaagttctagaatgagcctcaaataataacaatatttgtggtcttctaattgtacaaaccaaattaattagggattcttacaaaaaattctagatttggggtaaaaatttacaattttacagtcatataatttttttttaaaaaaatactatctttttataaaacaaccgtaaaccaacaaaatagaataattaaaacaacagtgggacaattgaaaaacaatcgtgaaaacttaacaatactaacagttgttggcggttccgtcatatttctaccctcaacaatactatattgtataatacgatataacacggtgtaccaaattgaatgaaagttttagttttgtttctaaacttagtgctaggggtgttcattcgatccaatacgcacttttttggtcaaacaacatctaatccgca

SEQ ID NO: 132808 - DNA, 1417 bp, Cannabis sativa
gcaaaaccacgtaaaaaaccctgtcttcatactattatttctatagcttttattctttctatgcaaaatcaatattgtgaggctcaaatttagttaatgaaagtctgtgttagccgtttggtgctttcattgagagcctctgtgaaaaagttcagaaaaaaaaaaccctcccttcttttgaagaaaaataacctccttcatggctgaaaatccaaaaaaagttaacaccccacatgaggaaaccaatcattgttttgggaaagagcccatgggctccaaaaaatctaccaatccgtagtccaaaaggaccacttgttccaagagggctcaacctgagggtggtcctagtgtgcggatatcacacgatcctagagaactcgacccgacattggtcatagtacgcgaacaatgagctcgaggagaactcagtgtcggaatagtagaaaccgtaggacgaaggatgaagagctcaatcgtcgaggtgcccaatctgtgggagaaggaacttatgaaacagaaaaccgctgcctaaggccagggcggcataggggacgaatgcttaaaatcaacctaaacttggagtgagagaccacgagggagacctcgtggctcacgaaccaagcgaggaaaaggcccgagaagaacaacccggggaaaatgagacactccctgagaaccagaacaaacagtcagataggacacaaccggaaactgatgaacgagaaatccctcatgagaatgaggaggatcttgggactcaaccgggagaacggaggtcaccagcaagaaatcaccaatgttcttcacaaacccatagagtgaggacttttacagaccctgatgggggaaatacgacaaactgctctcgggagaaaagaacggagcgtgaagaagcaagtctgacttggaggcggtctagaacccatagttgatcaactcgaagaggggaaagtactcaacgagctaatgatcgagaaagtatgggaaccagtaaatctgcaggccactcaaagacaaggtctatgagtagggcgcgatctgtgagtaagacaaggtctgccaataattactcccaaccggatctgcaagagcacttaaataagaagaaacctgacctttgccaatagctaggtccaaagcaagaagatccaatccaattgtggataaacaagctggaggacaagttcaggatatatcaagtgggggaattagggaaactatctggatacgactctgacgaggagcttgagccctatcatccaaacataatgaatacccattttccttcagaattcaaaaacctacatttctcgtaatacgacgaaaccactaatctggtctcgcatttgaacaactttaacaaaataatgcgagcgagtaatgtgacgaacaatttacgctgtattttgttccccac

SEQ ID NO: 132809 - DNA, 603 bp, Cannabis sativa
  modified_base (539)..(555): a, c, t, g, unknown or other
tggtaaaatatttccaacaaagggagatgagaaagagggacatgtcaaaattttgcctatttcacaatgattttggccataacaccaacgcatgttagaatttaaagagggagattgagtttctcataaagaaaaacaatctctacttgtgtcgttatgtgtagaatgaccaagctcagacacagtctgtccagaacagagatcatatgccacctccaatggagggtcacttaagggtcataattggaggcccccacattaaaggcgaggccagtaaggctagggaacgctatgctcaaactttccttcatgagcctaaaagtgacatcttcgtcgtcaaagaaaggggctccaagcaactcaagcttaaggagcctaccatctcctttacagagggagatgctgcccaagtcaatttcccacacaatgaacccctagtcattactgcacagatcgggaacatgacggttgcttagtgcatggtggacaatggtgttggaatatgttttaccatgatttagatttactaacaagtatgnnnnnnnnnnnnnnnnnatgaatttctaaaacaatgaaaataaacacataaaaggtataagaaac

SEQ ID NO: 132810 - DNA, 692 bp, Cannabis sativa
  modified_base (26)..(31): a, c, t, g, unknown or other
actaaaagtgaaaaagttgtgactannnnnnaattatcattcctatattgtgactaaaaggtccgtgactaaaagtattagtcataaaaattacatttgttgtgcactaaatgtaatttttagtcacaatactcattatgactaaaactaaattaatgacaacttgtatctaaatgttatattttagtcacaagtaatattttattgtaactaaaagttatatttgataaaaaaaaataatattgtgagtaaaaaattatcactaaaattaacagtttttagtactataaattgaatttgatttagttgtgactcctcttcaattagaccgtcacgtgggcatgtcccttgttttattctaatttctaataatatattctcttatgtaatattattatcattatgtccttcccttaaccaaatataagaatatgacatcatccaccaccaaaaaacaaaaaagaatactcgtggctcatatctctttgtgccaaaaacatatatttttatctaacacaaaaattcagtaattatattaattatataaaatagaaaattacataagaaatacacaaataaacaaagaaaaatatataaacatgtgaaactacacaaaataaaatatttttgtacaaaatattcaaaacgctaagaatataagattaatttacggtataaatatttaagtttaa

SEQ ID NO: 132811 - DNA, 1118 bp, Cannabis sativa
ggaagttatagaaagatttcaagagcagaatgatcaaagatatcattatacctgcattagaagaaaataatttgtaatggttggtagatgtccctgaaaggcatcctgaaattaaaaaaaaaatgactggttgagtcaatcattttaaaaatggcacaataattcaagtaaaatattagtaacaagccaataaaaactttataaaattactttgaataaatctagagttgtgagtgtgtgcaccaaacttaaaccttcttaccgcaaaccataacacatatatgattttgaaaaatgtaccaagtataagtctcaactccattagcctcacgagtctttggaaatatttattcatggctaagaatttcactcatggagttggaaatttaaaggtgagaaatcaaatggatatgacaattttaggacaaacaattaaataaacattgcaacgaagatagattatgaattatttggacaaccaatgtaaagagtaccacaaaccagcttttcaggatttttgaacaaaactagacaatcttttatatttattttaggagccaaaacaaataaaaaaatgaaataatacaaactttttttcttttctttttcttttctttttctttttctttcctttttttttttttaacaataggcaacatgttcaatataatgatagaaatgttgctcttgtattttatttttttttactatgaggcaacatataataatggaaatgttgctcttgtattcttttttttttttgcacataaagaaaataattacacaaaggctcctcaaaaaaattattccttaaagcacatccaatcaaaccctagtaccatgtccaaaataattataaccatttctaagaatcaataaaaattcaaaagttatttctcaaatctagccactcataaaaaaaaatgtgaaaacttaaacttggcaaattttctaagcaaatatgtgctaacaaccatcttaccacaaagtttggtatgtgcattttatatttctagaaaaattctaagtaccaaagatagcgaaaattggcttaaaaataacatttaacaagaataaatgagtaatttttgaaaaatttgaccatgaaaatattaata

SEQ ID NO: 132812 - DNA, 950 bp, Cannabis sativa
ttttataatacaccctcttaaaattaaaattagtgtactaatgcatctttatctttttttaaaaaaatatcgtagtcttaattttttatggtcatatatgttgttgttgtttaaaacatttgataaaattttaaaaaattagatttgaaaataaagtttaaagtttattttatggtccttaattctctcttttttattttttattttttattttctattagttttataaatattaaacatccatataaactataaataaattgataattaaaaaaataaaaattaaatatctacaatccgtataaattataaataaattaataattaaaaaaataaaattaaatatctattattctacttctactctatttgaaaaatctaccgattacttaatttttttttttgaaaaaaatctattaacctaaattccaaacgtgatccattatctaaactgtagatacatggaagtattcttattattatttttttatttctctaagaatatttatatttatatacatgcaagtaacttacgattggttagtgatattacttaaatattaattttttaagttatatgggacctactaattaattacactaatagtggtatgataccaaggagggttgtcttttacatttctcataactaaaatatcacttttttttttaatatttttttcttttttttttaattaagatatttaaaaataataatcacttttttaaaatatattgattaataataacagaacaaactaatgaattttttccaaagttttaaatatttaaaaaattatttaaaatttgagatgaaatttaagattaagaaatagatttgagaaatacaatagtgatgactacaagtgaactacggtaaagacaagagatgagctacaatgatgacaacgggtgagatacggtgatgaaaataagtgagatacaatgag

SEQ ID NO: 132813 - DNA, 1866 bp, Cannabis sativa
cgaccatagaaaagggtcgcgacctggcttatggctagtcgcgactactgacacctagtgagcagacttttccgatttttcaccagtttttctcctcttttcatcaattgactgaatttgacttttgatagcccgggaacctgaaacaaggaaaatcaagcgtaaaaccgcttcaaaagacaccaataacccagaaaatgcttacttattagacccgaaacataggctaaatataacctaacaccttgcccacactaaaagtcataaaatgacactaaggggtattttgggaaactctaacatcccgactattcccgacattcccaatgtctaaactattgtcccgctatactaaaaataataggatgtgattctaatagccatacaccgcgttccaaggttgccagacacaaaacatgcaaaattatgacatttctataaaagacatataaaatgcattttgaattcaaataaatcatcataaataattaattccatattgataaataatttttcataataaagccctaattatttgttaatttcaaaattaaagctaagcggtctttacacttatcacatcttttgacaaactcgtgggtgtcattattgattgttggtcagtaatatccttgtctaatgatcttttttgatagactttgccaacctgcatgatccccacaaaagctttcatgaatttctctaatgatcttgtttgcttctgtaggaagaacacaccgaaatagaggcattgaataacctcttctgcatagttttccttcaactattgtgtagcaaggcacttaatacaagagttttcacgtctcgtttttgtcagttggaagttgcccatcgagtagatagttcactataggagtcatccatgtatgtgagctatctatcatctcgatgtcttccttttcacatatactcaactcgtttagcatctccaccagaacaaagtttagttcatccaaatcgctctgcgaagccagttttgctaaggcatcgacattagagttctgttttcttggcattcgctctattttaaaataatcgaatcttcctaagttctttcaaaccttctctagatacttagcaattttcaggcccttagcctggtactcctcgagaacctaatttacaatcagttgtgaatcactatgacacatgagattcttgaccttcaatgcctcaactatcctcaaacttgcgatcaaggcctcatactcagcctcattgtttgatgcatcaaatgaaatctcaaagcataatgaaacttaaagccttctggcaaaattaacatctctcctacacctgagccttgttcgttggatgcaccatccacaaataacttccaagtgtctgcgtcttgctgaacaaacgggttttctttttgagttattccttctatttaaaaatttgccaaagcttggcccttgatggatgtttgagggtgataagttatgtcaaactggcccagctcaattgaccattttatcaatcttccagaagcgtcttatttagataaaacttgtcccaagggttgatcaattaacactttaattgggtgtgcttggaagtaaggtcgtaacttgcaatacttttacaataggtaaacaaggttactggtgctttccttcttctcatattattgttgcactaatcgcgtcttctaagacagctaaaatagaggagtaatgtctctcaacttacgggttttcccaaaacaagaggtgtcgtcaaatgcttttatcgctttgaaaggcctccttgaattcctctgtccattcaaatttcttgttgcctcgcaatacattgaaaaatggtaaacacttatcagttgacttcgaaatgaatctgtta

SEQ ID NO: 132814 - DNA, 1751 bp, Cannabis sativa
ttcatgtttagggtgttaatcaacatacttgtgagtagatctaagaacctggtaaaataatttccaacacttagtgcaatgattgcagacaacaagggccaggtgctcatcccttttcgccttcttcagggcctgatctttgaaatccttgagctccttcacctcaacggtcaagttggtcgtcgtctgcaagtcagcctgatgcagctcttccataggcttcagcctggcagacagatcttcgactgcctccttggccttcttcagctcgcgcctcgccttagccacggcctcatcccgggtcttcagctcctccaccttggctgctagtgcctcctgatgcttccactccgcctgagcttccctctgttgggcctcttcccagaacgctttcctctcagtcgccaaatctctcaaactcttcatggcctcgttcatgcccccgaacttggacatgacgtacccatgatcaattaaagtctttgagaggcgaccggtctctgcagcgatctgcaaaataagaaaaaaaaatagttaagtataagagatcagatgctagagtgaagcacaaaagaaaccattaatgaagacttaccgcggtcatagaagcgctgatatcctgaatctgatagattgagttcgtagaagcgcaggctgcatatagtttggccggaagttgggtcaggttggagacaaaatggcttgtcaactcaggggcaaaaggagcaagagtaagaccgacgaagcggttgaaccagtttgtcagagggtccatgttcaggtcccaagcgttcctaaaggcttcctcgcgtaaggaattttcttgagcctcccgtaagacctttttaagggcttccacctcggcattcccccttgtatactcggccatggcatagttatgcttggaaattcgaagttgctgcctttcctcatctgcggggacgggagtaaggatgatgctgggaggtacagtgtattcctcggctttaggtggaatccctaaatcagagctgacggccggagtgtccaccctcctaggttttttggaagactcagcctccaccatcttgcccttgcgcttccggtccagtggggccacgatctcaccttcctcctcctcctcgacctacccgtcttcatcattcaagacgattgggcctaaggggacactggaagaagacctccccgggtcaccgtctgggcaggtgccggaggaagagcagagtccgggctgtatgtttgggctagagtcaccaaaagatcctccattggctgggctgcttcaaaaagacaaataaactaagtgtcacaatggccataagaaagtatgcacatgaaaacaaagcggtaaaactagtcctaccctaactatctaactcaaccctagcaaagtcttgcactacaatactagcttcatcatccccaagaaagctgtccgaggggagaaaccagctggaagacagataagctgagtgatccacgggaatgggtgcaggaggtccagaacccatctggcaccggccaaaaaaatgacctatgttggaaaaataaaaggctttggcatgatcaccccaccgggtgggtggcatcctaaatctaagaagacgctcgtcaaatcctataggcctacaccgggaatactcttgggcagaaggaacatgatgaaccgttaagggagacttactggatctggatgtgttggtgcaggagccccagtattgggaaccgggaccagcaacttaggccgagaa

SEQ ID NO: 132815 - DNA, 893 bp, Cannabis sativa
caattccaactgatagtactcataatgtctggtgggcctggagaccaagacccaccttgtccaaggtttttgagtttgtcacatttgctgaattgtttggcccattttccacatcagtttccattctttcttctatcaacaactcagccccaccactggagagaatagactccttttttcttttcctttttaaatcagatatttctattaactcctcattagaatagccatctgtattttcattgaccaagataacatggtcattatgagagatatattgcttcccagaattgtgggattgagtaatcatggaatcaaagctagcgtttgacttgggctgattttttggccttgcattaacattaggggaggtattagcagctgtcgaattaactccctggtgttcctcacggcggtcttccttgccggagcgaagccacggagacgcagtcaagaagttttgtcttctcgtaggtgctttcatgtctaaactataaggtttgacaatttgatcagcaggtatatcataaaccttattacagaacctttcggcatgtcccataatcccacagataaaacaaaaggttggcacccgttcatacttgaagtaagcataaaaggcttcgccattacgttttcgaaacttcattcacttttttaatggttcagcaacattaatcgtaacacgcatacgcaaataatcacgccacactcctgcgaagttgttcgaatcagaggtaacaaaagtgctgatgtatttggcagcttcacgaagagcccaatccctcttaaaccccgtcttcaagccgtgaatttgttgggttttatgccctaaataaaactccaattcaatgtaatccattttattcattatcaataaagaaacagaagta

SEQ ID NO: 132816 - DNA, 955 bp, Cannabis sativa
tgcactttttatctgtttcagcatccagaaaaaaaatttagtttgattttttcatagtcgtttatattgtagttatttaagacattttataaaattttgaaaaattcaaacaaatttaatacgtcgaaaatagatttaaacagtctatttcatatgcgtaaaaaataaaagagtcttgcatgcacgagactgttaaattttatttttggcgtgttaaatactttcaaatctcttaaaattttaaaaaaatgtcttaaattattactatataaacaagaaaaaattcaaatgccaaaacagaaaaggtacatcggtggactctttttaaggagtggattatcctaataataatatgttatgtgctaaacagtataataatgtttttaaattttcataatgtaattcaatgaactttggttaagataataataataattaatgaacaatcaaaggggtaggattacagggtgtccatgtgaagactatatttttattattttttttttttttagagtaaaatgataccaaaatacagtcatttttgatttattatttttttttttttttaatgagtgcagtgagagagtgagagtgagtggtatgggagagtgggtagcataatgtttatatttatatttatttaatgattatttattttattttctggctttttgaggtgggacccacccagtccatctgacttggatggatcagtctcatttgagtgcactagggttcagtgtgggaccagagtagttgtgggtgcatgacacgtgtccttttacgtggaccttataagccaagtatgtgctgactctgttcctacgcttctatgacgttacctcgttggtgggctgggctttatacctcattaagttgggctacttattcaaggggtttattgaaaaatacctattttatttgggttaatttcacaaatgcacaaaaataacaa

SEQ ID NO: 132817 - DNA, 1277 bp, Cannabis sativa
  modified_base (1242)..(1243): a, c, t, g, unknown or other
aaataaaacgtgaattgaattttttgtaggggaaaaatgggtacttgtagcgtatttagtgatgaaattactcttacagatttttgtactgttcatatgtacatattgtgttttacatgtttataattttgtgttataatcttctctttatctccattattttttattttctgtatttatactatatatagagttatagcattaacttattaatatctttatccttctattattcttgtcacatagttatattttttgttttggtatttctatttaaccacaataattttccaacatacatgtcccatttaaattgagtgtctttaagaagaaacgattacaattatttttattatattatcccatgaatccaaaaatattatggaatatatattctttgcgtaaaatgactcaatcccactctatatattattcctagctagtgatctgttttacattaatatagaatagaaactgtaatattgaatttccatgattcgtgtatttttatagattaatatagaaatctcttatttattacattaataatataaatagaaacctttcacgtacatttggcacaatatatttcaacccaactttctcttacattatcttttcaattcaatcaaacgatcaaatgtaatattaaaagaatttttttatatggtgaatccaccctcccccaaagtcaaaataatactcatatatagttaaaacgtctttaatttatgaattataaatttaactatctaattacatataattcactcaaaaaattacttttagtcataatataatttgtgacaaaaagtaaaaaatttgtgattaattataaaacataaattttatattgtgattaaaaattttgtaactaaatatgttttatagtcataatacgactaaaacaaattgtgactaaaactaaattagttatatcttatatctaaatattatgttttagtgacacataattttattataataactaaaattcacatttagttaacaaacaatttaaattgttactaaaaggtaatcaataaaaataatttttattatagtgatggtaattaattaattagtcaaattactggtaaacttttattggtcagatattatatgaagataatattaattttagtaaaatataatataaaacaaaaaagcatttctcttattttcatatatatatatatactagcaaaaattacgtgtgaggcacgtatactaaattttatnntagtttttttctatgttatttgaaagtgatacaa

SEQ ID NO: 132818 - DNA, 572 bp, Cannabis sativa
  modified_base (520)..(544): a, c, t, g, unknown or other
ttcattgtatatataatatcgatatgtttatatagtttttccgtattgcatatcgtttatatatatgctatatttcattcactatattatagtctaacaagatctgcaaacaattttcaaaaaatagttcatagctgcaaaagattatgacatagaggtcagttcgttgaccaatattaaacaacaatcagaatagagtctcgaaaagtatttccaaaagatgatggatcagtggccaaaaccaaggtcaacgatgacatgaagttggtggcttaacttcaggaatatctaccgaatccatgttgtggggagctttgcaaaaaaaaaaaggtctaatactttgtcaaatttcgtctagagcttaaggcttcataaatttggaagaggcttatgtcaatgcctatggagtacctctggcaccatcaataacaattagtagttcaactccggctctttaattttttgctcgaactatttctccttttgaaagtgaattcactgttggattttgtgccctaannnnnnnnnnnnnnnnnnnnnnnnnatttactaattaataaaagataaaaaat

SEQ ID NO: 132819 - DNA, 1122 bp, Cannabis sativa
  modified_base (753)..(754): a, c, t, g, unknown or other
tttatgtaaataaaatcaaaaaatcgtaaaaatgtttaaaattccgtgaaaccatatttttgttatttttgtgcatttgtgaaattaacccaaaaattaatctcgcaactataaattaattataaataaactataaaacaacaataagaccaacttctgacaactataaattaactatatacaaactataaaaataactaaaaaaaaatatcaaatagtttacaaaagttcgtatttttgtaaataaaaaagtttaaactataaaaataaaaatttctatgtgttaaagtatttttgtaattttttttttaaaattttaatcatttatgtagaagttttttaaaattaatgcatgtgtttttcatgttgttgaatcatattgtttaagatcaaaacactccatcacagggttaaaactttgtagtttttaagtgcaatattgtaacgcccccgcttcaagcttccagtgtgctttgttctcactcgcatgctctttggaaaaacttctcaggaggttacatatcctgaaattaccccaggtcaaggatgtttaactgtggagttctttcgtgatggattaccagaaaacaagatgcaccttgttgatataggcaataccaatcgatctatttaagccttcttcaactatgtagtacccacatagtctcagaatcatcacacttgaccttccctaggcgatgtgggattgcacagcttacccggtattttctcttacggatcacgggactactnnctgtcacaatcacccccttacagggtccgacgtcctcgtcgaccacacttccgactgggtcaaggctctaataccatttgtaacgtccctacctcaagtctccatcgggcctttatacccacagaatgattgctgttatacacgagtacgtcactctagctgtttcttggaatgacgactgaccctataaattaacacgagtgttttcaacgtgcttcgtcctcactcgcacgctctctgggtgaaaaaactttctagaggtcacccatcctgaaattacctcaagtcaagcatgcctaattgtggagttctttcatgatgggctaccaaaaaacaagatgtaccttgttgatataggtagtaccaat

SEQ ID NO: 132820 - DNA, 788 bp, Cannabis sativa
tgttattttgtgaaatatacatatcattataataataattttttgaaaaattaattataattacttaaaattttatttagagcttgtttagtagggtcgtattgtattaaataatattacgagtaaattgcagtataacccccaatactatcactttattagcaattatctcccaaaatttaaattttgacggcaaaaccatcaaaactcatattctataagtagtttagcatttccattcattttttactgccaacagccatgtgaacacattgcattgtccacatggacacaatatacacatgacattatttaatcggtccatgtaaataaatattttaaaggtatattggtggcaaaaccatctgaactttatgttttttaacacttaacaacgaaaacctaaattttgacggcaaaacctactgaacccatattttgttttattctttacacttatgtctaaaaacctcaattaaaggccatagtagactgcccacatgtacacttgtgtacacatgctaaatttttagtggtccacgtaatattaattattaaaaaataattttaaaatttaaaaattttaaaaaattaattataaaatatttatatagatattttttattctattcttcttcttcttctcgttatcaccatcaccaccacacaaccaccattaccaccattaattgtcactgttttataaatgggatattggcggctaaaccacctgaactttactgtttgtaacacttaactacaaaaactgaatttttggcggctaaact

SEQ ID NO: 132821 - DNA, 1331 bp, Cannabis sativa
attgttaatggtgctgttgattttttgtcaatgcaacaaactcttgccgctttgtggaaaccaagaagaggagtatacatgaaagagttgggcgcaaatttatatctgtttcaattctatcacgaaatagatattaagcgagtttgtgaagggagccgatggtattttagtaggaaggcactaattattacaaggatgaaggccaatgataatccaaggtgcgtgttgttgaattagcttgacttatgggttcagatacatgacttacgtactggctacatgacatccactattctaaaaggggtgggtaactacattggcactttcgttgaatcttgcccgaagaattttaatggtatatggagagaatatatgcagattcgggtaacaattgatctttcgaaacccctgaagcggcggatgaaactaagaaaaacagggtctgaatggattttatttacattcaaatatgagaatgtcccaaccttttgcttcatctgtggtcttcttggacactcggagagattttgttctcgtctgtttgatactcctgaaaatgagattgttaagccatatggagagtggatgaaagcactgttccgtagatagacgaaacttattggggctcaatggttgcggaatgggattgacggacatggggatattggaagctcgactatgcattcgcggccacagggaacgacggtcctgctaacggaaggtggtggtcagagggtcaaaaatcatgggcaggggcgagtaaatttggctcctgatattcagggcattaatgttgatggagactatcgtggacatgataatggggaggatttatctcaatcagcacaagttgttttacagcagagtcaaacgcataaaacaggaaagaatcatgttgatgaggtggcatctcaatctcaagattacgatttaaaggctgcaatattagagtccaaaaaaagaaggatggttggtgggctgggccacgactttgttatggatcaacacattgaaatgggtcatgactcaaattgtggtaatgacgaaaacatggagcaagatgacgtggttgggccaaaaaactcgagtatggcgggattcgatattcggacccgcccgtcattatgagtatattaagctggaattgctgcgcgcttgggaccccggggaatgttcaattccttaaggagatggttctccaaaagaaacccaattttgtttttctgagtgaaactttatgtaaaaaagagaaagttgagataattaaaaattctttgggatttgagggtatgtttaatgtggatgttcaagggcatagtgggggactttct

SEQ ID NO: 132822 - DNA, 614 bp, Cannabis sativa
aaataaatacaaattaaatattttcacattttttacgttaatgaataatatataaaatacttttttttatagtaatttatatttatattttaattttttaatcattaaagtaattttaatttatttcgaaaagacaaaattgaataaaatataaaaaaaaaaaatatgttacatttatttatatttttataaaacttttctttttctatttttctctccaaattggaggagaaaatttttggtttttttttccatttctctctccaaattggaggaaaaaaattttgggaggccccacttaatatttttctctttatttttcttctctcaaattttcatacactattcctttattttcccttttttctttcatatactttctttggctctcattttcctctctaccaaacaaagcattagtgttttttgcctgagtttttagtttatttggatcatttttgtataaaatttgtaattgctcattctttgaaccatctggatctcgtgatcgaaaatccgctaggaatatggctctgataccatgttaaaaatcatggggttccatctcaaaactaattggcaatgagtggagtagcccttgttcttatatatgg

SEQ ID NO: 132823 - DNA, 599 bp, Cannabis sativa
aatgaatgaagtagaaagtgaaactcacaagggaatttctccaagagaggagctccaacttccctgagaatccatgaaacgacgagtgatacaccgaaaagaccacagtaagcgattctagctgacttattagttaagccagaggccaccgaggtgcatagaccgcacgttgcggtcgtacagcaagaaatcaagcatgacatctctgatctttgtctctcgaattttctgagctacgagtcgagtcgagtcgaggaggtacgttcagagtgtttggtaatgtaatgtttttgtttggagagtaattcagtttttcaaccgccagtctttcgccaccaccatccattgttattccttattgggccgactaccatgtttttgggcccataatattaaaataagttttacttacaaaaataacttcctttatatatgattacaaaaatcactccaaatttaaagacaattcattttatatgcatttagtatttattatacataaaatactaatttttaaattttatcttgaaagattttcttttatatatttttatggtattctataaaaaaaaaacatgaacatatatataaaaaaaaaa

SEQ ID NO: 132824 - DNA, 1027 bp, Cannabis sativa
tttaatggcagatttcggtctgcagctggtgttgtttgcttgtttgttttgtctgtttgaataaagatcttcttcttgttcaaaaaaaaaaaaagtatcgctaaccattctcaaggtaacatgtctagaaggtactaggcatcactagagccactacttgaaaactgggctttagaagcggttatttgggacatacaacgtcaattttgacaaaattcacgaccgatgttattccaaaagtcgctaaagagggatgaataaaccgaaggcatacaccccaatcactgacggcatagaggatgcctattttcataaatgttgcctacgacatccttattatcaaataatcgacgatgtatgtgtttacagcgtcggctttgtacataataaccaacatctaatgttttatatatttggttatttgtcattctaaattctccagaaggtgacatgacactctattagtgacatatggagaacattctaagaccttgacgattaatacggtcctcaactttgttgaaataatttatttgaagatgaagctggaacatatggacatggtaaatataatggtctaaccagcttaattctctcagctgattgcatacaccgatcagggtaaatgcggcggaagcaaattttttaagatgcttttctttttcaattgaattcctacttcaatgggatttccataggttattgttgtaaaatatgaaattaatcaagttttcccttttatttcttcattattttgggaaataaaattggtgtaatttttcatataaataatagagtcattccattatttagggatccgaatcatattttctagagagctcttatgttataaaagaattgtaagggttttcttgagaattcttaataaatccactttgccagctccttgtgattatattaattctttaaagtaatacaagaaaaataggagtaggttgttacaataatcacagggtcaaacttctataaatcttagtgttcttatttggttaattacatataatta

SEQ ID NO: 132825 - DNA, 951 bp, Cannabis sativa
tagacccaaaaagcttctaacctctgtagctaattttggtgttggccaattccgaacaactttgattttggccagatcaaccatgatcccatccttgtccactatgtgccctaagagagaggcacgtgataaccataactcacactttttgaatttagcatagagcttgtgatcccgtagtcgctagagtaccaatctgagatacaattcatgttcttcttccaattctgaatatatcaaaatgtcttcaatgaaaactatcacatgcttatctaaaaaatccttgaatacacggttcataagatccatgaatgtagtcggggcattggtgagtctaaaagacatcatcaccagaaactcataatgtccatacctaatacggaatgcagtctttgagatatcctcttctcaaattcttaattgatggtaaccagaacgaaggtcaatctttgaaaagaccgtcttacccttcaactggtcaaccaagtcgtcaattctgggtagaggatatttgttcttgatagtgaacttattcagttccaggtaatcgatacacatgcgaagtgacccatctttccttttcacaaataatagtggagcaccccaaggagaaaaactcgatctggtaaatcttgaagttgaacctttaattcccttaactctactagagccattcgataaggggcctttgatactggttttgcttccgaaactaactctataacaaattcaatctctcgagaaggtggtaatccaggtaaatcctctggaaatacatcttgaaatttgcacaccaatttcatattttcaggtttagatgaaataggctgggtagtatccactgttgtaactgggaatcatatgcaacctctgcgcattaggtctctagctttcaggattataatgggaaatttaatttatatggatacatttggtgtatattaaattttt

SEQ ID NO: 132826 - DNA, 833 bp, Cannabis sativa
actaatatgggatgagtattcactacctgagatcatcattaggaagtctaggattggatgtcctagcagttctcgaaacccaaactgcagtgtttggtcaaggttccatatgaatataggtgcattctttcctttacacccctagtttgtgtcaattgttgattactttgtggtttatccatatcagataaatctaaatggttactcgattttatctacattcttccttttttattgtctgtgggactgacccattctaactcctcatgaggtcaacttcttatgtgatctaaaaagatgtcccacccacgaaaagaatggcttcggctatttctattatcccctcgtgacatgtcatctttcaaaaggttggatctttcaaaagacttactccattgattgacataaagcgtagagtcgatggtatgttgactgatattagcacgatatgattatttcatgtagactataacaaatttcttttcttttagtattttttttttcaaacaaaatagtcttgctcaattagttataatattttaactcatttaatctacaatcatatatatttataattcatattgtataactctccaagttagtaatttatattaaccttatagtaatttagtaataatttttttatagtaattaataataatatctaataataattaaaggaaacaataagaaaaaaaaattagctaataaaataaaaattaaagattattctattttttatttaaaaaaataacatacgatcataatttataatattttatttatttagtaaaaatattaacaactatttaaaatataaatttctaaaataa

SEQ ID NO: 132827 - DNA, 1215 bp, Cannabis sativa
  modified_base (1137)..(1144): a, c, t, g, unknown or other
gctaacagaacttgagtttagggatttttaccgcaaaaattttagaattgggggttagttgcaaaaacctccctactttagggggttttgtcgcaaataaccccaaaaaaaaaaaaaaaaaaaagctcatagacaaaatgtatatatagagtaacttttactcattacagctttagcaaaaaacttttactcattacagcagccgttgtgttgtgtacttttaaaatatgtcattaaaaaaattaaaaagaaatccaagttggaaaacaaaatatgaatgaaagaaaagaaaagaaagttataatgatttctgagatatagatagatgatagatattgcgtgtaggaaatatgtttgacaaatgaagctggcttttgggttcgatacataacatataaatacatggaaatggaatattgtgaactatttacaaaaacatgaccgttcacgcacgcttcaatcggatgagaaaaagtaaaactaggagtcttctttttcttttacttggtgttctacatgttataaattattgttgtggcaatggaacataaattttaaagagaattagagccatgcaaattcgtaatctatcattctatttgttgttggagaaattttgacaacactaaataaagataaaaaaaaaataattatttaataaaagagcacgaatacttaacctaaattgtcgagtattcaaatgagactatacagacaaattgggaaaactagtaaacacaatgaacacgaagaagtatagtggttcagtcagatcacggtatacttagtccactgttggaaagatttctgtcttgttcttattcatattcatgaatcactcctttatatacaaagcaagtgttcatttgattacacagaacttaattattgaatcattttacattgaatattagcattaaatttaagaaaatgtaaatagaataaataaagaacagtttcaatccgttttactaaatacaacaacgtacgcgaccttcatagtgtgaattgtctattcatatactcgcacaagctcgcaggcttagggtgtgttcttgtgaacaccagactaatgagtctcgtgttaagatatatgcgtcctaatcgagtcacatatatgttggatattattttacnnnnnnnntagatctactcacaagtatattgtttaacaccctaaatatgaactttcaaaaacgatgaaataaacacata

SEQ ID NO: 132828 - DNA, 586 bp, Cannabis sativa
ttgccacacacaaaaaatgatttgtgctatacataaatcaaatttatttaggtgattgactcgtgaaaagaaaactagtagggtagaaattagctgtcaacattatttagcatatatatatattcaataatttcatctattttattttgctattaatttgaatttagaccacaaaaactaacaacacactacaagaaaattaaaattaaaaattgtgactaaaagttaaaaatattgtgttcaaaagttttagttacaattttttttttgtgatagccttgtaactagaaagtttatagctaaaattttattcacaataaaaataacattgtcactaagacttaatttttgtcacaactaatcactgtgacttatagttattaaaatgtcaaaacaatttgttacaactactttttagtcacatgaaagaattccacagttaagcgtgtttgacctgggataatttcaagatgggtgatctcctgggaagttctcctaggaagcgtgcgagtaaggacaaagcatgctgaaaacacgtgtgttgatttgtagggtgtaacgccctaatgctaaggcacgctacagt

SEQ ID NO: 132829 - DNA, 748 bp, Cannabis sativa
tcgacacgcctgacacaaaatataaaaataggtcacataaaatataatataaacacgagacgatgacacgttttgtcaccctagtcatgttagaataaatattttagagatagattgttgtattgtatagatgtagatcaattataatgctttgtctctagctagataagattgaatcacatgtacatctttgtcagtgtgtatttatttatgtgattaacgttatttatttagcaacgtgtatgattgtgacgttactagcaatgtgtaggtagttagaagtgaccaatcacacccacctgtatgattgtaataacgttacttattagccaatttattgccatattaaatgacaatgtaaagatctaacattttctttgcaaataaataaaatattttaactacaaataaacaaaatatacattaataagaaaaaaaaaataaaaataaaaaaataataatcataatcataatcataataaataaataaatattataaaaattttaaaatatatttttactacaaattaataaaccatattaataaattataataatagtccttgtaaatgaaacatgagaaaatttattttgtcaaatacaatccatgccaacagtagatcatggaacaaccacccaccataaaactatctgtcactaattaatgggcgaacccaaccatatttttttaacccactggcgtcaaccccacacccaagggcggagccaggacctaattactaggggg

SEQ ID NO: 132830 - DNA, 935 bp, Cannabis sativa
aataataataacaatataattgtatcacacttaatataccaaataccaatatatgtatataaactggatattacagtatttgtgcaataaatattattagtttatttattttttaattaaaaagtgataaaaaaatttaaaatatgtgcagtaaaattgttttatttttaattaaaattttaaaactatcaatattattttaagttttgtgctttataaaagttactgatcagtttatctattttattaaataataattattgaccgagatttttgataactaattaaataaatgaatttagagttagaaaagaaaagagaatatggagactatgaattttacatggttatgatgttaatgagtcttagttcacaaattagagatagagaatatgaagttctctatctaaaatttggcagcattttggcttaataccaataagagtaaaagagaagggctcttttacatgtgacatcaaaatacattgatagacataaatacctatctcttataattataatattcagtattatatttaagtttttttattattattattttaacttatttataatatatgaatacatatatattattattttaataataaattataatgttcattaatatgtcgtatcgtgtttttttgggtttttcatgtgttaagttttttaagctagtctattcatgattaccgtgtctttcatgcttcctgtgtcgtgtggtgcttaaaaacatattttttatgttgtgtcgtgctaatttgtagtatcgtaccgtaacgtgcccaagtctatatttttttcgtgcttagtcgtgctcgtactgatttccgtgcttagtggtgcttaaatactattggagaacattgtcccacatggattaaatgtgtaaagttcttttttagcaagttaggtgacaaaataatttttcc

SEQ ID NO: 132831 - DNA, 999 bp, Cannabis sativa
  modified_base (955)..(971): a, c, t, g, unknown or other
aaaaaaaaaagttaaaaaaatagtatatggggtaattctccaaaaaaaaaatattttttggtggatatatatgatctgagaggagagatatgtacgaaatattttttttgcatttttctttgactttgacttcgccattaaagaatttttgagtctcaacctctattttttttataaaagaatatcaaaattcttatttttgataagttatttttaagaacttttagagaaaaagagggagaagaaaaagagagaagtgaatcatagttttttttaagggaataatagtatttttaacaaataattatatatgtaaaaaaataaataaataaataatatttaatagacataaaataaaataatgacacatattaaaaaaaaaaaaactctacatgaagtcgtttttaatacctctatttaatcattatccaataatattatgtctaaaatgatatatctgttaaaaaataagattagttcaaaattctatacataccatatttattcatatcatttatttaatttaaagatttaataattaaaaaagaattactatttttaaaacgttcacgccaattaatattttagtttaattgaagataaaaaaaataagagccatatgtaataagtttcaatttgaactgtaatatttttttttaaaaaaaaaaaaaaataacactttttgtttatagttacatttaatatcaaaaaaaacatagatatatcaaaatgagaaattttttaaaaaaaaaaaacactagagaaattattcgatatgttagtatgaaaataacttgtctttaatttaatttaaatctaattattatttttctgttatctaattgttttgaataatttatatttctttattacttaatttttttaaaaaaaaaaatattatttaatatctaaattaatttggggctttttcatttttacatttcaaaacagtttnnnnnnnnnnnnnnnnntttacgaaattctacatagaaacttcta

SEQ ID NO: 132832 - DNA, 1050 bp, Cannabis sativa
tttaaaagaatctcacaaggccaattattggaaaatttataggtgtacacatcaaaaaattcataaattttttaaaatagatcaaagatctcaacactaaaaactaacatacaatggccgaaaggtcttaagaaaaggtcaaaggctgagacaactaatttttttaattaatctgataccatgttaaaatttagaatgaaaatgcattgagttctaataattaatataatgaccaaaaataaggcaccatgaaaaaaagaaaaaccatcatttttttagttcatggaatattcacaaaaataaaaaccaatcatactatatttcattaattcatattttttttagaatccttgctaaaaagtaagacaaattttaattactatataagctattaacataaaaaaaaatactccaacttaaacaaaatttatacttataaagctgtaatctaatattattttttttttcttacaaatattaacttaacatttttttttttttaaaaaaaaaaaaaatcactactcttaaaaaaaaaaaaaactatcatgttaatatttaaataatttggtacacttttgtttgcacacataattatgggtctcacatttatttatgtagtttgtacaaattataaattatcccaatataaaatgttactaaatatgccaataaacacgtgatgatatactatatattactttccccctaattaagatcaatatagaaaactataggcacgttataaccatgtgaagatcatgaaaacaaatgcatgaactttaaataattaattgtcgaataggtatggatcataacaaaataacatggacaaactaatcattaattaattaataatattgctatatatgattagatttatgagcattttttattaagcactggtggtatttagtacttctagacatattgccttgcaattggcttgcaatacttcgtaaaaattattacattaaactatgtaaaacccgatacttaattagaccaatagcgatattaacacataagaattagggcattttacaattttgt

SEQ ID NO: 132833 - DNA, 1157 bp, Cannabis sativa
  modified_base (1110)..(1131): a, c, t, g, unknown or other
ttttttttttttgtatttaaaattttaatgaaatattaacaaaaaaagaaccaattcaaaataaccgattcaatccacactattgcgaattagattggattggatttaaactatcatgcggattggattgaatccaaaatttagaatccgcacttagtgcaaattgaatgttgtttgaccaaaaaaatatagattagatcgggtggtttataattatgttgtgaacatcttaatgtaatggataattacctaattatgcgtagacaattaattatgtaactttaattatgtttatgtagttgtattttaattttaattttatttatttatttaattgtgttttaattttaatatttaattacttaattgtattagaaattttaataccgaataattatcttttttgacaacggtaattttttcaacgattgtacttgctctgacaactttttcgacgatatttgttattagaaatttcatcagttttatttataattttccatattttaaattttatttattttttaatctcatattttttttatattattttttataaaaataaactagaactttttttctcataaaagttctcttttttttttttttttgcaaaatttaggggccttcgggcccatggcccagataccgcacccaaaataaatcaatcgaggaaactacattgtatatccactttgctttacttattttaatttttacctctattcatatttttttagatatacacacttttatggatgatgtccccattagaccccttaagttatgtaaattatatgttagacttaagtagaaagtgaaagtatattaggcaatccactcaaaaaaaaaaatgagtatattttaataaaaaaaataatatgagagtatttttgattaatcgatacaaaaaagaggtatttttcaccttatcccccaaaatccccaatctctctttataaaaaagaagaattattatttctcattccacccacctctccctcctatcaaacatagtgttaatatattggaacttaggaaaaaaaaaattattagaccatcaaaagatatgttcaaatttactaaatgaagaaattacactctataccnnnnnnnnnnnnnnnnnnnnnntttttaccttcttttttaaaatctat

SEQ ID NO: 132834 - DNA, 1308 bp, Cannabis sativa
aaaacaaaaaacaaaatgttggtccatcaatgtagttttcaattaaaacaagacaaagaaaactaatcatttaacggcaccaacagaggcaccatatctacaatactcactccattggcaacctcatgtaaagatacagccgttggacccaaaacttccacccaagaaattagaaacaacatttctagtctcactacttgagctgagttttcacttcactatattatatatagaaactatagttttatcttctccttcactacaaaaatgaaaaacccatttgaaaataattatcaatggaacaaagagaaaacatagcaaagggagaaatttacaaacactatcacaatgtaattcagtaaataacgaaataattgcgaaagatgagttggcagagtccaattcgagcctgacccattacaatgttactgataaggaactcaattgaccataaaaatggggaggaagaaaagttgaaaggagatgaatcaaggactgggaaagaaagctacacttactggcacaagacagagagtggctggggagagacgttgtcccaagaaggaattggaggttagggaaaaagaggtcatggagctttgcagtgcagccatggctgccatcgtcgttgtttctttggttcggattctcagagtcttcgccttgttatctcttcttccacttcccccacgctcgttctttcgaactgatatctgataatatggataatgatagaacggaggggaaaaggggaaaattacaagaaagaaagtatttgagcaaacttcttgccaaaaaaaagaaaagaaaagtatttgggcaaacgacgtcgtagccacgttaaacaacgacgtgtcgtttatgctcttaattattttaatattttgtaagaattttttttgtttttcatttgaggaagattataattaaaaattataaataattaatttttgttttcaaacttttaatttttctataaaaataaaaatagtttttacagaataaatttttacttttctaactagaaaataaaaactattgaaagtgttctctaaaaatttcttacatagtggtatctgcttttccagattgatgacgtgtacaataccaataccgaatatcagtcaaagcaggcccattcatgggccaattaagttaatacatcatccaatgagcagagtcaagttatgacttcgaatctgggtgtaagtccagcttacatatgcgacaaggcttgatcactttggttggggaaatgtggtttcgccttttggcgaaaggtccatcaggattaattcgaataccctc

SEQ ID NO: 132835 - DNA, 1089 bp, Cannabis sativa
tttatagtatttggtttgttgttttggatgggggtttggtcaaatattggatttaagtattaattaattagttttggaaacgtttgtgtatatatatatcaatatagttaatttaaacatttttatatattaattgatagtggcctatttggatgagagatttgactttgttgatggttaattggctgctggccaaaggaaaactataggaagtataataaggatgagattattgaccttgagattattgtggacaattttttatggtttataattgtttaattatacatttttatagttttattttttgaaatggtgcatgcatatatacatttaaacattagtaaattaaataatatttaaaacgactcatcagtttccaagtgaggggaaaacatacaagtctatatagtaaattagtgttaattaatacctttaaatttgacctatagttaaataaataaaaaaaaaatagatgtacattttatgaatttttgataaattttaaataatttataatattagatagatatacagatttagctctggactgaggctggttctatgtttgggctaaggcgggctaagtccgtgtttgagttaagatggtttagggcccactcagagtcgatcgggcctaggtataggccgattaggcccgtgcctaggacccaaataaaaaaatacattttaaaaaatatacatattttttaaataatttttaaaaaatactatttatctttatagtaaaggcccaattttttttttattatttttttttattttttttttatcatctatgatctatttcaacttaaggccggtcccaaggtccaaaatttgtatgtagtgcacttttatgcattaaaaaatggtattttttgtaattttttgtaaaataagcctaacaatggtcacacttcactttaaatataacacacacaaaaaatattcttgaatccattaatactcggggttgccctatatatatactaggtgaatgtacgtgccgagccacgtattgttagtttcatttaagattttggtttttttaagattttgaatgtattttatttttaaagattacaa

SEQ ID NO: 132836 - DNA, 584 bp, Cannabis sativa
taattatattgtttataattctggttttgtcactttaattcttgttgattatctaaccttagattggtctgagtttgtgttgtatgtttacaatagattgtaatttattactcagttttttttttgttaagttactcaagtcttagattaacattaaatactatttgtttagatgtttaattagggtatgatctgaggacatgaatctatacatatttctagcaattatattaagtcatatcatcatgatttaatttctctttgattgattctttattaacgtattcatactaaagattttactcaatcgattaagtacttcaaatcaaataataactaaaaagaataattaaacagaaaaaccacactatattttgataattaacagaaaaattaggtaaactaatattaagaaattaataagaccataaaacaataaatgatagtagcttctaactcaaacagtactatcatggaaaaaaacatactataattacaataatttaagaaacagaaactatgaataacattaatttgaaagtctagcctcatcatcgtcatcatcgtcgtcatcatcatcatca

SEQ ID NO: 132837 - DNA, 589 bp, Cannabis sativa
aacatgcccaaacactggattggacaaattaacctgtctaatccaatccagtcctgcgtaccaaacgggccctttgtgttaggttagggaaagttgtgttttttaaccaaatacattatattatagataatagaagagatttgaatgattacaaatatgtaattgtggtggttgtatttattttagttgtttgattattattaaataattgtaattaatttaaatttaaataaaaataattaataaattattttataatatgatattaattttatttttatttatttatttataaataaaaaatatttataaacattagttttaaaaatgttttattaaatattttaattaaaaaattaatttattttaattatataattaattataattattttgagtctcttagtaacttattatagtagattaaccatagtatttacatttttaatataacaatcctataaataatgcacgagtagtgctaccgtcaacctcctgttacaatctcttagtcaatgtccacgcccgaaaatacatgtcgaaatattttttttcaatttttttacacaggagtgttcgttatgcttac

SEQ ID NO: 132838 - DNA, 716 bp, Cannabis sativa
ttgtatcactttcaaataacatagaaaaaaactagcataaatttagtatacgtgcctcgcacgtagttttttgctagtaattagataaatgtttatatttagttatatgtttatagataattaggtgagtgttaaaaaaaaagagtttgatcgagttgataaggtcaattcgttggccctgttaacccgccaacccgtgaattcgaaacccaccaacccgcaacatgaacgggcccggtccgagtacaattttttcaacccacaactcgcaaacccgaaacccaatcaacccgcccgatgttaagtcctacttcttaccaaacaagagatttaaccaatccctttatccttatacctccacccttcatcattctctcccctctaccaaacatagtgttaattcttctaaagagggaggaattgaaagaggagataatactaaaaaacaccagcggtgctagatgtaatttcactattaagtattaggtctttatttaatgtaataattttataaaatatatcgttaatcaatcataagacgctacctgtaaatggcaccaccatataataattttcttctatatatattttatataactatttttttttattttttttttgataaaaagcgtttataacatagaatcaaataaggttagacctcacggtcattacaaattaaattgtctggtaacgaggccaccgggatattccca

SEQ ID NO: 132839 - DNA, 609 bp, Cannabis sativa
  modified_base (27)..(28): a, c, t, g, unknown or other
taaatattaaagaaattaacaaatttnnaaatctgaccataatttaaaaattaaaaaaattaatttttaaatttaaacctcgaaatatcaaaaattaaaaataatgtattaaaaataaatattaataattaaaaaaatgatgtttaagtttaaatatattaaaaaatatatattttattttaattttggagtttgaaaattggaaaaatccaaaattggggaaaaatcccacaaaaatcaggttgggtgaggtggctgcccaggacgctgcacgtgcagccaaatgaggctgcaaataggccaggcgtgtcactcgttcccagtcgagaaaactcggcatttgtaggattcgtgtgggcggacgtaggcgcgagcaagagcatcacgtgggtgtgcttctcgtgtctgaacgagtgacaccgtgtcttcagacacggttttgtcccagtccgcgcgcgcaagcccctttcttgtccgagtttctagtgcgagtgagcaccagctcgacaccgatgggcacccaaaattcaaaccttcataactttctcaatttttatcgaaatcgagttccgtaaaaaccaaaattactataattaattattaaataat

SEQ ID NO: 132840 - DNA, 936 bp, Cannabis sativa
ataaattcataaacaaataaatcagaacaattcaaaatctcaaatcaagaaaattaaaagtttagatttataatctttacaaatatgaaaaactttctgaaagtctagaacagataatcttcaaaatacatttatagacagtattacaacaagcaataggtatgtaatccttagctaaagtaggattagcaactttggggaccaaagaactaacagtctcgatcaaggttttaggcaactttccgttagcaaagaaatccaataccgctctagaaacatcattaccaattttactccataaatccttgtaaaactcatacccaaaccccatccaatcttgggctcttagtaaagtgaatgctgaaaagagctttcttgacatcccccttattgaaaggcttaatcaagttgatttgttgctccatatccagacatttaccatactttaagcaatcctcatctatcatgcttgttgctgaacttttactacccataaagttttcgaagtgcttgacaaagtgtttaaccacttcctcatactcatcaataatagtgtcccccttcatgaacgtagtgatcctgttttcaagtcttcttttcctcataacagcatgaaagtaactagtattctcatcactaaatttgatccagttaacgttgctttgttgtctaaggttctgctcaaatctgtcctttgcagccataaaaatcagctacttatctgagacagcttgttgcaacaatctatcatttgaattcaaggcagcaatttcctggcagtcacaataacactcttttgccttcctgtaatccatagcaacatcccccacttgatgtttattaaaaatctttagagcatgtttgtaaagaccgcttatggttaatggttgatatcttgaattatttaaggtttatgtatgagattagttaataatt

SEQ ID NO: 132841 - DNA, 1212 bp, Cannabis sativa
atatttttcatagtgtaaaatgtattggttcaaaaaagaaattttgaaaatatttaagtatagaaaatcaaatttcccttttcaatttacaaaacatcaatctcttatattataagtgacatgaaacttttactcgtgactaaaaagttttaaggaaattatattgtgtacctattttattttatatgttttttaatttttatatttatttttatattttttaggatgtaaccacttttataaataatgtctccattatactctttaagttaatgtaaattatgtgttagacttaattaaaaagtgagagtatattgggcaacccacccacgaaagtaggtatatttttatgaaataatataagagtattttttgattaatagataccaaaaaaaggtattcctcaacttatcccaaaagtttttccctattattcaattggagaattgttccaacgaagtgcgttctattgttattaacgattgctagttaataaagttgctgttgctaagtttattcaaaaacaagataaaaataataataataataatttccttaaatgtatgtacaatttttggttaatttataatttttttgacaaatattattttgcctagaaacacctaagaaaattctattttagataaaagttactttagaagtttattttatatattttttttaaaaaaatatggtatatttatttgtaaggaataaaatatctcatatattatatgcatatacaaatatataagaagaagagacatttatatccattacatttttatttaatatatatgtgtgtgattgatatagtttggtcttaaattataaattgtagtattgaaattgaataaaataaaagggtaattcaataatttttaatttaccataaacaatattaaatattttatttaaaaaaacacaaacaataattgagatgataaaggaaataactaataataattaagtagtgtgaattattaaaatgggctttgccatggaaatccaagcccaatatcatcttcctataggcccaagctaatttgtaccaaactaaatgttagttctgggctgagcatggactaatctggttaatttttaaattatttttttggagtttttacaaaaatacaagattttggacaaaaatttataatttaactgctatatggaattttttttttccaaaaatactatttttttttataa

SEQ ID NO: 132842 - DNA, 1128 bp, Cannabis sativa
aacatatcatgtttgtttgtgtgcttaggttttttatgtaatcaataattaattaattaatggagttgtatcagtgttgtcttaataattgtaccatgtaatataaacatgtctatatttacattctcaagatattatacggtatccaaagagtagtactctatacatttgcaaaaaacagtttcaatgaagggccaactttgacattatttgggaacaaataaaaaaaaaattgaacccatatttaaagaacatacggtagtttaagaaagaaccaaaaaaagatgtataattttgagaaaaaaaaacaattttatttgagtagtttgagtaggtggactctaggtagaggcttggtctgtcttaatatatgaccgataatatatgcaaattggatgattcggtttttcattggggtttttcagcttgtaatttttatcagtttattcggtttaatttgagcttaaacggtttgtaatctcaacatatactgagtggggtaaaaatatttcaactcatcccatacaacttgaataaaccgattaacaattcttttttaaaaaaaagttatataatcaaataaataaattatttcatatttgtcatagtggagagtgacttaaaaactactattcaagcccttaagggtcaaatttctagatgagaaattaataattattgtactcattgtaaaaggctttctcataagtttttggattatagtttttctcaaattagtagaacttgtaattttgttgtccataatatggtaaaatggacttatgctcataacttaatgatgtgttgactttgtttagcaatttcgaaaaaatattatctataatgactgcgaggtttaattttcttttgaatctatgcacgcattttgtttgtgttctgaaattaccttagatggtccttctaaatcaaatttaataatttaattgaatatgtccttaaaaaaatctaatttaattgaagaaaaaaaatctgtatattttatggactttaatattttcattttttttttggaggtttttacaccacatattaaaaattttaatttttttacctttttactgtgaggcggaatttttttcaaaaatactgtgtagtatgttaagtttt

SEQ ID NO: 132843 - DNA, 746 bp, Cannabis sativa
gggcacaaaacccaacatggtcccggtagaagctataatcctgtcccatgagagagtcgcttacgatccagcaacgaatcaagacttgctgcaagaagcactggatttagtagatgacctccgacatgaatctcaaatacgcatggcagcctaccaaaagaaagtggtaaaatacttgaattccaaagttaaaaacaggaagtttgtcgttggtgatctggtcctaagaagggtcaacctgacctccaaagagccaggagtggggggacttaggccaaattgggaaggcccgtataaaattgaagatgaaatgggctccgggacctataagctaaagagaatggatggatccatagtacctagagcctggaatgctgaccatctccgcatatactaccaatagctaggattttagtatttaaattcatctttattctgtaagttgacctgtggtggacaaagtaaatgaattatctcacataaatttaagctaagtgacctaaaaagtcctttttatgtcacttagagggatactaaggcataaaatacgcgcaaagacatgcagacataaaaaaatccaaatagatataaaattatagtataagttttctaaaatataagtagtaaaaggtccggggtcaggctataatagtgtctcccctaacagaaaataaagataataaatacaaaaaataaaattgtgtcttgaggggggaggaaataagcaaaatataaaaaaaaaaaaa

SEQ ID NO: 132844 - DNA, 1112 bp, Cannabis sativa
ctctctctctctatctatctctctctctctcgtccgaagatagacgcgcgaccacgagccaccacgaccaccgatcaatcttctctctctctctctcatccactttttctcgtaacttctttattgttattttattttgggatttatgtatttttgagatttttatatttcacaaatcattggagatctcgactattcgaggattttaaggccaaacaaatctcccatcttagttttgaggaggattaaggcgataattttttttgagaaatcactatagcaacggtttaaaaccgtgggctataccttagtccacggtttaaaactgtcacctatagtataggcgatggttttaaattcttttatactggcatttttgtactgtcgcctattctactcagtattcgcgacacttgtataggtgacggttttatagaccatcaaaaattctttacatgacggtgtaaaattgttgggaattctggattttttagtagtgatatcaagtatgcaacttttcaattttttttaatagtttacagtactatcgacaataaagtttttgatatttcagtttccacacgcgcttaataaaaaaaatgagataaaacgtgtttttgacacggtagattattccaaaatttttttaaagattattgctaagaataatgtatttttaacatgtgtaattttgggtgcaaaaattgattaagagattatagtatgaagttttagttatcaatcctctaatttgtgtttcctccaccaacatgggaccattggctgtagtgaaaatagtaaagatattcttgtagtagaaaatgagataataatgtgtcagaaaattagagataaaaattctaatctcaatagaataaaacacatcaatcacttttgaaaaagtagaacaacattattttcatgggaccaaatatgacaatctcattcttaaaaaatattatttattttttttgaaacaattaaaaatattatcttatttgtgctatacagtttggcttttttttaatatatatctttatatattaaaagtgcctatctaacgacattttttggtttaacagaatataatttacaaataaaagaatattctg

SEQ ID NO: 132845 - DNA, 555 bp, Cannabis sativa
gggagtagttggcccttgtagaagagctcgtcggcgggtcggcagtggacggtggaggatttccgtggggagacggagatggtgaactcgaagtccgatgaggatgatgatgagaatgagtgtgagggcgatggtggtagggtttgtgattttgggtggtggtgacgccggttatggtggtggtcgtcgtcgtcttctcttgttggtgttgttcttctacccattttttttttttggctacattataatctctctctctcgatatacaaaaggagaaagtgttattattgagaagtgagtagtagtagaagtatgttattattataataattcaaaattttgtgagattttaagagaggctttttgtactagttttttttttaataaaaaaaatggttgagtaaatttagttaagtgctccacgcgcaatggtgggatcggtttaccgtacattaattaggatacacgcgccgccaccagtcttaagttatttggcaataataatattgggatacgattttgtcccgtgatgtactttcactgaatgtattccgt

SEQ ID NO: 132846 - DNA, 532 bp, Cannabis sativa
ctttttagcatttttcattaatataataacttttataaaataccgctaatcaatcacaagtgtcacttataggtggtattagatatcataccactaatacaaaggcaaagctaaaacaaacattgagataggcattacgtgattttatattatgtggagactttattcataaaagtttatctaattagatttgacaaaatttaaattaatacataattatgttaaaataacttttttttaacaacatatatattgatttgccttttacctaggtggttcaaattctaataataatatttaattattttttgaaaaaataaaataaaataaaagtatggagattggagagtataacttgtgacctccttaaattttgatagaatctttattactataccaaataatcttgcttatcaaggaggatagtttgttatttctgttagagagttagttactgtctgttacagttggtttgtattagttagtttcttccaactgtttcttgttagtcttagcttgtatataaagctct

SEQ ID NO: 132847 - DNA, 583 bp, Cannabis sativa
caccttatttctctatggtttcgctagccgaagctatggctattctccaaggattgcttttgtgttacaggcagggatataaccgtgtggaaattgagtcatatcgtaaacatgttattttgattctatccaacaaaactccattacttgttgagtttggtaatctaattcttcatttaccttatgttagttctagaattgatgttattagtattactctttgtaagcgttccgccgatatcatagcccataacttggctaaaattgctttttagttagatgttgctatggtgtggtggcttggaactccttgattgtcttgaagctttgttttttcgctcgctgatttaatgagaattccttaaaaaaattgaaaaaaaaaaaaaattcatcaatttataactatatatatatttttttttcctaaaatgacacttatttagtactaagtaaaaatgaaaattgcctaaaacaaaacattgttgtataattaatttaaaataaaaataataatttatttaagtataaataaataaataaagggtaaatattattttgaactttttattttgtaaaaattatt

SEQ ID NO: 132848 - DNA, 1265 bp, Cannabis sativa
tttaatcctctctcaacatctctatgtgtgcttatgctcagaatgtcaatttttttcttctttttcttttcacattgtattaattaaaaaaaaaattcttgagtttcatattttattaatctaaacatctctaactcaaatgtcaccaaacccaactctcataccaaacacccccaacaaacaagtttagggtagatattgatttttttttatttaatcttttataataataatagtcattattcaaaaaattatcttattttttttagacattgaatttggcaatttaaaaaatttattaagatagaaaaccattcttttttcatccgtataatcaatacaaaaaactagttaaatttcgccaaaaatgctcaatttaatttatactaaagtagcacaaactaggcagcctctccatagtcatgttgagatagaacaactactatcttgtggaacaattaccccatatagtatttattttaattttttttttcaaatttacagtttaggtttctaaaaattttatccggcagtttgtaggttgctatacgatttttggttgcgatttaagttgttgttaattataatagagatttttatgaagaattccgtaataatgtaaaaaaaaaactatttaaaaatgtaaaaatcaaaaaatccctatattttttttttttggtagctgttacaaacatactctagaaggaaccatgtttatttactagcatacatcttgttgatataatttgtttaaaaaggtagccttttactatatttttcttcaaatctcaactttttttaattaatttatagaacacaaaaggaaggtagctctattactgtatgtatataagcaaaattgacttttgacaatccttcaaattaatttttttgtcatggtaattaactttgatcttcgtgttacattaattagtttccagactagaagagccagtggtagaatttccacctctaaaagttaaggacttaccagtgatgaatatgcgaaacccagaaaaattctatgagctaataagtcgagcggtgagtgaaactaaggcctcttccggggtcatttggaacacatttgaagaacttgaacaaccggcactagactcaatagccaaacaactctcgattccaatgttcccaattggcccatttcacaaatacaacttagcctattcttcaagtagcttgttagtcgaagaccaaagctcaatctcatggctcaacactcagccaccgaattcagtcatctatgt

SEQ ID NO: 132849 - DNA, 627 bp, Cannabis sativa
  modified_base (579)..(590): a, c, t, g, unknown or other
gagagagagagagagagagtacggacgtttggggagaaggaatgagatcagaagaggagttgaaagaatgaaaggatcggtcagtgggaacaggaatagagccgcagaggaagccaaggggcttgggactggcaatctccaacttgccaacacactgaagctcaggcgatccaccttccattgtcgattgattattgattctgttctgagatcaaagaaaaagctttaggtttattggaggcttagcttagagtgcaaattgcactacgctattttggcaaggaactcttatatttatgttatttatctatttgttgtatgcaaatgtttgcttctatttgtgcttcttcatcttcttcttcttctcttctagaattttctggtcttctctctcctctcctttggcctctgtggtgcctagctcagccataatctactattcaattaggccacatcacgtcctgtatctttctaatctttattttgttcaaacaatttatttagggattattaagaaaaaataaataacaaatcaaaatgtatttaggcattattttttaaaagggtaaataccatttnnnnnnnnnnnntttgcaaaagttacagattggaccttgtgttttgtta

SEQ ID NO: 132850 - DNA, 1022 bp, Cannabis sativa
  modified_base (47)..(47): a, c, t, g, unknown or other
  modified_base (844)..(851): a, c, t, g, unknown or other
  modified_base (950)..(961): a, c, t, g, unknown or other
cactaatttagttttagtcactacaaatattgtgactaaaaatacanttagtcacaacaaattataattttcgtgaccaatacctttaaccacaaatattttagttacaacataggaatgagaatttataattagtcataactttttcacttttagtcacaaattttgttgtgactaaaagtgaaattttttatagtgacactttccctcaatttttttttttatttcaaaacccctaacacttagaaattctataaaattgaagaaatcggtgagaactaaagatgttggagttgaggttggttcagggtttgctactgaagaagttggtggtggttctgaaggaccttgtcactgatgctaacttcgattgtttggcgattgggttctctctcaagggcatgggattcgagccatgtggccttggaccttggtagtgttgctgctcagatcggagggcttcgagcactactggtgcgataggaatctttccatgggtatgaacttcaacaactccgttgaagctcttttacagtcgaaggcatatagtataatttctcatgttgcacatcctattgctcagcaaatacttgatgaagcaaatagataaaaagaatatgacaaaaatcataaacctcataaagtacacaaatcttttatttttaaatttctctattgagaattatggggttccatctcaaaaccaattggtgatgagtggagtagcccatgctcttatatatggctcaatactttacatttaatccatgtagaacaatgtcttccaataattagttttaaaaaggctaattaggattattaccctccaaactttaacatgtannnnnnnntgtcccctgaacttttttggctgttaaaatttccccctaaactattgagattgttagatttaaggtcgattatttaatttcatttaattttactatttnnnnnnnnnnnnatgtactaaatcatgctcctcagactttgatatctaccaaattatgccccttaaactttga

SEQ ID NO: 132851 - DNA, 740 bp, Cannabis sativa
aattttgtttgttattgaaatttggaaattaaaattgatattttggtcataaaatcttgagcatgctaacgacaataaatagtgggaatctagatgtaggaaataaaaaaaaaaaaaaaaatgcttcgagcctgtaaaacatttatattttaactaattgtcaaaatattgattttaattttttaagttttataaaatataattgatctttgacataataaataatcgacttaaataattaactataataagtcaattattacgaatgtataatttaaaaatatcctcatacactgaatgtattctcaaagtatatagttcatgatatttttagtttaaatagtagttttatttttaaaataactttctgttgttttcaaaattacagtttgaaaatttgttttaaaaaattatttcatcaaaataatatctaaacacttttatttgtgttttaaaaaataattgtttagtttttaaaaattaattttttttttttttttaagttatggagttaaacacccatttaattactttttaggatttatttgtgttttatttttcaataaattaaatttttactataaaattaaagaagaaaagtaaaaaaaaataaaatataataatgaagctaaattctaaagtgtctattcaacattctgtatggaaaacttgtagcaacctaaatctttcaaggacacaatttgtaatacaaactatagtctatacaaattttgtataga

SEQ ID NO: 132852 - DNA, 892 bp, Cannabis sativa
attaattcaggatcctatttgtaccattttagaaaatacaaggtctattttgtcatttagcaaaacagatggtccaattgataacttttacaaaatactgaatttaattagtttatatgctcttaacttttatttttatagaccagtatttcattaaattttttttcttaattagtttttttccttaaatttagtatataggttcttcactataatgtaattttcatagttgattattaagtattatgacactcttttctcaacaggtacataattctttttaatatttgatatgttttattatttaaaacaatcaaattaattaaatacaactaatataatgttaattatgtaaggatattaaagtactagtattttgttatatacacaacttatagtatataacaatataacatccaacttaactacacaatattagcacgtgagtataaatcgatatttactatgaatataaattattacttattatatgaatatattgctccatatatataaattagttttctgaatatattttgtagaagttagttcatggaataaattattattcattgtatgcatatattactccatatatattagtttatagatattaattattactcattgtatgcatatattgctctatatttatacaactaagttcttggatataaattattactcattgtatgtatatattgctctacatatatacacgttagttcctaaaatctaaatttaccaaataagtgagttatattaagtgtacatttggatcctacacaaaagtgatgattttactaaattgcccacccattaattaatataaagctttggagatgataaaatcagtaagactaattaggatttttgcccctgaactttgaca

SEQ ID NO: 132853 - DNA, 1085 bp, Cannabis sativa
ttgactgccaagatatagtaatgtaatcacaagtgaacaaataaccagtttgagatctagctttatgtggatcagataaatatcatgcatctgcgtcgctaataatttgtgacccacaattattagaatagaacaatcttttatcaatagtaccctaaagatagtggagtatatgtttaatccctttctaatatctatatgttggagtagaaataaagtttgctaataaattaacagagaaagatacattaggtcttgtacagttagcaagatacatcaatgctcctattgcactaagatatgatacttctggaccaatgagctctttatgttcttctttaggttagaaagggtccttattcacatcatgtgatatagctaccattgggctactcaatgagtgtgattatccatataaaactgtctcaaaatcgtttcagtataagttgactgataaatgaaattttactttttaaatgctcaatttgtaaaccaagacaaaattttgtttttcctaaatcttttattttgaattctttctttagatattccatagtttctgaaagtttttgaagagtttcaataatattcaagtcatcaacatatacaacaatgataacaaactcaaaacttgaaccttttataaaaacacatgggcaaatatgattatttgtatatccttgtttaataaatattcactaagtcaagtgtaccacatgcgtcctgattgttttaattcatacaatgatctttgcaatttaattgatcacatttttgatgactttaattatatataactcacgcatcctaaattcttcagggatcttcatgtaaatatctatatctagtgatccatataaataagatgtgactacactcattaatcgcagattaagtttttcactcacagccagactaaccagatatcttaatgttgttgcatccaccacaagagaatatgtctcttcatgatcaatacatggtctttgaggaaaatcttgtgctacaagtcttgctttgtatctcataactttattttttttcatttcttttacgtacaaatacccatttgtatctaacgggtt

SEQ ID NO: 132854 - DNA, 1655 bp, Cannabis sativa
  modified_base (519)..(522): a, c, t, g, unknown or other
  modified_base (697)..(704): a, c, t, g, unknown or other
gaattttaatatattttatggtagttcaattccatatatgtcaagtttttattttaattactatattttttcttattaaatttctttaccatatttatctaaactatctttatttttttcctatatttatggaattacctcattttaataaaatcaataaaaattaatgtgagcccaaataaaaagtataacaaatattacacactaattctatctaatcaaataagataccataaaaaattcaagtgaaggaaaaaattgcaaaacgaatataatgagggtaaataccattttggatcctgtattttgtaaaagttatcgattagaccatctgttttgttgaatgataaaatggaacctatatttttcaaaatggtaaaaataggaccctaagctcaattttcaataatttaattttttaatataacaaactttaagacaatttttataacaaatagatacggaaaatgtaactaattttgtcataacatttctaaatcaaattattattaagttttnnnntgacaaaaaatcagttcagggttctatttgtacaattttaaaaaatatagagtctagtttgtcatttaacaaaagagaaagttcaatttataacttttacgaaatagagggttcaaaataatatttactctaataaaaacatttaccaccaccactattattattattattattnnnnnnnntattattattattattatgtttttctggaagttgtaagctatgcatggattgcgagttattgtagatgaaaacgcttaagaataacaaagaaacagaaaaaaatctaccaaaatttagtagtagagctccaaggaaagttaaaaaaaattgtgaatcattatccaaagaaaaaaaaaattctagtatcataaaagcatattattttaaagaagaggaattatgtgtgtaataaagtttgtataggacattaagaatatcaataaatacatgacaaacatccgattattatttggtgaaaactttgatttagctgcaacttcttcaaatcataaaattattaacgagatttagtgttatataatagaaactagaccagatatataactaacaaattaaattcaatgatgaattactcaaaaatttatataacagtacctgactgatagttgaagaaaattttagaagctctgttttattttcccatgccactcatttctaaagctccaaaattagtctttttttggagatggaaaaaattctaaaatcaagaatacttttttctaccatttttatttttgtgaagttttggatttcttacaggtagaaaggaaaaagttaaactctatatttttcttgagaagtgaagttatatttatagagtttattcgataagaccgatgatgagattgatgatgtggttatagataaattaaaatcgataaaaatgacggtaaaatataattttgaatggaaaattttatgtaattcacacatgtaagatagtcatatcggttataaagtaaaaccgctaaaagaaaaacggtaaattcatataattttattgtaaaattaaaccgacaaaaaggttaaatatttatgggtaaatactattttggaccctctattttacaaaagttactaattggaccctgtgttttgttaaatgacaa

SEQ ID NO: 132855 - DNA, 675 bp, Cannabis sativa
aaaacccagaaaaaccagcaataaatcacgaatttcaacccttaaatcacctccaaacaacccaattcataaccaaaactcccaaaccataaaatatgtttttaatcatcatagagatagtttagaatacatatcaagcatgaaaagccaacaacaaactccatatttcagattatgcaatcaactcaaaatccatctccaaaccaagaaactcaagctcaagaacttaagcttctactcaacaatctccccaaattatccagcaacaagaacacaattaaatacatgaattcagacctaaataataccccataatctcatccaacaatcaacaatataatcacaactaaaacttgcgatttcacaaccaaaaccaaacaagtcaagagctaatctctcatcatgcaagaactaaaacaacatcagttttccataaatattatcagtagtgaacaaagatcaaaacccataaaaattacctcaaacttcaaaccaagagcaagcttaaggttcaacaataacaaagctccaaacaatccaagaatcaagcttttcttcccaaaaatcaagtttgagcaagaagagtgttttgagagagagaggggtcgtgtgagagagagattaaaccagaatttcctttccaatttctcaaaattcaacttttattaaaataaa

SEQ ID NO: 132856 - DNA, 643 bp, Cannabis sativa
aaaaaaaattgatacattaaaaaaattgatgtatggtgtagaataaagtaaagaatgaactgaattgagaaatgtttctatttttataaaacggtcagctaatatgacagtttataactttacaagaacttctatattaattttgcttatcgtttcaatttgtaaaatgttttaactgatttgctattgtatttaataatgaagttttttttttgaagaaaagcaaagcaatatatattaatgaggataacagttagacctcgcggtcattacataacaggtttaccggtatagaggaaaccagaataacaccaaacgtcttgtgggtaaacgcctacttagccacgttatgggctgtaaaattacaggtccgactaacataagaaaagacacaactcgaaaataaaggagaagatctattacaaaatgagatgtagttctcaagcgcccattgagactccttcctaataagagcattgataaccacactcgaatcattctccacaataacaaatttagccttaagatccaacgtcgtttcaactgccaagcagcaggccgtcgcttcgccacacaatgcatcaacgaagtctagcctggccgttgtaatccgaatcaccctgccaagatgatccctggccac

SEQ ID NO: 132857 - DNA, 596 bp, Cannabis sativa
atatatatggtaacaattagtcgtaaggtagctagattattataactatttttttttttaataattaggtaagaaaaatgaactaaaaatattaattacttaacagtcataatttgatgttcttatattatttattttctacatatttatacatgcattggagttaattatggactgaattacaaatctttacacataaacatctagtctagctaattaaattcgtgatagtatatatatttataaccatcgttatatatatataaaaagaaaaattaaattaaatacaagtgactaggaacatttaaattttacatattaatgcttcttaattttgataaatgtggtaattttttattaattgccatttaagcaaatttaattttttttttccctcgatcggtttgcatattattagaaaaacgaaaagtccattattttatattcttacttttaatctaaaaataaatgattaattttaacctaatcataaaactataggtctaatagttgagacaaaaaaacacactgagttttttttttttgcacaattaacacatgcatatgctattattagtatatgttggaaataaaat

SEQ ID NO: 132858 - DNA, 1279 bp, Cannabis sativa
  modified_base (905)..(907): a, c, t, g, unknown or other
tttaatataataacttttaggaagtatcgctagtcaatcgcaatgcgacatgtttagtggtgtttgacaacactaatgcctaatagcaatgctctaaacaaattgcaaagagaaatggtaaaaggtaaaaagtatgggtattcattagaccatatttaatatttttaggtctattcaaatctcattcaattatatattggatgttagattttacaatctgatccgatctaattaatttcagtcattcaatcaatccaatatttattggattggatcggttctatctgttaagtgtatttcatatatatatttattagtttaattagatttatccaatattttagactaatattttttatatcggatcagatgcactcaatattttagatcaagtatgtattagattggatttgatcaatccaaactaagaataaaagagtaaaattttaataattttatatatacatatatattttacgtctagcaatataaaatttaattactcatccaaagtaaatgaaaattttaattagttcgattagatattggatgtattggattttttagacacctcattcaaatcaaatccgatccaattggatattaaaaaataacattcaattcgatctgatcacaatttgatatccaatatttgacgatcaattgtaattaaatcggttaattatcattagattggatcgattaatgcacacccttagtaaaaagtatcaagtttcttgatatgataagtaataacaatgctcctcttagtctcttaagcaaaaaaaaaaaaaaaaggctaaaatacactattttttaagctaaaatagctaaacagttaaaataaaaaattatttttattattattgttccaactatactctctactatagttagtatttgannntttgaataatattttataatttaaatttgtcaaatataaattaattttttaaaatgatagaaaagtcatagtgcttttgattaaaatactattaaaataatttagtagaaaatagggagttccctatatttagagagctctctatccattctctattataaagagtcattttttgtatggttaaaaattattttttcaagtctcactccttatttcaactaaggagtatgtttagagaacatggttagcaatgctagtctcttacatgggtaatcaagaaacgatctctgctatcctgagtgagggtgttcctgctggacgaggcaaggatagctggttctggaccttggaaagtaatggtcggttctcctg

SEQ ID NO: 132859 - DNA, 658 bp, Cannabis sativa
tttagggcacaaaatccaacaaggcggcattactaagtcagggaatctgaaataatgggttacactcacaaagtacaactaagcttccatgtggttacttgttaacctaaccaaacaacgatactttatatttttagaatgaagaattagatatttaagtttcaaaattatcaagatgagaacagtctcataagctcaataaaattaacttgataccaaccctaaggcggcgatcagttatcaaagagttttatcatggaattacttaaactatattttatgtagtttacttgtatgcgctcatgcatcacgtttaaagtcattgtaaaatgacatttattattcaagtatatttattatgttacctttatttattttaggcatgtctacaatgtcaaatcctcaactgcttcacaggcacttgaaaaactgaatggtaaaaatttaatgaaataaaaatctaatcttaatttgacgttgctttgtgaaaactacagttttgtcctaattgaagagctccctgaggagctcactgccaatgccaacaaaaaatattcgacacacatatgactcttggattcaatcaaacaacaaggtcaaatacttcatgtaatacccggtaaaaatatacatatttaaaatttatttgttatacaat

SEQ ID NO: 132860 - DNA, 1261 bp, Cannabis sativa
ttaatacaagttatgtcgtgaattttaattaatatataattttatataattaaagatgatatggctactcccaaattatttaaaattatattttcacttagacattatgtattgggctctaactaaaagcaatttcgttataaatacaataaacaattactgagattagcctatagtggtcgttcgaagatcattaaaaatcgttctagatatgagcatttgtcccagttccatgctttcatatgtcaaaccacaaaattacttatattttattcatattttattcattttatgaaattttttatgaaaattaatgtcctaaaataaaatattcaacctatcttaatgtttgaatatattataaatatatctagcattatttatggaatttatgtattgcatttaaatcatataaatcttaattaattgtactagtaatatgataataaattaaatgttttctctatatcatgtaattaattatgcatttataatcatataatatcttaaatatttgtactaacaataaatttgtataaatataataaatatacaaattagtacaatttaattatatgaaaatgaattaaatacaaaaattccaaaatgtatattttatggcagattatcaattaattcaatcaataaattacctaattggtaaataaatataataattgcacacttaattgtaaaatatttttaaattcatattcttaaaatatcacaattattataatcacatgcccaaaaataatcatgtaagtatttcaccaattacaaatttctcattttaaattattaccaaataacatataattactaaatatatgtttaataaaaatggaaaattcaaaatataaatttattgtctaaattaacccaaaataagaaaaatatgaatttctaaaaataaatgaaaaaacttaattttcagattttttttttttttttgaaaaaatagcctaaaaatatgacatgtagtttttccacataaagtggaaaatgacacgtcgttcgggggtcatcttcaaccttgagcatgggtcatttagacccgataacctacaactgggatcactcggatttgatccaaacccgctcgactcaattccaacgaccaaattaactcaaatcaaagcctaatgaatctaaatggaaaaattaattggtttaggatttgaaaactgttttatgtttttgaaaattaaaatggtgggggtccacctaagaattcttgattggttgagtgttttcaaaa

SEQ ID NO: 132861 - DNA, 1442 bp, Cannabis sativa
aagtgaaaaattattaatgaaggacatacttgcatcttcattccatcttcagcaacccataagtagtctggaattctctagcaaggtgttttttaaagtaatttccatttggatcttcaacccaacaagcaagcatacatagcaccttttcatccacatgtaattattaagcaattatataataatacaagtatcctgcattgtatgaaaaatatatattcgattaatttttttattattatttcaaatcaccttttccacacatccaattgtaatgtatcgactgttctcatcttcataatgaatatgctccattgttactttcaaggctctctctctcaaaaattgttttaagggccaacgagtaagaaaaggctcagtgcatatatataaactatcccaaagaagatcttgtaaccacggatgaggataatacaaatcctcctacaacaaacatggacaaatgtattaatttttatggctaactaaaataatgtatatacatgtacacatataattttataataatatagataatatgcaatatttaattcaccttagcacaaaaatgtcgcacttgtttccaattaatttcactataagattgagtatgaagttcctctctcaactttagaatgagaggtgtgattggaccaacaaatctttttccatatagataagacatgggtaaatacaccaatcgactatagcaccacatgtttgctacataaaagggagaaaaaaactatcttatacatctttctttacgtatataatttctccacactataaaatacaaaattttcaaaacctgggtacataggaagaaaggagggcaacatccaaaactcagggggcatggggttgcttccagcccagtccaaaagaccaagtatctaccattaatccaaaaatataatatgagatataatgcaaaaaaaatataaattattgtgtatttactaaatataaatttgtaagctcgcattataatggtggattcatactgaaagccacgtctttccccaagagggtatgtatgttataccaccatggtccaggatccattgtcttgctctttcacatgaattgtcttcaccaccgtttggcccttctcctaatattcgcatgcaaatatagttgaggcttgtactaaacatagtactatgaccttcaatgtgcaatccccatccaccatctttgttctaaacaataaatttcaatatatagtatactatatatgagcataatggtacaataatattaattgattcaaaaacaattgtttctttaccattaaaaaaaataaatattaaattataaaaggataatatacctgatgatagtatatatagcgaagaatttctttacgatattcaactgtgaatatggtgttaaggtgacctgtaatgtacaagcacatgacctacatgcataaatga

SEQ ID NO: 132862 - DNA, 603 bp, Cannabis sativa
ttatctatctaatgaacgctttctttcaaaaaaagactcgcaatttgtaataaatgtatttttgttgagaaatgttaaaaatggtatttatggtgcctagtatgtaatttaacttacaataaaatcattcattctaagcatctcgaccattcaatttatgtgatgaatatgggttggtcggtagatttaattacagatttatcaactaacctacatctatcacgtgaattaaaatagttaaaatactcgagatgaataacaagatattttaatttaattttaaatttcacttatctaattttaataaaaattataaaaaacacttattttaaaacacaatttcatagtagtatttaaaacttgcttacgtaatggagtgcgtaagcactattgttaattttgtctctgaaataatttctcacttgtcacactcatcaatttccataaatgaagtggcccctaaaaaaacaaaaataaaattaaggttcttagaatttttttatgtttacaattttttttctgaaaatataatttgggaccacgttgtatgaattcattagggaaatttgattttttatgcttacatattcttgaaatttttcc

SEQ ID NO: 132863 - DNA, 598 bp, Cannabis sativa
acagtatttttgaaaaaatttccgtgtgatagtatttttgtaaaagttaacctaaatttcagtatttttgtaaattttcctatcacattgaaaattttaatttttttacttttttttttactgcagcgtagaattttttctaaaatactgtattttttaaaatactatataaattttatactgtactgtattaagtttttacaattatttcacggttattttttagttgttccactgttgctttaattattctgttttgttgttttaatttattagtaaaataactttctattgttgcaaaaataaataagaattatactgtacgaccaaaaatgattattatggtcgcaaaatggccataaatttatactgtacgaccatcatagtcgcataaagtaaattaaatgaaattattttacaaattttaatattttaaatggtaaatttagtaaatttgacttgtatttcttcaacaagcattttgctatgtttgtagtcaagtttttattttgagaaaattacactctataccctttttatattgtccccttttatttttaccttttttttaataaaatctatcatttttacctctttt

SEQ ID NO: 132864 - DNA, 675 bp, Cannabis sativa
ttctttaagcctttctcaagaaaaaaccaaaaaagaacgtgttccaaagtttatgggttttcctattgtgttatctttttttctctcctattattgggtcaatcttatcctcacttaattaatgattttaataaaagcactaggataaaagcatataattattttaagacattatctacatgaaatgctcattttccattgtgtacatcaacttttaatttctaatttacatttataataatgtttggaaaaaaaataaaattgcttatcgtataatatataattaaataagaattagactttctcctctattcaaaatcaagtaccaccgttcaaaatttatatcttcaaagatacactaatttttttatttatgtaattattattattttattaatatattttgttgcagtattaaattataaactatttataatttttctttttgtattattttacataataaaataataataccatgataaaattatatatattatatagatttaagagtaaataacggttgaaagttttaagtttgtaagtagtataaatttaatgtttcttttagcgacataattaaagtactcacactacaaaaaattttacttttagtcacaacaaaactcgtgactaaaagtatgtgattataagtaaaaaagttgtgactaatta

SEQ ID NO: 132865 - DNA, 793 bp, Cannabis sativa
catcgtagttactttattttaagtatcataagcaattaaattgttatttttcattatggtgaccataaaaaaaatatatatattttacatgtcaacattaccacattcaagaatcattcatttttcttttagttaaccaaaaagtaactaaattttaatattaaataaaatataatacgcaataaaattcccggattactattttgttattttatttaaaagatattatatattaactaattagtttctacattaaaataatattacttcaaaaaatataacgatgccatagcataaatttaaaatatctaattggttattaagtaagaagtctaaactttttgctaataaattatatgatttattttactttattgtaacacattagttttatgaatagtatggaagataacataaatattgttacacaaaagaaaaaaaatgaacttataatttaaaataactaatctaaaaattaaagattatctataggagatatttttatttaaagtggataattttattaaaagtaattcattggtatattatcgaaatcataattaatttaaatattactataaagtatacaaaataaatcgatttcatatctatgcttatttgttatactatatgaaaactaattagtttctacagtaaatttaaaaggtaactaaaaatataactttaaaataactaattagcaatttgaatgtttaccaataacttattatgtgagtttttttttttaaaaaaaaaaaaaaattattgcaacttattagtttattaaatagac

SEQ ID NO: 132866 - DNA, 596 bp, Cannabis sativa
  modified_base (433)..(464): a, c, t, g, unknown or other
attggtacaatatttaaaaaaaagtaaaaatgatagaatttaaaaaagaaggtaaaaataaaagaggacaacaaaaaaagggtatagagtgtaatttcctcaaatggatgttacaacttatattacaacccaaattttaaccataaatcaccattcaaattttaaccatagaaaaaaaagagaaaaagaagatgaagaacacaagggaggaaccgaagaagaagaagaaagaaaaagaaaaaagaagcaaaagtaaaaaataattaattttttttttgatttttttaatttaaaaatattttaaattattttttaatatttatatcattaatattaagttgatacttttcattaagttgatactttttacttcaaataaaattgggtaaatactatttttggattctgtattttataattagaaatcaaaatnnnnnnnnnnnnnnnnnnnnnnnnnnnnnnnnttttaaacagttttttttttcttattcaatcttttggattaagaccaaacccagatccaaatccccttcccacggcccgggcgctgaactcggcttctgacttgaactcgaatccgactccggacctagacc

SEQ ID NO: 132867 - DNA, 631 bp, Cannabis sativa
ttatattggaatgagttttatttagggcacaaaacccaacactttatgctctaattgagagctttctttgcctagtttttgatatagaaattgaaagtcatcctcactcatttgtttttcaagtgtagtctgtctaaaaagtggtgaatttgttgttagttataaaatgtggtctcttgatttagataattggacaatttggattggcagtactccaacaagtcttatggcttttgtcattaacgccttgtttgtggcagttgtgtacagtttgtggttcaatcgtaataggtgtgtatttagggctgctcctttttgactttgtatatagtgaatgacattaagaatatgctttagagtagattgtgcagtgttactaatagaaagaagaaaatatatgagcaaattatattttcaaaatttttaaggaataggtaggagcgtagggtgtttttgtgttgacttgtggtttgtattgatttggtggtatttggttggttgattaatatatttttttatatatataattcttttttcgtgaggtaaatattattttagactttgtgttttgtaaaaattattaattagaccttttattttttaaagggaaatttataaaaatattggaatt

SEQ ID NO: 132868 - DNA, 1130 bp, Cannabis sativa
  modified_base (27)..(40): a, c, t, g, unknown or other
  modified_base (579)..(584): a, c, t, g, unknown or other
aggatgttaatgaaacatacatggtannnnnnnnnnnnnntggtaaaatatttctaacatcttcctcgttctggggcgtctgggaacgcaccctaaaaatagcgttaaggtggtcatgtaggttgcccctgtgaacttggtatcttcctcctcgcggtgtctccaccgaacctgacctggtgtacctgtttggagttcgactttgtgaagacgaagagccggactcaacgtcattctcctcgtttcgcggttggggtctgctgcgagggttatgtcgctctggatcttcttccggttgcaactcacggttcaagttcctcgcggattgatccctcgacattggctgattttaatcaagcccttcttgatctgttcttcgttccctgcgagcacggttagttcgacgtctagagtttgttacttgaggattatccgagcgggtagtgggcactcaaggaggatgccatgttctattccgtccgtcaatttcgggctataaagcctgcattttgtcctgtatagccgcgtactgatcagtggttaactgaacaatgccctcagataccacgacaggtgtgnnnnnngggaactgtcctattgtggccgctagcgtggatgtttccccaacgtgagcagcagtttcagggaacaaattgattggccttacgctcgttcgtccttctcctccattgatggtatcgacgggaggtaccctatttcccagaagtggaacattcatcgtctctatgttaattgattcattgttaagacattcattcatctaatttccagccatggtaattctccttctaaatcagcaaagtattagcgttcccacagacagccccaaatgtagatgaagaaattttacaacaccaaaataaataataataatatatgtataataagtgcgagtagtcgacctagaatggcaggtattcaaatcaagaacaaaaatacttagcacaagactggaaaaataatgaacacaaagggaagtatagtggtttagtcagatctcggtctgcttagtccactgttgcaaggatcctctcccttttatttcatggcggatcacacctctatatacaaagcaagtgtcctaccatttacacaaggattgcattcat

SEQ ID NO: 132869 - DNA, 560 bp, Cannabis sativa
tatctctcacactctctttctttctttctctcattttcacggtgaagaaaaggttgcgatggtggtggtttttagatataacttttgagcgcatatttgatggaggaacttgatctcttccaccgaaggagctcgctctgatggaggagtgcagatctagagtttagacctcttctttgttttttgattgtttacccattatcagatatatggttttttttttgatctcgttcggtggcactatttgattttagatttgatttttttgatctattaagttgtgtttagtggtggttttatatatgggtttaattattttaaaatgatttagatttgaaagataggctgagatggaaggggtggtggtaatagtagtgcgcagtagttttggtgattatgaagatgatgaatgaaataagaaaaaaaaatttggataaatacaatcagaataaggaagaaagaaaagaaaaagaaaaaaaataattatttattttaattttaatatgatttattttaattctaaattaatatttgttaacacagatttttgttaactaaat

SEQ ID NO: 132870 - DNA, 857 bp, Cannabis sativa
tccatcaaatgctttaaacccttagcaattatacatcatcccaaagtcgaagaaatttttctctacctatagctcaatgaatagtgaagaggtaaacatattttatattttttctttttttcattaattttttattcttctttatactcatttgtatgtctttcttattagaatattttctatttcaagaatagaatcaatgaattaatttaagataaataaatattttatattcattaaatctagacacaattagctagttgatattctatatatggtcagattacagtttatcaaatatttaatttcttgaattaattgtcaaaatattctattaattgtggtagaaactttgatagaatgtctcacttatataaatatagggtctcgaaaccggagctcactactcattctgtgaaaataataaatccatctaagaagagtaaagggagttgttgggattttatgggctgaataaaatgtatttcaatataatcagatttactaactaataaaagatcataaattattttatgttgcatggttgacacaactactttcatgattatatatttaatgtgtaaattctattaaatttaaaacatatagttattcataattatagtattttttatacaatagaaaataatcacgattatatgttttgaaatctttattctcataatttattagtgcactgaatttccaccgacatgataatcaacgttaaagattacttatacctgtataagtggaatattctttctaggactttagcaaagtatactagtatcgaatgtatggagtatatatcgaactggaccgatattgatagtagaaaagatatcataaactta

SEQ ID NO: 132871 - DNA, 751 bp, Cannabis sativa
taaaattttgattatgtgttaattgtactcctttcaaaactctttcttatttatgtgaatatgtcttttatttaaagtatcaacttttattgttgaaataaatgttaattttttttatccatacttattttttaataattggtccccccaagaacttaatcttgactccgcccctgacgataagtagacccaatgaaaaatattgcactattttacagtcatccaaaactagaaaccttttattttatttcgttcttgttcttcaattcttcgttcttgcattcaaaggaaaatttttgtattcaaaatttggcgaaaacttttttgaatgaagcatattttttttcctgtaaatgcaatctcaaattttgtttgcttccttatgagtagctataaaatttatattttgcttttttgataataacacctgttaagagttagttaagcaactctaattctgttataagttgttagtagcttagagttatgtaagttaattttgtatagataatctttgtaagtattttgtaaaattagcctatgaagttttctattagcaaaataactttataaaaaaatttattagcaaaataattctttatgatcgcaagaacaactatgtgttacctgtatgactgtaaacgactattatagtggtaaaacgaccataaatttatactgcgattgtaacgcccgtattttataataataataataaactcgaaaaattaattttttaataatttatata

SEQ ID NO: 132872 - DNA, 1216 bp, Cannabis sativa
atatgactatatttaaaatttagggttccgaagcttcacctaaacagtgcacattaacaatcggtggcagtaaaaattggtgtactggaacgtcaccaaaaataggagtagtgtacatcaaaacgaccacctcgacgagttgatcaaacccatgccaactgtttgtcaaaacggtacacaacgtcgccgaaaagggcggagctacaaaaatgtcaccggaaaaagtagtgaaccgggaaaaatagtttagtgtaggttgttctcctcgacgagctgagtttagtggtgaagacgtctcgtcaaacggacaccgaaggtgaccgaaaaatccgttcaaagtttgaatcaccaacctttgacttgcgatcccaagctaacggcggcgaaaggagcggcgccgcttggggggtgaggtcgccggcactaggaggttcgagtggtccggcgcgtggggctggtcggtggccggaggtaggtcgtcggaatgtggtggttatggtagtttgtgggttttctttcttgcattttgaagagagagaaaaagagtgataggtaaagagagagggggactgaggggatactgctttattgcatatattaatttttttttacatacatattatattatatttatttatttattatatatatactcgatttaactgagtcaaaccaagtcttcacaattatactttaatttaaaattttaaattcaaattcaaaataaatatcatataactgaataatagaatttagtcataccttttgtaatatttcaaaaatttaattatgaataattaggatttattatatattatgagttaattaggtattaatgagtaggtttatgatactactaatctaatttagcataaattaaaaattttactataagtggataagtgtaatttattaattacagagatttatttagaatatgtaaatatagtgtaagttacttgtgaataaaaatatttttaattttgacgaccttcaaggccaaaaatgtcacaatagttttagtcagtaatattaatgggattattgagataaattgattttagaaatgaaagtacaacttgttgattttaatgatcgagattaccaagttgattgcctttaggttgattgatttcaacatatgaattttagacttgaattgagaataaagaagtaaaacacataaagatttacaagcttcatctgcactgagaac

SEQ ID NO: 132873 - DNA, 1391 bp, Cannabis sativa
gtaatttttttattttatacgcgtgtgaaataggtagtttaaacattgaattctatattataaattatttcaaatttcttaaaattgtacaaaaatatattaaataactataacgtacacgactatgaaaaaattaaactaagaaactattaatcgaattttgaactttatgggagtcactggaaatgatagagtagcttgtgcaagttccagttctaggaaggtgccctggtttggtgggatatggtagctctcacccgagatgttaccattatcacctgggaagagttccaagagttgtttaatgcgaagtactataatgaagtagttcgtagtacaaaaagactcaattgactcggaaagaaaatatgttagttacaaaacatacgacatagtatgacagactggctaggttggccttggggatagtgccaactgattttagtaagaaagaaaaatatctggatgggctaaatccaaagattaaacatgatctgatgatcacaacgaatgataccaccactaatggagatatggtgggaaaagcactacgagctgaaggggcagctgaatgtattcaagagtcccgaaggactcagattgttggtgaagccaatactcctacctttggttatggtaggggtggtagtgactcaaccactgatcagaagagaaaagttccatctgggtttggtggttcgagtcaaagcagaaggttccaagggaaccaaggtcgtggtaactgtcatagtggtcctgagaactagtacacttacctggactgccctaattgcaaaaaacatcatttaagtgagtgtaaaggccaaggatgtttccagtgcagagtaactgaacattacaagagagattgcccacagttaaagaaagaagagcagaagactgaagcaaaacccgctccagcaagggtgtttgctcttaatcagactgatgcagaagctagcccttcagttgttacaggtcagctttcagtcaataacttttactattctattttgtttgactttggggccactcattcgtacgtggcagtcagaataattggtaaatttgggtaggccatgtgataattatgataaaggatttggaaccctaatgcccgacgaagaattaattatattcaaaaggtgggttaggtctgtgccggttagaattgaaggtagagagttgagtgttgatttagtggaattgggtttagtggattttgacattatacttagaatagatttcatgtccaagtatgctactagtattgactataggcggaagatggtgatcttccaaccttagggcgaggaaccatttatgtttgtgggattagttcaggtagggctaaacattttgagcgggtttgacccgaacccgagcaaccc

SEQ ID NO: 132874 - DNA, 623 bp, Cannabis sativa
cgaatgacaagctatatatataaatttgattttactcagtatagatatagacaacatcttctgatacattcatgtgtcaaaagtgtaataatttttagaagggtatgagcaatcttaatatacagaatgataagttttaataaagataaatgaggattgagatcgtgtatgttttgattttacatgttttaatttaccaagagttaggagtgactaaaacttattaacactttttatttgaatttacattaatttttattgttttattaaaacttgagattgattagatagttctttattgtgttaactcatattattagtgatcaatagtttaacagtaaacattcctgaagtgtgtaatttccaaattaaataatcatatttttacccatcccccaataggaacttggagagtttgagatctatcatcattattgtaacacctcgatattttaccttattttacaaaatactaactttgatgcataaattgaaaagattcaaaactgtttaaaaatagacagcgggttttactataaatatgtaaaagacgaataatcattcatattaaaataaaataagtagttgaatgcacttttaaaataaattcacaacatcccgct

SEQ ID NO: 132875 - DNA, 665 bp, Cannabis sativa
gttgttccttaatgtagatttaagaattatacaccatcatcctttgactattaatccaccattatataataagaattatttctaattactaattaatttcattcatttaaaccccttggtctttattaattgaaattcaacaattaaataattagacagataattgattattaataattattatatataaaatatactatatagttagactttaaaactaactacaagacaagatagttgtgcatttaggttagtttaaaataatattaaacaatagttttgaaaataagttataatcacctatagctagtttattaaaaaaattagttaatttattataaaataatataaatataattaactatctatttattcaaaatacattattaattaaaagaaaattatatgtttattacaaattttcaaaaagtattattttaatatactttcaaaaagtatcactaactacttttcaaaaattattatttttatatggaatatatatgtatataaatatcatttttataaaatataattttaaaaataacatatttaaatatctttgaaaaatataaatatatataccgaaaaataataaaactattttttgaaaaaatatttattttaatatattaaatttaaaaataatgcacatataaaaaaaa

SEQ ID NO: 132876 - DNA, 632 bp, Cannabis sativa
ctcaggaaccagccggttcatgtagtgggcaagcatctctttgccctccttggcctctggaagctccaaaaaaggtgtagtatgggcgcgcacctgttggggttcacttctgacaagcttagacccacccttcggtggttcagacctgtccgagcttcttctgcgagactccttggacttagcagcttttggggtagagggttttgtagccgttagctcctcggaaagatcaatgacctccccagcaggcctcttttccatagaagaggacccctcaccgcctttagacttcttggcaggaggagaggcactagagcttccgcccattctcttcttcatagcgtcaagcatctgtcgagacatgtctgtacagaacaaaaaataacatgattagagaaagcagacatcagaaacataaggcataacagtcaagaagctcaaaaacaagaggaagtggcatgcaaagtgatcacccaagtaaggatcaagactccatcatcacttgacatcaatcttatttcagacataatagctatcccttttccgaacacgggaggggacgaccgagcaggcgagatgggctcccttatgcaaatcgcatgttcaacaggcctaggtggggccagaagttt

SEQ ID NO: 132877 - DNA, 662 bp, Cannabis sativa
tttcttgtaatcttgatgaaatatttttatttgtattttgagtattttgattgtaatcctcctattctatcttgtaatgagaatttttccaacatattgttcgctttataatgtataatatgtatacttgaaatgaaaaattatgaaaaagaaaagatagtgctggcaatccatattttcgcattagtttttataattggagcgaatttttatttttatagttgttaaaagtataaatttaaaaaaaaaatgacttttttttcaagaaaattatttttatgaaaatttttagagaaaataaatgaaaaatatagaaaaaccaatataaggtacttagttggtaactggttaaccctatatttacctaaggatacctggttactcttacttaatttttccatacctttaaactttttctttaattttcccataaaattatatttttgaaaaaaaaaaaaaaaaaactgtatttttattaaaaaaaacaaaaagtataaaaacccataaaatttataatttccttattatttttgtatagagtgctatattctaattttacaacaaatgttggtaagttgaaaaatgcctcttttattcatcaattaatcaaatttacctctaattttatgtttatttgaaacatacctctttttatatgtatt

SEQ ID NO: 132878 - DNA, 1233 bp, Cannabis sativa
ttagtaaaaaaaacacatttgcaccaagcaattatctaaatcacaaacagacatacttactgtgattgcactttcgtgaatggcattggaattttggaagagctactaagttttgtttccaatgcattaagttctgttaaaagagcatcaaagctccaatctggttcagggtcggctgcaattccctcaacatttttggggcaacgaagttccaacttaacagctcccctaaacaaaaccaaattcatcccacaaatcagaaataacccatcatattaacaccccatttgcttatacgatttaaaaatcgtaaactttcagtcaattaaaaatgccaaaattcataactttgttcatagatgataatcaaaatccaaactcacttaaaagaagatgaaaaaaaacagcactttctcactatacgaaactaatatgcaaaagaaaatttaagcagaatgtgaaataacaaaaaagaatcaagcttgaaacttacattgtgtaaaacttcaattagaaaaccttcggttccccaaaataatagggtttccacaatccactatctactccctctcttccgtttgtggctcaaaacgcaatcacgaacatcaactgagttagggtttttggttcttgaccgttggaattggaaaccccacactgaatgaaagaggttgttcaataatctacaagcaaacacaccacggtttaattcagcaaaaaaacacaccacggtttaagtttctcccccttttttttttaattactctattattatttttttcaattttttttttttaaatttaagttgcaacgctagttgtaatagaaatttctacgtaaaatttcgtataaatacaaaatatatatatattttgaagtgtaaaaataaaaaaaaattcctcttttcgattaggagctttatgaaaatctcacttgaggtttgaggtttcacattcctacaaagaaaattaaattgtagcagtaggtaatataacttgttagagcctgtttaataacttgattttgatggtacacaatttgttatcagaaaaataaatattttattttatttttatttttatttatttgaaattaagtcatctattagggtagaaatgtaaattaattttattagttagttgtatgggaagttttatttaccccataaaataataaatacaccacaatattaaaaaaaaatataaacttaaataaattttaaaaattactctt

SEQ ID NO: 132879 - DNA, 802 bp, Cannabis sativa
ttttttttttttttttgcataaaagggcaacaatttagtttttttgatcaataggataccaataagttatattttcattttgttcgaaaaaataagttatttttttgtgaaagcatcctctttaagataaaaataattttatatacatttgttacctttttgtttagttacttttaaaattacgtgtttatttttagattatttctttagtaatatttgattatatatatgatggtaactaattagtgaacaattccttttatgagcaactaaatagttcttttaattttaaaagttgtaagaaaatatatgctttcgacattttgaaatgatcatcacattgaagaatagattatgataacgatatattttttaaactcaaccgaatagcgatgtgatcaaaaataatttttaaagtttaagagaataaagataaaaaaagttgaacaataattttttttttaaaaaaaaggaaaaacgtggcagggctaatagatttaaattcagtaattaaaaaaaaaattaaagaaaaagttatgcaacgttattaatatttaattgagattggcacattagttttgtaattgagatatggaaaacagttttcttattgtcatttcccaataggtttgcaattagatggtttttttgggcgccaagatgcaaaatggtcctaaatttaacaattaagttaataaatgtcaattttttaaaaaaattaacaaaatgtccattctattaaaagttgcataatgaaattacaattataaccttgaataattaagtgtttggtatagttatt

SEQ ID NO: 132880 - DNA, 510 bp, Cannabis sativa
atctggggctgcacaactacttctgaaatattctttgcaatattaagttatttgtcctttcatattggtaccaaaaaaaaatcttgtatttgtgacttaaatagtgtgtggtgtactatttaattaagctattacttattgatgctcttttcattactgtaattcttttcttggtttagatgtcaatatgaaaatctttaatagaaattggagggacttgtaatttcagttgaaagaaaactaatattctttatgataaacaccatcaaatatgtaattggactacacataattcttgtttatacaatattgcattacgaaggaaaactattattatctcaaacatgttctttttgtggcctatgttgtacatgagcctcgaaagcctaccatgagatttacttacaggaaacttgtaacaaatctacaatcttacaagcaggtaatgctttatatagcagtacatacataatatcatctctacattacgggataggaaattcaaccttt

SEQ ID NO: 132881 - DNA, 1017 bp, Cannabis sativa
ctagaatgcaactaaaaaaacactgacttgcaactgaaataccgccaagtgaaagaaagataccaatcgttgaagataaaagactatcaaagcctacacttttacatacatataaaaatgaaggaacctgatttcacaacgtatctattttgtgtgaacgtggtgagcaacacaacgacaactaacaatacatcattcttggaaacgagcaattcattagttgcacaaacaaatgcaatagcaactatggtggacaatgcaccaccaacagaagaatcaacaactcaataacaaacaaagcaaggcacaatgttggaagatgggggaacaatattcgacttcatggattatgcaaaactggtggctgggaaaatagttgcgcaactagaaacaactcatacaaaggttaaaatcactgattatgacgaactactaattgcagatccttaatatcttgaaatacaagaagcacaaatttacaaggacaaagaaacattaaaaagtgtgcttagtttctatgcaattagaaacaacttctaatagaaggtcaaaaagtcttgtgcaaatatatacaaaatttgtaacttggatcccaaatgcaagtgagcacgattaatggcataaagaaatggaccaaccaagtttttataattcataaatatgaagaaaggtgatacgtacttgtgatctcaacataagatttgcagacaagcgataggctacaagaaagttgattgaaaactacatcaagtcaaggttcaccaacataaaaataactcaaataccacaagacatcagaggagaattcaaggacaaatatggcgtagaaatgaactacatgaaagcatagagaagtaaagagcacacacaacaagaattacacagaaaagctaaagaatcgtacaacttgcttctaagttttttgcacatgctccgaaaactaatcctgaaaccataatacacatgcaaacagaagaagataacaacttcatgtacttattgttggaattattttac

SEQ ID NO: 132882 - DNA, 660 bp, Cannabis sativa
cccctcctcaaaaaaagccatgagagtcgtggcttgaaattgtagagggttggaacagacctctacaatttgcgaactgaagtccctcgttcggtcgtatgtacctgacttcatttttctgactgagctaaaagttgacgctactctactagtatatctttttaacaatttttatttttattttaatattactgtgcctgctgttaattctgcaagtggtgttattctggcttggaaattcaggtttgacttcgaatatatatcttgttcccgtaaccatatttttggcatggtatactcggaccctcctactcatccctgacttctcacttgtgtgtacgatctttcgtattttcatgcgaaaaagatcttttgggttgagattatgagggaggaggataggtttggtggcctgttgttgattattggtgacactgattttgtgcttgagtctaaaagaaaaggtttaaggggaaagatcaattcatccccgttattttcactaattggtgaactctcgaaatctctttaatttgcctattcaaaaggaccagtttttagtctaatttttttatgaccgcgtatgttatagttatttaagatcatttataaattttaagagaattccgagtaattaaagtcatgtcctctgacatgtga

SEQ ID NO: 132883 - DNA, 584 bp, Cannabis sativa
tgtaaaagactagaactttgtgagatttgtctatttctgtgattgtgatgttatgagttaagtttgtttggtggacaataaggtgtaaaagacttcaagtagaactttgtgagttttgtttagttcgttgatgttacgagttaagttggctgttgcaatttttggcttttgacttattggaatcattttttgagtgttaattaaccatggtttcttttccaactacgtaattatgctttttctctactcattagatatagggaacgactaaagtacatctccttagaaagcaacaccggtacactcctcatgttttttgacaagtctacagttataattttctttagagtaatttgcaacataaattaactcccagttgcttaagtttaatttttggctacaataatacttaagttatatttttggaactttatagatacctgattgttaaatattaagtaaattgtcatgtggcaatcctaattagtccaagtcatgaatttttaattttttttttaaaataatttatatgtaccaataagaaaatgacacgtgataatgatttgacatttaatgttcaggta

SEQ ID NO: 132884 - DNA, 602 bp, Cannabis sativa
taaatgtcaatttcgaaaaaaacgggtattttcacaccctttagcttccctttttataagtgggagtgaaaaaacagcctctaaaggccaagattgtagtagtgaatgccacacatagatcgttataagaagaaaatacttataaatgaccctttaatttatattacaaaatacttatttaaaaataatagattaactcctatgtctataagaaaacattagtgacaaaattatgactactcatcaatataaaggaataataatattcccacgactatgtagtcaccgaatagatagatttaatgaatcaataaaatacctaaataatatctagcatccatcattctttatttctaactacgacatagctaatttaggtcatctagaccatccattcaagtttaattacaaaatcagttttcaatgaaaagtttgataaataaaataagactaaactaataatgaatttcttccacaacggtaccatcttcatccactagcattaaaatgagttcctagaatgagagaaaatagggggtgagcttataaagcccaataagaaaataactaatatcaaaggacaattggtttaataaaaattc

SEQ ID NO: 132885 - DNA, 982 bp, Cannabis sativa
gggcataaaatccaacacatacacgttagtaaatctagatcctagtaaaataagtttccaacactacttacagttgttgatggtattggaggtactccataagcatggacaagaaatctaaaaaagtatcaaacttttttcttttcaaatctccccataatagggatatggtagatatctttgaattaaggccactagcttcatgtcatcgttgaccttaatttttgttgctgcattcataatcctttggtatacttcttgagactttctcccaattattgctttatattggtgaacgagctaactttcatgtcataatcctttgcaattatgaaatgttttttaaacataacttgtagatctttccagttacaaatggatccgagagataattttttctaccaatctttggcaaactttgataaagtcaacaaaaacaaagacactttgcatcatacttgccttcgctacttgcatcaaccggatgtatttagacaggtgggtcctggggtttgtcctaccttcgtacaaatccatctgaggcattctaaaatgttccggcaagggtgcctctattattctccttacacatggttccagatctatttcttctgaatcagatgcgaccccactttacttccgggcaagacgctccgtgaacctggtcaatttggctagttgaatttctagatgcttttgtattttcatgttgaaaataatgcccatgaactctatcattgatatgatttctaagattattttcacgaggtcatgctttctcacctctggctcgttctttctttgtgtttaaacattcatggaggtcctctgttgggaaactaccttctgaaattgggtgaacctcttttactccctcactctggttaacgaaattattagggcagtttttccttccctgagcagtaggcctttgtacttgagtactcggtgttggaaattattttaccaggatagatcggaa

SEQ ID NO: 132886 - DNA, 742 bp, Cannabis sativa
ctaatattttttttccaaaaatttaaaatactaaaactaattctaacttgatagcaaactaaaactaataacttataattttgtttcttatggctcgatttcgtcacatcattctggtggctcgattatggcagcttgttcttcaattattgactcataatatggttttaatttctaattattcactttgaaaacctttcccgtagttagactcgcaacctccactgctccatgaagaaaaactttggttactacaaatggtcctatccaccgtgacttcaacttccctagaaagagtgtgagtcgagaatgatacatcaaaactttctaaccttctacataattcttccgatgaatgttcttgtcataaaaagccttggtttctctttgtagattctcgagctttcacaggcttcattgcgaatctcctccaattcatgcaattcaagcattctttgttggccagcccccaccatgtccacattacatttctttacaacccaccaagccttgtgttctagttcaaccggtaggtgacatggttttccataaaccaactgatatggtgacataccgatatgtgtcttgtaagaagttcggtaggcccataaagcatcatctagcctcatactccagccttttcagtttggattcacagtcttctcaagaataagtttgacttctcggttagagacttctgcttgtccattggcttgagggtgataatgttgggttttgtgcc

SEQ ID NO: 132887 - DNA, 1234 bp, Cannabis sativa
ctcgtggtaaaatttgtgttttttttccgcaatggatccttctcaaatttgtctggatatgcctgctgctgacctctccatggagaatgacattctggttgctcaagacattccacttgacgatgctgctgatccaacaaccaaagttttggtgggtaaggtatttctccctgtctctcttcctcttcaacgtttaagggatcgtttggttaccttgggccatattcgtaacgggttaactattgattttttttttatggaagatctctttctactaacctttggctatgctgcggagaaagtacgaattttggaaggccagccatggcatttttttgcagaggcatatagtgttggccgaacttcctccttttgaatagatcatttctgcgaatgtttggctagttcctttctaggtacaaattcatagattagcaattagaagaaacactgaagccatgggtgtcatcctcggtaactatatggggacttttgacaaatatgacaactccacacgctttcgctttctgcgcattcgtgttcttctggatgcctacaagacacttcttagaggtaaaaggattcaatttgagtattcccaaaagagtttgtgggtggacttcaaatatgaaagacttgctgaattttgtgaattttgcgaacgtattacccataagacggatgaatgtcctgctgttctcaatctataagaacagggacttcctgttgaacgtacctcttttcctgtgatccacactactggtctccctccaatgctctccccaggcctccactagcgcgtgcctatcaacaaaatcctatgataattccgtctcttcttgtggtgcttccaggaaactatggttttattctatcccttattactcttattctcctactaatcactacattttttccaaattttatttataactactgtttattcaccatttgttcctttattctgttaattaaatgtccctgctattgtttctggggttgttggaactgctccttccactattatccaaccaactttgaaatctgataaagttaaaggaaagcttgtaattgcatctgagtcttctactataactaagtccttggatgtggttctaactcaaaagcggtcaaataatagaaatactactcaactaattcacccactatcactctctcctactaagcgctcccaagaaaaaactaaattccttggtatggataaaggcaaagc

SEQ ID NO: 132888 - DNA, 668 bp, Cannabis sativa
cataaaactaatttttggtacatatgttgtttttgcttaaatttttgaaaaacttaccaaaaagtctcaattcttgtcatctaatcgatttaagtgcttgaacacatttgttatatattacttaaggtatgggaaaatttttgaaatcataactatgtcagtctttacttatctctcatactttcatgtattttaaaatgagtttttgtagattgaatgtttaacttattttgactatatgaactttgatctttttatgcatttagaaatttctctttacctattgtgcttcattgatacaaatcataacttgtatgattaagagagagaaatatatatttagtttgaccttacttgctatgccacccttttcgatgaaatcaaaagagggagaaatattagaattgattaatatggcattaatcatattatgctttcgagatttaaaaactttattgagtatatgattaaggggcactttgtcatgttaagaaaaggcaacaataaatatgcaaaggtaaaacggtataaatcaatatatgcatatattaagggggaggtaaactctacatgtttcaatttactttttctttcctttaaaataatcaaatattttgatatcatcaaaaacggggagaatgttgaccaaaagtcaatcacttacttat

SEQ ID NO: 132889 - DNA, 739 bp, Cannabis sativa
gtatttttgttgttttttttttgttgtttttgtgcatttgtgaaattaacccaaataaaaaaatagcatttattgtgggctaaatttgtcagagtattatatcttgtcatatttgacacaacttttaacatatgccaaatttagcacgttttttagaatactattaaagtagtaagtgtgctaaaatataacaatacatcacctttttgttactctatgagagatatttttacttattagtaaacataccattagttaattataaaaaaatgggatgatttcaaaaaaacacaaaaataacaaacaaaaaaatacaaaaatattgtttatatgaatttttaatatttttacgattttttaaattttatttacataaaatataattttttttatatatttttatgttgtactttattattttattattgtgttattaattttttgttatttgtatattatttttttatgttgttttattgttttgttacttctataattttttttttgtatattacaaaataccgtgaaaatatataaaaaaaatttgaacataaaaaagtaaaattttattttatttaattattaaaaaaattataaaagaaagaaagaaagaaatccttataataaataatttagaaaaattttataatgcaccaccttaaaatagatacattgatacatctctatctgttttagtatccgaaataatgttttagtaatttttttttatggtcatgta

SEQ ID NO: 132890 - DNA, 652 bp, Cannabis sativa
taataaacatacttgtgagtacatctaagatcctggtaaaataatttccaacaatcaggtagaaagcttccctaatggatttgttctcccatagactttcagttcttccttcagagctttggagcgctctttgtcaaggagtttgtgtttttgttgtacaggtcagaagtttactttcttcatgttgggtgcttaacagatgacctgggggtcgatccgaatcatgtcctcatgcgactagacaaatttcttgatttctcttgaggcaacccatgagaatctcgctcaaaacctccgtcaggtttgttccaatcttgataaccttagtcaggtctgttgtgttgaggggaagttctttggtggaaaactcccaagtcaattttaaaaaatggtggtcaatgtcgtccccatcttgggtgcaccttcaagtggttttagatatcatctttgtcatctttgcattttacactttggaggtcttcatcgtctctccaacttttcctcgagaggttttggtcatctcccctaatgacaagacaacagaggaggtcgttttgacaagagataatgaagcattttagcactcgcgggtagttccttgattgccaaggagacaacctgtaatgccctagaattaaggaatggattagca

SEQ ID NO: 132891 - DNA, 4482 bp, Cannabis sativa
  modified_base (4441)..(4443): a, c, t, g, unknown or other
ggcgctagtctgcagcagcagcaacagcaaccaggggagccacagcaacagcagccccagcttatggatcctctaaatattctcaatattgggtatgattcgtttcccttccatttttaattttttagtcattgcttaattgcagtgttttgtttcgatgttccgtattattttctattatgcgttccataataatgcacgttataaactgcacattctatttcaagagagctgttagtgttaactattgcaaattttgaccaagttaactttgttcccgtggacttacattattttctagtcttaacatgtatgtttatcagttagtgtagtatcaagtgcttgcttaggatgaagattcgttttgttggttttcttcaggctagctgacacagaaatgtatagattaggagtcatgctttctaaagtaggttagttagtgtattcaacaattgcattttagattctttatgtttttgtttcttgcactcgctgaggtcttattcaatttgcttgaaatgtcgtcaatggtcgaaattgtacttctcaaattgcgtagttgagaaagaaagttagaaagtttggcactttggctgtatgtctatgcgaaacaaaacaaatcttcaaccgtaaaatcaatagattattgatgctaacaacaaagagggagaaccctcactttgggcttcgaatatagacttgcattatcctgctgttctcggtgtaactttcaaataaaggtgcagactgtagacttctatgactgacaatcttgctctccaaataggggagctattggttagttatcaatttgtgcgtactgtaattaatcccgataaagagagacaccattttcccctaaagctgagggaaaactctcttgtttggggaagagagtggcagggtggtgtttccacattcttgggtgatgactaaaaaaaggaaaccttatttttctatagagacaggtagaaccgtagaaagaaactagctgaattattgtactgtaaattggtaataaactctgacttcatctgtacaggatgggatgatcagtacagacttaatattgccttttattccatctttttgacaatttttcttagggtctttgtcttgacaattgatttgatttactttttttgcagtatagatcttccctgaagtatttgttacatcatatcttatcttctcaaagagattaattaaagaaatgtatcagaaattaatcttaattagtctataaaaattttcttggatttaaaagcttataatttaaaggaaatggttggtagcatagcattaaaagaaaacatggaaaggttatgtagttgaatatttaaaatgataaatcattgctcattacttctttgtgtgtttgtttgtatcgtgcgtgttttaagggtactatagagtagagtaggtttcccatcaaacttaatcatttccccaacatgtcacatggttttcctttcatttttaaacacccaaggaactgcatacagagttaggttctccattatgctcccatattgacattttcttttttgctgtatattgttctctcgtggacaatagactgtagatataattttgtttctactgaagcaatgcatgtaaaaagaaatcagcactaagcaggggctatgaggatttagaagggctagttatttacaagctacataaaagtgttggttgcattggcatttcacgactcttattgattctatttctctttctttcctaaagccaaattcaaattgtaaaactgaaaagcttccacaagttgatttctgaaaattgtattcaatgaaaatgtagtggaggggaagctgggtgacaaacagtgtggtccttggtacactggtacacctgtttccacaataaatgttggattgttgtcctataaacattatttattatatgtgaatgtcttgttgttatctcttcgttgattttgtccttgtgagtaggtgagacaacttatatatataatactaagcaaagaaattatgtttaatgttgcgtcagaaaattatgtttaatttatatatatttggattgaatttccttttccatctccgagaactaaagtgtctaaaattcattggctgccactattattcatttctttctttttctcaactcttaaacagtattacaattccaccagatagtaaagtgttactgtaatttggtgcaagccttttcttataacttgcaacatattttgctgtgaacagctctgggccaggcatggacaaccaatttagggcgtgtgcctggggacaatgattagaatgaaaaaggaggagtttgtgcgtccttcatctcctacgtaaaaaagattcagttccagcattgcaatgatgggtattcaattggaaatttttggtgctgaaagaaagctccatcattagaaagattaagtatgagtgtactaaattttagccttcttttaatgagtaaataaactttcttccatgatgtattgtagtgttgctgtttaaatacaaaacgccaactatattagagaacttaatagaaagtagtagtttaaaagtaataattaaaaaaaagaagggccttttactgcggaatatgttttgggtcaacatgtgattattctctagtatatctctcatatgtttacttctatcaccagacagacaaaatgatcctttaattatgaactgttgtgcattagtaaatgacaaggttttgtaaataaggagtttaagaaagactgtaccgcaattgccttttgtatttggaggcagtactgcactcgtaatatacgtggatgtcatgattaccacctgtattttgaaaagtttgttagtgcttacaagtctggtaagtattttcgtattgtgtttgaatttgtgtccgtacttttttttaggtcgcaagcttgttttcttatacgaatttgtgtttcatttttttatatatttcattttacaattaggaaacaaatcgcgtttcgcgtattgttatattttatttattgataattaagttataaaaatatattaaagttgatatatttttttaatagtatgagtaattattctactaaatttttttcatagtttttatacaaaaaaataaattattatggtaaaaaaatttatcatacaatttcttatctaagaaagaaagcaacaaagatattttcaaacgttatagtaataataaaaaaaaataaaggttggaatattctcacacaaaatagagatctaaaaaaaattatttgataaatctatagagaatttattatataattttaaaactattgtcattcaaagtcgatgtcatcactgtatcccacttgtagtcgcaactacattcgaagtcgctatcattatcatatcttatttgtagttatcactattgatcaaaataagtttgctctgtacataaaataaatcatatacttgagtaaattaactactaacttttttatacataagtgaatgattttgttataaattcctcacttgtctcatcatataatttgtgacctaaaaaaaataaaaagaatatttttttaaaaaatataagataaaaaaagacaaaaatagagataaaaaagattaaaaattgaaaaatcctcatcaagaataaagatttcaaaaaaaaatttgacaaatttgtgaaacaaaaacattatatattttgtaatctaaaaccgaaagaaaaagaagagttattgtcaaataatctaaggtaataaaagattaaattaaaatagagatctacaaaaataattgataaaagtgaataaaacttattatataattataaacagaaaagagaaagaactgtgagaatatagtaccaaaacttttaaaataatagtcaacaaatttataagagactatatatattgatattttattatttgatttttatacagatattttaggttttttttttaaattaattcttaaattacacaattaataagtatttgatttgagatacaattaaatttagtgttagttttaatagttttgatttaaaattgtatataaatattttttattaattttaattgagagacttttgatttaaaattgtatataaattttttttttattaattttaatcgagagaattagataagactatattgagtgaattttaattgtatatagatagatttttaaatttttaatttttttaaaacttagttgttagatatttataaagtttttaaaaaaatttattgtattttattttaaaaattagaaaaataaaaagatatataattaaaaaaaataagaaaataaataaataggtttttaataattaaaaaataattagaaaagagataaataagttttaaataattagaaaaaaaataagaaaatggatgaacatgttttaacccattttagaactccacgtcaccgtctcatacttctcttttatnnntatatatatatatatgttagataaattaacaattaaccc

SEQ ID NO: 132892 - DNA, 977 bp, Cannabis sativa
tgaaggcgagattgatgtaccatagagtcttccatggaatctgatctatttgcgtcaaagtgttgtaagaaatatctagggaaagcaaggaatccttgcccatattccataacaattggggaacactgcctcctattccgttgttggagagatccaaaagttgtaaattttgcaagcttcttaggaagtacggaaactcacttaatccacagtaagacaaatacaggtacgaaagagaatagggaaaagtatcattactattattagaaacgaatgaaaaactattattagaaagatgaagagtattgagatttttcaactttaaaaattggtttaattgaacgacaccactcaatttatttgaaaaaagatacaaagaagagaggttgaattgctgaaaaattgatcttggaatgaagccttgtaagttattacaagctaaggaaagagataccaacgaattatgttgaaattcctagatgctaccactgaattgattgaaatttagatctaaatattgtatatatggaagggaatatatccaagaaggtattgtcccaataagctcattcccagatagaaccagggacgttaaatgcaatggaggagaacccactaactgatattttgaagagacacaccagaatgaattttcggtttaatagttactacataattctggaacttgacctatgaaattattccatgaaagatctaactgggttagttgctgttgatttaaaatggatgaccatggaatataaccttcaaaattattgtgccctagggctaatgaagttatttgtgtgcagttgtcaagaaatgtgggtgacagttgtaaaaatttggatttagaaagagataaaacttgtaaatacttgaactttctacaaaggtaaggatctatcatgactccagaactagaaagatccaacactttaagtgggctgctccaattatactgtggaaatgaacca

SEQ ID NO: 132893 - DNA, 904 bp, Cannabis sativa
  modified_base (66)..(66): a, c, t, g, unknown or other
tcttgttaatttgttattgattttttgttatcatgtatgttatttttttgttgttattttcatgtnacttttatgtagttttcttgttgattttattttattttcgagttattttttaaaaacccgtaaaaatgtaaaaaaaaatattctttaaacgaaaaaatataattattctacaaaaaatagtgtcttatgtaattattcttaaaaaaaaaaatatagagttttaaaataccgcgaaccaattaattaggagcattattaaaaatagatggaaccaaaaccatactttgtaaaaacactacgggttcgtttggtacaccgtattgtattgtatagtattatattgaattttattttatataatatttttatttaaaattatatgtggtattaacttttatagacacctaaatatataaaattttagtataaattaaagtttatataaaaatatgatatataataatccaatttaatataatactatacaatacaatacgacttaatacgacatttcaaacaagccaatgagtaagatcatttacaatgaagtgctaaatttgtgatataatgttatagattagcaattttcaagagatatttcttcaatgatgtgttaaaagctgtataaaatattttagggcccgtttggcacagtttttggaaaagctaaaagcttcttgaaaaagctgtgataaaagtgtgtttggtaaacagtcaaaaaacagctttttgaagaatttttggaaaagctacagctaaaagctgaagctactccagcccaactttaaaaaaaaaaaactgttttgattaaaagactataataacttttttatactaaaaccatatttacttatttattacatattaaaaaaaatttaaataaactaattataataaa

SEQ ID NO: 132894 - DNA, 1241 bp, Cannabis sativa
  modified_base (1212)..(1213): a, c, t, g, unknown or other
ctttttaaggggggataattgtaaaaactgcttaactttaatttggaaattagtagataaatagggttttattatgaaactttcatattagttatgaattaccaatttaaggagatttatttaaattcagaatgcattttatatgtcataaatggaatttcgtatttttgcatgttttgtgcccggcaacattggaatgcggtgtttggctattagaatcacattttagtattcttagtatagcggggcaatatagtcagacattgggaatgtcgcgattaattgagattttagaattgaccaaattacccttaagtgattttgtgactttttgcctaagtgaagggcaaaatggtcattttgcccaattagattttttgtcctttagtaggattttatttgatttactaagctgatttttggctgatatttatttaaataaaacctataattacttcattttattaaaattagaaaaaacataaaagacattttttctctctccaaaactctctctctttctcgagttccctagagcaactagggtttgaggatttttctgcataaattagggatttcaagaaagttttttgtgctttcaagctcaaggtaagttcctagcacattctctttgtcaattcttaggtttcaagtaaggtttatccatgattttggggttaaggtggttgttgttgtgttttgttttcattgaggtgttctgaagtcagaattatgctttttgatgtgatttgaagttaattggtagcttgttttggttgttagacaaagtttgagttttggaactcaaactttggtctttaatggtgaattttgattttgagcatgttatgttgttctgttgcttgggttatctttattgggtatattaagcaggtctggaaggtttggtgaggtttggattcaaatcggttgagattttgaatgtttgggttaccttaaccagttttacaagccctgtaaaaccgattaatcggatcagcagttggatttccaaaatttttgagttgtcgattcatgttagtttcagagctttggttggttaattctttaacagtttagggtattgccatgttaacttttagtaggaaacttttggtttaaaacctaagtctccaaatgtgatttagcttgttacttacccgtgttacgaatgatgagatttgggggcctgtaattcgccgagcagttgtnncactcaggttggccggcacacctaaatt

SEQ ID NO: 132895 - DNA, 814 bp, Cannabis sativa
attcagatgatctcaaggagtgttttaaagtagtgaggaaatacgggatgaagctcaatcccgaaaaatgcactttcgatgttaagttagaaaaattcttagaattcatagtaaaccaacgagggatagaagcaaatactgagaagatataggccttgatggacatgccttctccgcttgacataaagaatacctgccttcagtcgattcatctccaaatacactgataagtgtgtcctgttctttaacattttaaagaaaattcaaaagtttgaatggaccaaggaatgcaaagaagcgttcaggaaattgaaagaacatatggccagccgcctgtcttgtctaaacgggtgcacggacaagacttgtacttatatttggctatctctgaaaacgtgattagtgttgccttggtccgagaggaggaaaaaactcaacaccctgtgtattacgtcagcaaacgaatgataggggtcgagatttgaataggggtagaacggtaaatttatccatactcgatgtaaatcatttatagaggattatttgaattataacaatagataattaatagtgtatctatatttggaacatatcgagcgttttatataattaagagtacaattctgaatctatagtggagtcatgaggaattaataagttaagaaatttacttggtaaatttcgggtctacttattacttgattatataggctcatggtccacatactagttaagatgatattggcttatagactcagttaattggtgttaattaactaattaaaattctaaattagactgtgtcttatttatg

SEQ ID NO: 132896 - DNA, 1439 bp, Cannabis sativa
ataaatttattgttttaggaaaaaagggaattattctgtattgttttatgtgagttgttgtgtgaattttaattataatttaagctaattataatttaagctgcttcattaattgttacgtgagttattatgtaaattttcataaaaatataaaaagaaaaaattattttaaaatgtaaaaataaaaaaatcataaaaacataatatcatatattttagtacatggacttataattactctcctcaatataaagattccataagttttgtaaatattatagaaaaattctctggtagggtagggacacgttttacgaatggttttttttaatgtaaactttcattgaaaattctaccatcacaatagtacatacttgatgagataaatcacttttatgcaggggtgtttataaaataattgatccaatctaatccaattcgcaaagtgtggatgtctgcacttgtgcagatttgttgaattggaaaattctaaatccgcgcttgtgtggataggatattgattgacatgtaaatgtaaccgatccaatccaatctacacatatctataaaaaaaaataaaaaaaaaattatatatacaaatatataatattttaatgtaaagaaaatagtaatctaaaatctaatacgtataatacaattatctttcaaaacttaataaatcacatgtatattccattattatatataaaaaaaattctacatagaatgtaaaacaaaattaaacatttctttatacatacaattttttcttcctttgaatttattattttaatttgttgttagagacataaaataataataatttgttttattttgttgctagtcatgtgaaaaaagtgaccaatctaaaataatcgatccaatccgtacttttacggattcgattggattggatattggatttgagctattgtgtggatttgattggatccaaaaaatgaaattcacacttagtgcggatcagatgcactatgagcaaaatagtgcgggattagattggatgaacacccctatttttatgagcacgacttatatagaaaaataagagctacgagcaagacaataaacaactttgtttacggatcattctacaaaacgtaaaaataccaaaaaaaaactaagtaaaagactcttacagtcatgaaccaatagatcaaattctgatagtatatgtagattgcttggtattgcttggatagagataaggctatccgtttcaagaagaatactaggtcgccgatgatgaataattcaacttaaagcttctttgatgtcagtattttctgcaattttcggttgaactcagccaacatgactaacagtgaaagcctccagcgcatggccctaatgatcttgttagatccttttttttggaaatttagttgtcaaaatattttttaattaatgtgcattttatt

SEQ ID NO: 132897 - DNA, 687 bp, Cannabis sativa
  modified_base (657)..(661): a, c, t, g, unknown or other
tatatatatcttaaaatatacgtaaaaaagacatttggtataaagaaaataaatgaaagagaacaaaaaattgaaatgtacatatacatgactaaaaaaaaattaacttttagtaataattttttagtcataacaaaaaattatttgtaattaaaatattgtatttagatccaatttgtcactaatttataagttttagtcacaacaagtattgtgactaaatatatatttagtcattaaaaattgtaatttttgtgattaatactttaatttttttacaaattttttaatcttaatataaaaaaataataatttataattaattatataactttagaattttagtcacaaatatgattgtgactaataagtaaaaaaatttgtggtgatatttccattctaattgcttataagatatttggaaagaagaaaattattttgttgtaaaatttctatattaagataaaatttattgtgtaagaggttttattttcttcttttatttgattacttaattatataaaatatctcactaattttattcctaattatttttgtggaaaaagtttagtggatcccatacaatatatttaattagggaaatatatatcctatatactatttttttttttaaatttttttttcaaatttacggtnnnnntttctaaagtggttgcagcgttagtt

SEQ ID NO: 132898 - DNA, 633 bp, Cannabis sativa
atttgataaataatattttcttatcttgacacataaataatataaatataaattatatatagttagcttgggaagttggaagaaggaattgaagtttgatacattgtacggtcaactactgctaggagtgagagagtagagacaaagccctatataacaaaatttaggacacatcacacattgtggactcaactattaaagagttttttccccaaaagaaaaaagatcccacgttgtggtggagcattaaaattgaagattattcttcatatatatacacacaacacacacatatttacataattatatttggttttacataaatataatggtctaactatatatattcattgaatcaagtataaatagcgataatcattcgattatttgtatctaactactgtaatattatataatatattgtcataataaattaataatgtattatatgaccacaatacgcaggtgtagaacattattttatatattttctaaaaaagtttgaagtgtttgaacataaaaattattttcaaatgacaagtgatatttactcatacatatatatatatatatatctttatatattaaaggtggaatttaacgattaggtttgatatcccgttaacaaataaa

SEQ ID NO: 132899 - DNA, 845 bp, Cannabis sativa
atacaattttatatttgagttgatacaattttttttaattattaattgtatcacttttaaataaagtaaaaaataactagcataaaatttactatacacgtaattttttactagtatatatatatacttattagttattaccattacattacacagccataattaacctattagtaatcatatgttgatttaaaacatattaaaatattacatttagtgatgctactagtataactatgtatcaatatgagaatagatataaattaaatatataatatacacagtagcatatcctgcctcatatttttggatggatttcaataatagagcatttatataatgttgaacactttaaaatttcaaatacctaatttaaaccatctccaatactatatctaaaatgtgtactaaatataatattagtactaagttttatcccactttttaaaagaatattagtctgttaaaatattgtaagagcatctttaataaaaaaatataaataaatgtaaatgaatgatataaatgtaaaatataatttattttgttgaaagtttatactctaatggtttgttaaattataatgtaaaaatctcacataatgaaaagtaattcaaatttgcattacaatataacatgatataaaatttatatcaaaataaatattatgcttttatatttataatcatgttatttttaatattttattattaaattttaattagtatactcgttgtattattattattttattattaaattttatatttaactttacattattattatttaatatttttaaataaattattaagtaaatattataagaaaattctacaatgcac

SEQ ID NO: 132900 - DNA, 945 bp, Cannabis sativa
gggcatcagaactaggaccgagacctaggaccttaccctgaacccagaccctaacttaggacacgtaccgggacctgggacctaaagtggcactaaactaggacccgaaaccgtgatccagatctggacccgggcttggacctgacccgtaatcagtgtttggatatgtgatccataccagcactcaaacctagacccaaactcggacccaaaccctgacccagacctagagccataccccagacctgggtccgagtttgagtctaggtttgactttgggaactggaatctaattaggacccaaagctagacccggactgggatacagacccaaataaaaacatggatcgggacctgggacatgaacttggacccagacccagacccaggttttggaccgcgattggagactcaaacaaggacgcaggacccagaccttgactggggacccaaactcaaaattagactgggacccaagaaccgaccccggtctcagtcccaaacccaaaccgggacatggacacggacacggactgggacataggatccgaatttgaatgagagcgagacccaagattaggatctggatcctgacccaatactactacgaaccaagcctttacaggcacatatttcatcataatattaaataatcgaggacatagggtggggaagttttgggagggattttgacaccacttatggcgtcggttatttggaaataaccaacgccatagggtgtggaccctatggcatcggttatttccaataaaaccaatgccaaaagggtttataaccctagcccagcccatcgtcttcctcattcgaccagccaacccgaaatcccccaaaccagagaaaccccaaaccctctccaccaaccaccacgaaaaatcacctccatttcaccattttttcaccattttagctcatttttatttctaa

SEQ ID NO: 132901 - DNA, 828 bp, Cannabis sativa
atggctatgttggaagcaaacccgccaagactcccatggatcctagagttaaacttgatgaccaacaaggagaagctcttgacgacccttctccctatagacaactcgttgggaaactgttatatctcactctctctcggccagatataacgtttgctgtcaacattcttagtcagttcatggcttcaccacgaactccacacctgcaggcagcccaccatctcctccgctacttaaaaggcagccctggacaaggtttactctactcagcatcctcttctctcaatctaagaggcttctcggactctgactgggcttcctgccccattactcgccgctccacaaccggattctgtatcttcattggggattgtttaatatcatggcgtaccaagaaacaacctaccatatcccgaagctcagctgaagccgaatatagagcacttgccgctactggcagtgaactcacttggctgcaatacttgcttcaagatcttcaaattcctcaacaccaacccgccttcatttattgtgataatcagtccgccattcacattgccaacaacccgacctttcacgaaagaacgaagcatattgaactcgactgtcattttattcgagacaaaatcaacaaatccaaacttcgactcagccctgttagcagcactcatcaactcgcagacgtcttcaccaagccactggcttctaccatcctcaactctcacatcagcaaaatggctgtatacgatgtataccgtccatcttgagggggggggtattaagtatttagtctaagtcctcttatatttttctactgtattttactgt

SEQ ID NO: 132902 - DNA, 1108 bp, Cannabis sativa
  modified_base (31)..(41): a, c, t, g, unknown or other
  modified_base (69)..(79): a, c, t, g, unknown or other
ttttttaaaaaaatactttatattttatagnnnnnnnnnnnaaaaaaatactttatattttatagccannnnnnnnnnnaaaaaaaaaaaaaaaaaaccagtacaataaactataaacaatagctagtaattattctacaagtcataagtgaggtcataacaaaatgaaaaggtcctcctatcaattccagataatgatggattattctctattctctaatctctattaagtaaaatttaatgttttaattatttatgctcaataatagcaataatagtttatgctattaataatttaataataattaggtgagaatacaattttaaataaaaacaatatttcatggcacacactaccaaagagttacatatatatccattttgtcactccaaaatccaatctatgcttatacaagcttgtacattcaaccaaattttgccctttaagtatttctcaaaaaatccttatttttttcatttgtgtctcaaaagtacaatgtaagaaagcacaatgttagaataaaaatagagataattttcaaatgcaacaatataataaagaatatttttcttactcaagtaaaattacaataatagaataaacttttgaaaaatttaacaaaaatttaaaaaaatgctccaacacagaaattttttcatttttttatttaaattttttttatttaaaaaaatacttcttccgtaaaactaataaatattttctttaagttgtcttatagtttatttgtagttgtattatagttgtcatgagattatttttataatcattttattatttataattgttgcaaggttaatttctcgttgtttattttattttttgttgagcaaaatgcatttttgtaattttaaaattgtacaaatatatttttataaataaaaacttcacgccataaaattgtaaataaatattaaaaaagattatttatgaaaattccccaaaacttttgccactattggaaaacattgtcgcacatggattaacttttgccactcattgccaattggttttgagatggaacctcatgattctcaacatggtatcaaagccatatccctagcaggcttttgatccacacctatccag

SEQ ID NO: 132903 - DNA, 847 bp, Cannabis sativa
tagcaacaaaagacacagtagactagagagagagagagagagagagagagagagagaaaccctaagaatcaatttaaaggacattaatttgtttttaataatttacaatatcaaaatcataatttaaattattaattgtgtgtgcgcgtattttttttatatgtacataaattatattttataaaccttaattttaacactattacttatttaaaaatttctaaaaactagtagaataatatgcaacaacatgaaattattaaattataaatttataatctttttgtgtgccaaaaggaagaatggctctactaactgacccatctatcctcctaataaaaagtttggttttaaccctggctcaaacaagataattatgtcatattagtgtactttggatgtttcacatctcaagattaggcacaggtgagcacattattgagaaatatttctctatatatacatgagggaacgcgaagaatacaactataatgctcaaattaaaaaagggtattacatcatgagaagaagaaaaagaatattacaattcttcaacaaaaataattaatacaacatataaaaaaaaaaaagaagaattgagcttcaaggacctttattttaaaactcattttgtctcttacacgaatatttaagaaactctaaaaatacttttaagagtttatctagcctcatatgcttagccaagtatctaaagatagatttatcatcataaggttctaaccacattgttaattctatttttgacatatttaattgacaaaaatattttattatttaatgtattttcggctggtatgtattaatatggtttccttatttgtgtgta

SEQ ID NO: 132904 - DNA, 1958 bp, Cannabis sativa
tctctgcaaaattagtttctgcagtatcagaattacttttttgttgctgcagacgtatacagttttatatacagtatatttctgtattaattattatttgcaaaaactcaatttttcattgatgaattaaattataaatttcatgagtaatcattattttagtaatttactctaggatatttatatataatttccccagtcttgttttttctttttcttaaatgagaaaaatcgatatgttctcacgatttaaccttttctaatatcatgcacaacattatcaaacaaaaataattttattttgttgctttataaacatatatacctttactaattaataatgacatttgagaaaatgtctcaactattaaacaccaagagcaataaatactttaaaatggtggggtgaggatttattcaaggataacatctgctatcaactgatcctcaatacagttaggactccataaccaccaaatcatactactacttgtctttaaagcaagtttggccaaggcatgagcaacactattacagaatctcttacaatgagcaatactaacaactttgagcctattattgctcattatgataacacatggtactgttcatgctaaaaagtgaccaacaccaactcgctaaattggcgagataaataatgagttttagtgaaaaatttagagagacacaaacaatttatagtagctccctcccatgtcgcgatggtaatagagttacgtctacttcaagtttttatttctcacgagatgctaattacagcaagagatcaagtgtttaagctctggtttctagagagagaaactagataaagatactctgaccttgtggataattttttgaaatattaaaaataagctaggggagctctccttttataggtgaaggaggtccttgaaaatagaaaaaaataattcaaaatatgaaaatatctaaattggctaattttgactgtagatgataatctaacggtcaaagttaacttctgaggttgatagtcaattttctgagcccatgtcagggcagcaagacccgctccaagtaagctagagcttattttcgtaactctcttggggtgaaatttgaggtcgataatttcagaattgtgattaaagtgtgagacattacttgatagagcattgaaatatatttgaaatgcaagttgaatcgcatcaatcaaatcaatattcagtgagttatggtttatttactaaaggcagttcataacctagtgtccaggttgacatcctagcgctcaagttgacctatgacgtcaacttggatgctgggtgagtgggaaaacgttatggggatgtaattttttatgcttaagtgatatttttacattaattagtctcgatctatgttgtagcaaggctggtcactagttctcgaagatgttgctagtctgtagaaatagaggaactcttcatttgcgagtagttttcccatgttagaaatgagaaatgcaaagttgtgaatttgacttctttgacttcatggatcttagttattgtggaaaactagatgaacggtcaaaacaaaattagaatcggataagcagaatccagtgcaccaggccatttatcaacctgggcgctcgatgctcatttcagagcttctgggatgtcgttttgatacttcaaaggatttagaacttgaggacgaggtctcctaccccattttttaccattccaaagagaattctcatatcagatttgccatttgagtgattgaaaccaacataccggtttgattatcaacctgggcactaggcccagcaccgggccaacctgagtgctgggctcagcttttgaggccctcaagtttgtagttttctccctaaatttgcttgcatcttcattatttctaatgacaaaaaaatactgaaaaaccgtgtttttgcaaatgtcaattatatataaaaaaaaaaatataaa

SEQ ID NO: 132905 - DNA, 567 bp, Cannabis sativa
aaaaaaaaaaaagaaaaaagagatgtgttactagtgtatatttgacatgcctgaccaatgacgatttataattatttttttcttacaaatttataaaattattaattattagagtttttttatttttgtactttaaaatatatatatttttttatatatatattcttacaaaaattcacataaaaacttttatagcaattaatagagtaacttaaatcgcaatcaaaatttacataaaaattaatggagcaatccaaactataaattttaaaaaaaattaaaaaaaataatatataaaataattctcctaaatttatcaatagttaaacaagttattatagtttttttttttttcaataaaaatattcttaaagatacatgaatagttgatttttaaattatctaaaaacttaaaatgttttatttttttgaataaattaaaccacatatctttatatattaaaagtgcctatctaacggcaattcttggtttaacagaatattcttaaaaataaaaagaatattctgttaaatttaacgattaggtttgatctcccattaacaaat

SEQ ID NO: 132906 - DNA, 982 bp, Cannabis sativa
agggcataaaacccaacaagagcttctaggggagacccaaccccagtaacagaagctccagctgggacgtaaaccactgcccaagggatcaaccgggcagaatttgatactttagcgaccttagtgaaaggggtcacgacccctaaatttttagagttcaaacttgatagagagagtcgttcaccactctttcaaagaatcaaagctctttctatccctccaaagttcaagaaccctttcaagcataaatacactgagaaggaacatccactatcgcacattcacttcttcaaagtgtagaccgatctacaaggtgtgagagattatgtcaggtgcaaaattttccctatcacactgacagacctagctcagcggtggtaccttaagctctcccctggatcgatcaacttatgaaaagatctaatggatgcttttggcaactaattcgctccttcccgacaatgcaagattgaacccaatgatttggtagatgtcaagcaacaggaagacgagcccctctaggactacatccaacggttcttggaggaagtcgctaagaccgaaagtcttagcgagaatgcaagggtaatagaacttggagctagactcagtgcggtgagtgtaacttgtggcgagctaattcaagattataattttagccacattgggaacaatattgggttgtaagtttggggtagaaaattagctcacaaggcataccattatatactatcaagcatattcttttgatatatattatataaatagactatgatgatatttttcttgtctagaatatatatatataaaaataaaaaaaacaacagcaaaagggggataaaaaatagtgtgcttacaattaagtttgggtgttcccccaattttttttcaaaaaaaaataataataagaataaacatagcaagagaattctattacaataccaagtacttgtgagtataatgagtttaggaaagtgaatca

SEQ ID NO: 132907 - DNA, 541 bp, Cannabis sativa
ttttttgtacaaatcaatcgggcacctgctaaagacttcttgacttgttcttctaagttcatgatctaggggatgaccgtatattcacgagctatcactacaagtcttaaagaacttgagcttttaaagaaacaaaattctactctgtaagagggcttgaagaaagttaaactcgatgaagttgttaaggataaagagattaaggatctcagtagagccaaaaataaagcaaaggagaaagtcaagaaattggaggagaagatcatcacttttacccgcgacttcaataatgaaaaagaggaaagaagaaggcttatgaccaggttgtcaatgactacatctacactactctgaccaaactgcctaactttagctttgctgcttttggtccaaaggcagtcgagatgtctaatatacatttcgcaccatgtctctaattgagactcaaggtctggccaacaatattttccctaaggttgccactgttggaaattattttatcaggatctatttactatcatgtatgttggattaacaacct

SEQ ID NO: 132908 - DNA, 583 bp, Cannabis sativa
taatttagtggtatttaatccaatttcctgtgggatcgacctcacctgtgtgagatttactacttgattgcgtatacttgcgtagcgtttataattttcagcaacacattctgattgtaaacatctacttttttctttaaacaatgtttctattatctttgttaaacgatctgcgaacaagaccactaattatttagcttgtgatgcttattgtttttcaagtcgtcaattcagcctgatctccatgctattttattagtggatttacaaatttaataatacaaagaaatttctgaacgaccaaattacagccaacaactactaaaaaattgttacatttcttagcctagttttattatttctctagtgtaatttttgcgccatgcaatgtcttaaaaccagtcactgtgtatttaattattgtgttgtcccttatatttattattttttaagaaagaattatgtgtttcttgtagatccatgcgttgttcccccttatatttgatcatgcatgttggttgtaggatttttaccgttttaaccctacaccaacaaagccacaatatcagttatcaaggtcaaa

SEQ ID NO: 132909 - DNA, 1101 bp, Cannabis sativa
  modified_base (1015)..(1054): a, c, t, g, unknown or other
acaaatattttgtaaatgaatagcatacttttgtaaaatattttgtaaacgggatactgtaatattttgtacgtaatattataagttttaattaaataagcaaacttttaattaatcacgattttcattaacctcgttgattagcaagagctgcatagcaagtttaaaatcacgttaaaacgtctaggctagttagggtgttacattgtacttccttgacagttgtgggcgacttcatgtccaaaagtgcttggatcttgtttgggtttgcttttattcccctagagttgactatgaagccaaggatttttcctgagcctacaccaaaagagcatttgaggttgttgagcttgatgttgtagctgcaaggatataaaagcatttgtctaagtcctccacgtgccccgtagcctttttagacttgacaagcaggtcatccacatacacctccatgttgcagtcgataagatctgcgaacatcatgttcactagcctttgatatgttgcccctacattttttagcccgaagggcatgacattgtagcagtacaggcttagatctgtcatgaagctagtgtgctcatgatctggtggatgcatctttatttgattgtaacctgagtacgtgtccatgaaactcaagatttcatggctagctgaggcatctacaaggtggtcaattttgggaagagaaaagtagtcctttggtcatgctttgttcaggttggtgaagtcaatgcatactctttacttctagttgggtttggccaccagtactagattggagacccataatggatagaatgcctccgctatgaagtcatgggctcatatcctcgcgacctcatcttggagcgcttgggcacgcttcttgtgcaacaacttccttttttgctgaacaggttagatgcttcgatcgatgttgagtgcatggatcatcacggagcggtcaaattcaaccatatgtccgtgccaccatgaaaaaatgtccaagtttttgttgggttttatgccnnnnnnnnnnnnnnnnnnnnnnnnnnnnnnnnnnnnnnnnaatatagatcagaaataacattaaatgtttcatggttcacatgattt

SEQ ID NO: 132910 - DNA, 1886 bp, Cannabis sativa
agatattaacataatcccagtcccaaatctatttttgttggacacttaatcgacaaaatttcccacaccaaggtctcttcttccttttttatcaatctaagtgaattttacccagccaaggcttgttttttgatagatacttgaggatggaaagagatgtcaaattgatttaattccattgcccatttgagtaatcttccatacaattttagcttccgaaggacttggcaaagcgggtgattgattaaggctgtgatggagtgagcctgtaagttcttggatgttatgagcagacaaaacgtgagtttcttcatccagggatatctaatctcagtacccaacaacttcttgctgatgtaatggtgttgtttctttatttttttcctaaccagtgcaacagagctcaaagattttgctttgcaacggtgcatatgtattttaagtcatagctaatttaatatatgagatcttcatattttaagtatatatttagctaaagagatatgtttaccaaacgactctgttatagctataattttgtagtggcataataatgtttcaatgttgatagccacatgtttttaagtatagtaaaaaataatctctgatcttttattggtagataaataagattacattgaaataagattttatttagggcataaaacctaacaccaaaacctttcgtgtacttcatgcataattatattgattttagtccgactatacatcttagatatggtatggacaaatcccttccgtaaatcttaccatccatcaagacgtaccttggaactttgtactggagtttcccgacaataattctttttgtgggtaactctcttgaggttaagtatttgatgaggaggcccattcaagagtttgaatagtatattactttgacagtttctcgggccccaatgctatgagctgttagataattaattggtattacctctatgaattccatgctttgatctgacacgagtttagccaagacatttggatgttggttttggtcataagggatctactagatcttatatcctttagattttagcagacggtcttagactcgagctacatacgtgaccattttctcctatttggcctgatattctcctaaaatctggttggccacgagttgagagtcgttgaagactttgatgctctgggctcccacttgggtcaatcttatcctagccaaaagggcctcatactaagcttcattatttgaggtttcgaatgtgaatcgaatggcactttgaagctcaagtttcacatgagatattaacataatcccagtcccgaatctatttttgttggacactcaatcgacaagaatttcccacaccaaggtctattcttccttttctatcaatccaatgcattttacctagccaaggcttgttttttgatagatacttgaggatggtaagagatgtcgaattgatttagggttagtatggcacagctgtgctatgggaaaaagcagctgtagctgtattgtgagaaaaaatagctgcagcagaactgtggaaaaaagctgagctgagtgtttggtaaattataaatttaaaagtagtgtgagtttgttataatctattataatgataatgataatgttatacatatgtaaaaatttattttatataatattatataatattatattatttatatattcttattttttttttccaaatataaatttatatgcatttgataaaaataatttatagttttttttatattatgttttatcaaatctaaaaaaaaaaataaaaactcaagtatataaaaaaaattttaagttggtgttatttattaatattaaataaaatataaattattaattttttttttaaaaaaaataagagatttaa

SEQ ID NO: 132911 - DNA, 672 bp, Cannabis sativa
atcaactactcctctatatatttattataataattttaatataaatgtatattacatattagatttaattcccttattaattattactaggctagaatgcttatcttgtataggaaatgcttgttcctactaggatgatttttgttttcacaattctcatatttctaaggtatcaaaagataatattatatattagatgtctcgaatctattgtttttttaattaattttaagatgaaatgacatgtgtatttttatatactcactatattttattaataaaattctattgctctatgtagaaattataatttaaatttttatacatatgacaatgtatattatagttatataatgtattctaccaatttttaaaaatattagaataaataaaataatcagttgtaagtatataaatatattttttattaattagtttttaaaaataatatataactgtatcataccactatattaatatgtatttagtttaaaaaggagtaataataactttaacactaatatattaattaattaaaaaagagtaataataatttttttaagtatataacatagggataattgcggcaaaagtccccaaaaatttgaggttgatgccgattagtcctcaacctcaaaaattggcggtgaaaatacctaaggtcccaatttt

SEQ ID NO: 132912 - DNA, 896 bp, Cannabis sativa
tttgttttttaattttttttttagtgtaactctatttagttataacctcccaattagaatataatttacttagtcccaagtgtattcttgaatagaggtgctactgatacatacactacttttatatttatttttgtatcatttttcatattttattaataaattaaattaaagcattaaattataaacattttacatttattttttattattttacataataaaataataataaaattaataatgaagttattagtttttatatttttaatgaaaatattaattaaatattaaattttataattgggcattagagcacaatttaaaaaattgatacaaatatatcacaaattttttgtaccaaatataacacaatttttacattttctattagaaatggtcatgttccaaaatataatgtaaatttgacacaatttttaaaatgatacaaaatttacattacaatacatgcattatattctatttcaaaaaacaaaaatactatttttatttacttttatgtcattttaattattttattaatatattaaactataacattaaattataaattattattagtgcagaaagagaaaacatggaagaagaagataagaaggaatgaactaattctattattcatcatggaagaaaatacaaggagagagctatatatagctctggattacaacagaattagctaactgaattataactaaccaactaactaattctaacggtttctaactaactaagactcaagaatacaaagtcaagcccaagtctaatactcttgttgctataattttaaacactacgcaagtatacgcaatcaagtagtaaatctcacacaggtgaggtcgatcccacagggaattggattaagtaccactaaa

SEQ ID NO: 132913 - DNA, 723 bp, Cannabis sativa
agtgtgtagggttttctgcaagtggcgttttataatataagattcgatacttaactatatcaataggagaatgacactgagaagggtgctagacaccaagatacactcatggacatgtaatttttaggaataatactatctatctccacattggtatgatattgtccactttaaatttaagttcttatagatttgttcttgggtatgtttcctaaaatggagatattgtacttctttatatactcaatctcagtatggagatattgtacttctttatatactcatgatctttctcaaatctagtcaatatgaaattttagttgcacaccgatgaaaaatattgtacatcccaatgaaagaacccttttgagagacttgcattgtacacaacacgtgtcactgtacttgtggtattcgagagatctgcatgacatagtgatgaaaaaaaattattcatccaaatgagagaaccctcttgagcggccacgtggtacctaccagtggtattggtcaagagacctgcagtactgtaccacgtggctctaagaagtactcacaagataatattattctacatatattaaagtaaaatatatagaatctgatactacattatactaataatgatatattaaatttgaaataatatttttacacattagtcccaaaaataatgtcccaaaaataaaagggaaatttgattttctatacttagaaaatcaa

SEQ ID NO: 132914 - DNA, 1049 bp, Cannabis sativa
  modified_base (944)..(950): a, c, t, g, unknown or other
tttagtcacaaaaaatttatgtagagactaaaaaattatcactaaaaatagcagttttttttgtagtggttgttattttatttatcaccgattgatttatttgaaatgaaacatcatgattgttgtcatggtattagttagagagtatcacattgttaatgtgtggaaagataatagaatatataagaggaatgagcttctcctcccattgctatttggttttgagatggaacaaaaaaaaaaccgatcgaagtagtgcccaaaaaaaagagccaccaaaaattcaaaaaaaaaaaaaaaattgatccaagagccaaaaattaaaaaaaaaaaaaaaaaccacttgtgattctgaaataacgagccagaaaaagagccattgaaaattcaaaaataccaaccgcttatgatcgagttgtccaattaatatatagtagaccaaataaaaatttgggaaacttacaaaaatactagaatttggggtaatttttacaaaaatactgtcacacggaaaagtttacaaaaatactgtgtttttataaaacaccagtagaacacaaaacagaacaactcaaaacaccagtagaacaactaaaaaacaccagtgaaaatttaacacagtatactgcagtatgaaacttataaaaaaataaagtaaaaataccgcctggcaatatttttgtaaaaaaatagtaaaaattagtatatcatgtaaattttcttaaaatttatggtccataatgaccttaaactcatcacaataaggaacgaatgcattattaagacaacatatattttgctgaaactttcttatctcgtgacaatattttgttgatgcaaaatgtattaaaaataaattgatttgaaaatagacacataactaatttatgaattcaattgcatctagctatatgttacctaaaaatttaggtggcgtttggttnnnnnnnatgaaatggaatggaatggaaaggaaacaatttttattccattcctttatttggttgcattttaaagtattggaatagcattccaatggaatgctcttt

SEQ ID NO: 132915 - DNA, 1901 bp, Cannabis sativa
attaaatatttattttagattcaatttttttttattgataatttaaaaaacaaaattcaaataagtaaaatattttatatttcatactgaccacttatttggatttttagtttactgtatttattcttttttaatatttaaaattttaatttttaattagtatttttttattatagtatcgcttttaattttccacatttttttttgttttagatctccccatttttggatgatttctcaattttttttttatggtaaaaattactttttatataaatatatcaaatttttcttttttaaatacaatagtgtcatgttagcaaattatttaagaaaatgaacagaaataaataaaaatagcatttgtaatgatagttatagtatagaaaaaaattttaaaaaaaaagtttagaaaaccataaataaagaaaaaaatatcctatttattattctaattggtacattttttgtatttttttttctcattttatattataattattatatttttacacattaggagtctatgctcattgtactcaaaaggaaaagagtctatccttatattagaagacacgatttataaataacctaataatcgtaaggtttttatagtcgggggcatatttataaaattaattgagtaaattattattattattattataatattgtgaattatgataaaaatattactaaaataattttatataaataattgagaatatttataactcgcacgcgaagcgcggtttgtttcctagtggtcgtataagattagagaagtgttaacttcaaacgttaatcttccgttaaatttaacaagaatattttttatttttaaagtatattctgttaaacaacaaaaaacagttagataaacactttttatatataaagagataaagagataaagatattaaaaaaattgtggttatattattttagttaattaatcaattaatttttatgaagctaataaaaaattaaaaaattgagagaattaaggagagtacaaataatgttaattagaaagattttagagtgccaaatcaccgcttcatacttctcctttatatatagactagaaaacagaccgcgcttcgcgcacgacgataaataattatataaataataatatcaaataatttcaaattaatttttatgtatttttttattaaaaaataataaatttatatagaaaactctaaataattaaaaaaaattatcatacaacttcttatataaataaaaatcacacaattttttttttttttaaaaaatatacattatagtgaagaaaattagaaactaaatatttttttcttacacaaaatagagatctaaaacagaaataatataataaatctataaaaaaatcatcatataattttagaacaactatcatcaccgtatttcatttatagtcactattgtatttaaaattgatatcatagcaacctaaattgcaaccaaaatctacatagcaacctacattgaaactaccgaaaaaactactgtagcaatccaaacggtaatttttttttaaaaaaaaataaaaaatagtatatgaggtaatttttctatttattattaaggtattatatatactctaaaacaagtaaaacttagaaaatatatgcgtatgtaaatctgaaaaaaaaaatattatgtcctatatgttgatataatttcttttagttaaatatttttgttttttttttattattattagttacaataatagcaaaaataagtttgaaactattgatatttttaattttttaattattaataattataaatagttaaaatctgaacgtaggcttctaatttttaggtatatttatttatttatttatttttttgaataaaggtatgtttatttttaaaataaaaaa

SEQ ID NO: 132916 - DNA, 1075 bp, Cannabis sativa
ccacacgcatgcactgtcactcagccgtcagaccgtgatttgaggtacaattttcaagaggtatttaatgctcagacactaaagagacccctagttgaagtcacgttggatcaacctcaaccgtctaagacacgcatcacccattcggacaagattcctggccgaatgaagtccacatgcgacgaagaaagtcccacacagacttgggggacaaatgttattctattttttgcactacggcatggcatttagttggatgacatgtgtatcatatttttctccctgggcaaagggttacactcctaagagccctcatagattggtggaagggtttatggtgttcacgcgtagcaggatgttcgaatagagtcattaagggacatccgaccaatgcacaattgcatgatcaactcgcatgtaccaaacaggatatgtgagttaccaatttcagagataggcatcattgcttccaagacacgaagataatctctacatttgtggaatttattcagagaataaaggcaataagcctcagttttccattccttgcattataattatagaattaatttagtttcctattttatttattatagattaaggaaaactagtcttcatgtaataagctcctataaatagtggcacaaattcactattcagggggacgaaatttgattcaaaacaagagagaaaagagcgatctaagagagattttctctcagagatcaattgtaagagctttcgagagagaatacattattcttgttctcaagtcaatataacaaaaaaaaagtgtaggttgttaccattttcacggggccgaatctctagaaattctagtgttttctttacttgttgtttttgctttctattatttattttatctaatcactttatcttgactcactgaataagtgtagtacgtaataactattaactatgcatgtagatgcacttgagattagttcaagtgaccataaagagtacgaggtgggtgtgtatgtgggggtcttaggatcaaatcataaattatgcaactaactaggaaacaaaccgcgcttcgcgtgcggttgta

SEQ ID NO: 132917 - DNA, 938 bp, Cannabis sativa
  modified_base (299)..(304): a, c, t, g, unknown or other
acaattttggctaaagatatcataagcacaaaagaacccacaagcttctcataattttaaaatttcccgaagtgttcccataaatacagtgcattgatgaatcatgggacataagttttgaaacatataatcacaattaccttccactatgttgacatcactgtaattgtgaataaatatatgttctggatttaatagaaattgtgtattaaaccacaatcctgaaaataacatgctaacttaaatgacttctaaccttctattggtaacaaataagattatattgaaatgagttttannnnnngcataaaatcccaacaataatatgataaaaaatatatatataaattagagaaacaagctaaatttgcataaaaatggggttaaatagagttgtttttcatcttggtagtttagagatgtttgggagcaagaatggagcaaaaatgcaaaaattgggaaaatagtcagccggggccatggctccagaagagacaaatgtgcaggaatgacctaggggctgcggctccaccataggggtctgtagctccagaagcaaaaatttaaaaaacaaatataaaaagatcacgaaaaaagatttctttctcaagtggagctgtagctcgggtaccccgagctacggggctcctgagcacattttttttttctatcctttcaagtttaaatttttatctttttggtatcttttagggaacttttttagcctatataaacacattatctttagtgtttttagtacatttttcagagctcaaaacccagaaacttatatgtaacgcccgtattttatatttactaaactcgaaagataactttaatatattatatctttatcaccatatggctcgtgatcccgagtatcaaaatacaatttaaaagtattttactaatatgtacatataatattttttttaaaa

SEQ ID NO: 132918 - DNA, 1053 bp, Cannabis sativa
tttttcacttttaatcataaattttgttgtgtatataaaagtaaatttttttgtaatgtggttatgtaagttaattattttcccttaaaacttttattttttagattctgtaattaatcaaaatatacataacttatatttttaaaaacataaacaattaataactaaatttattaaaataaaaatctaatacttagcatatatatattcaattaaactaacaaatatatatctactcaaattaaaacattcacaaatatataaattttaaactaaaaagaaaaatacttatgcatgtttaccccaatataacacttttcttctaataatgatgtatttttagtaaaatttatcctaattctatttaaatttgggcagcataacgactgtaattggacattcctaaaaattttaaacatgcaaaaaataggaatcaaaacacgcaaaacaatacaacacaaatgaaataacattaacaatacaaaacttatctactcattcgatcgcagtacatgtatttgcagaacctacttcattactgataaaaatttaagatattcaaactcactaacatgcatattatatccatcagaccgcactacaattaatagcaaaacttacttcactacagacaaatatctaagatattaaaactccactatttttttttttaaaaaactttagtggttatacctttatccaataaagctagctatttctgcgctcttcaatcaacaccaagaacctatacctaaaaaaaactttaaaatatgcatcaatagttaattgaaatatttaattgagactaatcaatttacacaaattctataaacatattacataaacttatctaattaaacaataatatactaaaaatgagatcactcgaagaaccactgataaaagaggactttgttggaccatcgagaaaatcaattaactcctaaaaaatttaaacattaacattttaaactaaataataattgttataaatattaataattatgtggaggtccaaatcttttatttattaccatgaattgtaatcaacat

SEQ ID NO: 132919 - DNA, 668 bp, Cannabis sativa
  modified_base (575)..(579): a, c, t, g, unknown or other
tgtaaacccatttgcaaccaataacatgttgcccttcaggtaaagaaaccacaatccaagtgtcattcctttcaagagcatctatctcattgtccatgacattatcccattcgggtatgccatgtgcttgactaaaaaattcacgctcaaagtaactcgaaatggccataacagttgctcgaaaggcaggagacaacctgtgatagataacacaacagataaggggtaaggtgtgtttgatttgccatgaaaagaggaagcaaaagcattagtagcaagataacaatgatattcattcaaatatgatggcttatgtgtttgtcttcctgttctagtaacaatagaagggatgtgaacctggtttgaatcagattcaggagtagagaaaaactgttcattatgcagaatggaattaaggacctgctcagtgtttatatcagaagtgagaacctgttcaggatgcataacaggctcaggaaagctctgtgcatgtgtaatattaggttcacaactaggctcaggacaagtagaaactaactgagtatgagttggcatttcagagaaaaactgatcannnnnagcaggtaaatgttcagttttaataaaaggaaaaatatgttcatagaactgaacatctcttgagtaaaaaatctggtttgtgttcaaat

SEQ ID NO: 132920 - DNA, 625 bp, Cannabis sativa
aacctatcaacataatatatgtagctgttggggatgtattttattttatttatttatttgttcatatgatagttatggtaattcttattttcacttattataactccaaattaaatgaaagcatatatacatgcatattatattacgtacatgtcatatatattaagtaaaatatattaacattggattaaaaattaatttccgatattgtttagtgaaatatatactttatatattttatgacacttaacttaatataagttttgtgttatattgttcaattatgattggtctataggcagaatatttttttaacattaatattaaaatttaaaacgcatatgcacatgtatacgtacagtgcacagatgagcatttcaaaatcttgaacctatatgtatagctatagcctatatatataaatatatatatgctacaaataatataaaaatattaattatacaccattggcttaacttatacgccacatactattatatgtataatttaggtgaaaaaataataagtggtgatcttaataataagaagattgatcttaattattattaaaccaacgttaaaataaatttaaaaatttaaataaattcagataattttgactact

SEQ ID NO: 132921 - DNA, 1259 bp, Cannabis sativa
  modified_base (1185)..(1204): a, c, t, g, unknown or other
tatcaaataacatagaaaaaaaatagcacaaaatttaatatacgtacctcgcacgtagctttttgctagtatatatatatagatagattttgctaccaaaaaaatgaatgaatacaaaattaagagtattcttatttgacattttaaggtgtttaatattacatcgataaagcgttatacatcttttttatagtgtttaatactttaagatactctttagcacttctctaaactattaaaatatagagtactcattaaaatgtagtttgataaaatataagaaactaaactatatataagagaaataaatcgagactcttgattttttgttttttcaaaaaataaataaaaacacaataaaatgagcatttcagtctttcatatataaataaaattcacaaatgaagaaatataggatttaagcttttgataaataaatgaataaatagtctctctgttcatgtcattgtgaattgtgggtggtcatgatcatggagaatgggaccaaaactacactgaatgtggaacatgattggaagagaggggatcattgcatggtaacatcacattcatttattttgacttctaatttataagattcattttggaccattaattagttttcatacccaaatacaataaccttttcggcactatgtattgatgacaaaacctatatatgtggtatgcaatactatcaacactttaaaatgcctctattattggatccaactaggtagaacctttgactatttatttagggaatctttatgtgagtgctaattaatttctaatgcaattctatttctgtaagtaaaaaagaaaaaaaaaaaaatcttttcaaccatgtttgtaataaaattgcataatatatatagcatgtgataaatttgatataatgataaatagactacttaccatttttgttccttaaactttcacatgtatcaaattataccttttgaaattttttggccattgaaaatttctcctgaactattgaaattgttagatttaaagatttttgtttaattacattcaattttactaattcagtgtttatttatgtactaaattatgctcttaagatttgatatctatcaaatcatgcccctcgaactttgatatgtatcaaatcattccccctgaacttttattcttgttagacttttcttactaaaattnnnnnnnnnnnnnnnnnnnnaacaatctcaatagtttaagggagatttttaacgactttaaaagttcaagggaca

SEQ ID NO: 132922 - DNA, 509 bp, Cannabis sativa
  modified_base (471)..(472): a, c, t, g, unknown or other
aaaaatactctcagctaaataaaattacaaaaataccctttcggagttagcggatgttacatatacacgtagtgctctccttattattcgaaagatacatggaggaagacttacgatgatacaatcaatctcgttggtgacgagaatgattgggttcctctagaatacatcaagaacgtacatgaaggttagggtacatgcggagaagaaaccaataggtcatctaagaaaaagtaatgttggaagacgacaggagaaatgcttcccgtctagtgataaaagagtgacgctacctcaaaactatagcaactgtggtggttcgggccacaatagagtaacattcaaagtccgtatttaaggcataatctacaattagttgtaataatatgttttgggaaatagatttgttattcaaaactatttagggaaattttatttacaccccaaaaatttttaagtacaccccatttnnataatttttatttaatataaaatttatatttttaatt

SEQ ID NO: 132923 - DNA, 667 bp, Cannabis sativa
tggtaaagaaataaggaagaatggggggttttccacgatggttggcgagagtttctaatgggttttctgggttgttcttgctgaagaaggaggtgaagtgggaaagacgaagaccctgctgctcgtatatataatacatacggcgtcagttattaggaaataaccgtattaggaaataaccgacgccaaattgcacggtttattgacacatgccctcctatgacatcgattatttccataataaccgacgttgtatgtattatatatactgcaggaagattttcaatccccaacttaggactttagttttattaatttctattccaacggttttaattaaaaaaccacctctaatttcgaactaggcgggtattttcacatcctttagcttcctttcttataaatttggttgaaaaaactggagaaaattgtattgtatgtccactttattttatttgttataatttttacctttatttttatattttttaataaatacccattttatagatgatgtccccattatatcgtttaagataatgtaaatcatgtgctacacttaaggggaggacaaaggtatattagacaactcactcataaaagtaggtaaattttaataaaatataatatgagagtattttttattgatggatacaaaaaagaagta

SEQ ID NO: 132924 - DNA, 1158 bp, Cannabis sativa
aatacattaaagtttgggaaatcttaattagccaaaaaaaaaatatacatttggaaattgtcatcattgataatagaaatgccattggacgtactagaggatatccaaacctattgtaccgtgtttctttttcattcttcatttattcttttatttgttagtaaggattcgtttacctttttttaatttaaattattcaaaccccatcataattaatatgtatattattctcatgtaattttgtttttatattaaactaattataattaattagtttcttaaaaaatatttaaattaaatatttaataagaccatttttaataatttatattaatagttttacttttatatttaaatattttttataatttttcttaatacttaacccaaataattataatatttacaataaaattttactattttataaaaattaaacttcaactctttctaaaataaattttgaataattaatcactaagtacgaaaatagtgctatataatggaatataaaaatttatggtttatacatcatatctaaactcctgtttcatctgcatatcttcaagttccatgttttagagataacttaaaaataatcaacaacttcatatatgtatattttattagtaacacatatttgagatcaataactagtaaatgatatactaactttgttgacaatacatagtcaaaataaattattaataataatcaataacatcggttgctaactttatcaagaacatatgttcaagatccataaccaataacaattaataactttcatatttttaataatacatattcaagatcaataacaaatataacaattattaactttccaatttttttaacaacaagtattctagatcatcacccgataacaattagcaatttttctaaaccattcaataatatatattcaagagcaataatcaataatgatcaataatttttaaatttttgtaattttttctttttttaagattctactctgatcaattgatacatatacaatacatttagaactgcaaagaaggaataataaagcgaccttgtctctctgagaaaatagaattgcatgatagaggatgggatgaagtacagatgtgtcgagtgcggtaaaaaaaattatctttaattttataattatta

SEQ ID NO: 132925 - DNA, 529 bp, Cannabis sativa
atcggttggagaaatccaacatccaatgtgtaattggattggatctggatgggcccaaaaatattggatgtgatccaatgaacaaccctaattgtatttagttagggaagactcctactatattttctcttgttgtaaaagactctttaaatttaaacttattctcaaacaaaaaaaatacttggatagtgctaacatttctcttgcaatttataaaaggtaacgaaagaaattacatttaagaaaaaaaagaaaaaaaaaaccattttacttgaaatgacatgtcgtatacacgctctagcgtacggcaaaaatttggctgactagtgtcaagcataggggtcgaagttgaagtgggaatatctgatagagatttcggtactgcgaggctctcttgatcggtcttctctttctctctcgctcgctttacacctttacccttcaccaatcatggctttcatcctcaacaaaactgttgttgcctctcaattgcgctctcactttcaggtattctctctctctctctctc

SEQ ID NO: 132926 - DNA, 666 bp, Cannabis sativa
  modified_base (510)..(511): a, c, t, g, unknown or other
ttttgggattttgcacgtgtatcccgacatccataagtatcgtctttgagaaatatgcattgggtgagtaggttgactcagtgcactcttgcttgtctctctgcccttaggcaaataatcctgaagattaggagcactaatttttgggtttaacaataattctctatgtattaacaaataaaactatcttatctcaacataagaaaatatgttaatacatatgttactattatttaaatagtaaaacacaaaatacaccatcaagctcaaccgtgaatggcttttacataaagtttcttatccttttattttcaaaatcttgatttatttctctcttccattgaaaagaaataaacttttgattgtaagagattttatatatcaatggaagataaatcaagatataaattacaacttaattataaaaataatacaaggacaaaagtatgagattaattatatataaatattacaacacatatatacaatgggtgactactcaatggttanntttttattgtaaccatgatagttacatttttgttgacgtgtaatagcagattatcaacatgtaaaaattctttttttagaattaaattaactattattaattatttcttaaaataattaatttttaatttgaatatttaataagaccctttttag

SEQ ID NO: 132927 - DNA, 669 bp, Cannabis sativa
caaagtataaaacagtaaagaatccatttttcaccattttcttcttttcaaaaactcaagctttttgagaattttcatcccaccttgcctaaaaccttccatgccctctttatctttgatattccttctgggaatttactcgaatttgattttcgacctcaggtgttcaaataattcatcacgtcgttcatcctgtcttcgtttgcaggattttccaccactcgacttttcgacttcaaacagtaagtatctaatccttctcccgggcccctttttttttatctgggttatgattatcttgcatattgttactctaattggtttaccaatgggtttacgtaatctgagtaatttttaaggtttatacttgatttaggtttatcatattctttaagcctttggtttaataaatttcatccacgaattgggattgttcatttttgtagaaatgtcccaatctggctcagaagtttattctccagaatttttagaaacacattatcctaaacaattagccttcctatataaacccagaaattttcaacctcgctccatattagaagtgactgataccaaaattaaagaccatctaattaagtcgaaccaaaaagaaattacaagtcattataggcgattcttacaagagatttctgttgggttttatgccct

SEQ ID NO: 132928 - DNA, 674 bp, Cannabis sativa
taaaataatttccaacattatcatgttgacgttgctcagcctcctcaacaatacctaccctccctcttggcatcagcttaacgatgttagagtcataagcgggtgccctacaatatatctattgggtccttgccatggccgactttgagtttttagcaacagtaactgcaatctctatggtaggaagatctcccactaatggagttgcccgaccagtgggaaatgtgtcaggtaaaccttcttagacaatataggtccacaaactagggaggaacttcctccacccttggttcagctcccagacgaatcagccatataattcacagcctatttgctttgaatagtggtgatgctagactttatgctttggggaaccactgctaaacttgagatcacccaaggaactacttgaagaaccatctagaaggttgtcttcaaagagaagactgagaaaatctttgtctattcaattgtctcctccccaaaagtcacgcgggttcatctacttacaaaagacaagagggtgagcaatcagacaaagtgaaaagacttagatgaaatattggtcaacaaaacctaaggatactagccagacaattaaaatgtacaaagctgagaataagcaaagtacgagttccaagtgcaagaacttggatgtgttgggttttgtgccc

SEQ ID NO: 132929 - DNA, 789 bp, Cannabis sativa
ccagtagaaaccgactgatgtggatgaattccttctgacagagaaggctgtgcagtttggttggctcgacaccttttaagagtttgtctcattgaatttgtgtcatattgtctcttaaaagtacgattgggatgaatattctcttgacctttaagggttgctcttgtaatgtgcaaagtagcaggagcagtagtagaaactgttgagaattggattgcaccagcagagtgtggctgcaatggttgtgatttgctatgagtggggttaatcattggaggatatgtggcaaagacattggtggttgtgacttttatctctaagtcaggtgtgtacacatctaacaataaaggggagttgttgttgatgttagtgacaataatcaatttccctttattattaactgggccaacaatacctggagcagtggttggtaaattgaaaggcagtggtggtttaatgagtgaggaattattaagagagggtggtgtgaatagggaagtagtcggtggatgaatggcagaggtagtagcagaagtacaagtggacacaactagcgtgcgtggatcaatatgggaggggcaagtaacagacacatctggagtggaatttgatgattcacccatcaaaaaaacttttggctgcggctgtggagtattgcgaagtctaggaatggtattcgttaatgtgtttcgtgtcaaacgagtgagcaaaggccatccatttccctttgaaaaatcagtgcgataacgatcataggaagaagttggcaatctcgatcctttaagttca

SEQ ID NO: 132930 - DNA, 1583 bp, Cannabis sativa
  modified_base (1140)..(1145): a, c, t, g, unknown or other
  modified_base (1491)..(1497): a, c, t, g, unknown or other
agtcaatatgttcacttcaacaagcagcattgcttccgagccaaatgctagcgagaaaggagtgtgtcccgtggctattttctcggtaattttgtgggcctagagcacctaaggtagctcgtcaacccatcgtcctttggcagcgtctaactttttcttgatagtatcctttagggttttattaatggcttccacttgccatttgcctgaggcctggatactgaagagaagcttttgataattttattcctctcgcagaattcagtgaacaagtcgccatcaaattaggtttcataatcagatactgacgagaagcttgtatgttcttgatctgggacatacatttttatctggttatatccatgatatgcgtccataaatgacataagctcgtgccctggagttgcatccactaactggtcgatcctgggaagaggaaaacagtcttttgggcatgccttattcatatcgaagaagtcaatacaagttctctaagttccattaggtttcgagacaaaaacaggattggctatctacgaggggtaacatacctcgcatgtaaaatcattgactaccagcttgtcaacttcttgttttagtgccccttgcctctaggaatccaagggcctctttttttgtctcttccccgggtagtttggatcaacatttaggtgatggcagataatcttagggtcaatccctatcatatccccatgactccaggcgaattaatcctggttcgctttcaaaaagcttattaactgctatttgagctgttcgtccagttcatcccaatgtacacacatttggtgggatttcctaggtcgagtataacctcctccaattcttcaatttattttagcaggtttctttcatcttgaaatcgaggatcagatcttcctctttcttcttgttttctcctgccaagatcgtcatcaactgatgatcgacccttctatgctgcaactctatgcgatagcaattgcaagtgagcatctggtcaccacgcaccactcccacgccatctggtgtatggaactttcaagataggtgcttgatcgaactaactgcccctagtccgatcagtgctggacgatccaacaatatgttgtaagccgagggcaggtcgacaaccaagannnnnngcataacagtagcagttaaaggtgccttgcctacagttaaggcgagctcgattatgctaaggctagcgatgctatccccggtgaatccgtaaagattcaccatacaaggccttaacttggcctttttgagccccattttcattatagtctccatataaatgatatttaccgagctgccattatctattaacactctgttgatcctcttattggccagttgaatggttatgaccagcagatcgacgtgaagatatctcacgttcttctcgtcttcctctttgaatgtaatatggggttccttagttttcaccttcttgcaaggttttgttgggttttataccctaannnnnnntccatttcaatgtaatctttattattcaattatcaataaagagacagaagtattttcatcatttattgtgtcatttggttcatgtt

SEQ ID NO: 132931 - DNA, 525 bp, Cannabis sativa
  modified_base (466)..(482): a, c, t, g, unknown or other
ggcaagagaatgagcagccttgtttctttggcgccctatgtggatcacggctaagcagtttgtgtaagctggggattctttgatttcttctagcaacgcgctccaatctgtgttcacctgactgtagcccattaagaagttaaccacccgaaggcagtcaatttgtataataaaaggaacaacctctgtttggatagccagtttaattcccatccgtaaggccaaaacttcagccagctccaccgagaaaaggccttattgctgcttagtttctgctgctatgacttcgcccgattggttccttattagagctcccagcccgatcgaagattctgtaccatttaagctggcatcacagttgatgcagtagctattagcaggtggtgcttcccagccgagatgaggtgttgtatgaatttggctgctgtgatctttcggggagatgttattgttggaaattattttnnnnnnnnnnnnnnnnnactcacaagtatgttgattaacagcctaaatatgaactttcta

SEQ ID NO: 132932 - DNA, 1136 bp, Cannabis sativa
ggtagtagagtcattttagctttactttatttagttttttgtaatgtaatcctcattacatagcttttctagtgtaatgaggattctattgtataatgtaattatcattacaatgtaatcccattacatcatttttaaaatcaaaacaaacattgtaatggataatttgattccattacaattctcattgcaacaaaccaaacatgccataaaggaattgagctagataagtattttatcatattcagtaagggacaggcctatacaagtgcggggtataaataattatttatttatttattattttatgtaataataaagccacatatatacatttataaaaattaagtttttcttaatgcatacccaaatattcttttatatgtataacaataaagcctccacttaataaaaattctccataattctgagaaatagagaatttaaatttaccaattcggttatgatgtcacaatttaataccaaaatctttattttatatcattctttgaatctttgctattaaaaaaatagtgtgagatattttggtaaaactatgcaatctttcctatgaaaagaaattagtcaaggaatcatataaaagacttaatagtagttactgttcaatgagttgagagcctttttttcgataaatagttcagggaccaaattgttaatattttataattttggtacaaatttgctaaaccattttaaatttaaggggctgatttgtgaaaaaccttataaagagtttagtatgtctttttgtagaattatccttaaaatataccatgattcgtatttaatgcaggatgctaatagtcagatgattatacaaatttaatgctttcttttttgagataaaatataaatgcaatacttttttttttttggtaggtaaggatatgaatgcatgctttttttttttttttttgtaaggatataattgcaatacttaaatagcatagagaacacagagaatctatatcattttacaacaatgcccaggataattctattggctttcttctatagatgatcatctatagatgatctttgactatttagattgtaacaatggataattcataacgtatctatatatgggtacgtatatgttggaaattatttta

SEQ ID NO: 132933 - DNA, 618 bp, Cannabis sativa
tttcaaataacatagaaaaaaactagcataaaatttagtatacgtacctcgcacgtagttttttgctagtatatatataataaaaaaaaataataaaaaaaaggtataattacaaataagaatccaactaaacaaacactttaataatgttacttataggttgttgggaagaaataatgaagccaaaacacctataaaaagaatgatcttttaatttttacttctaaaggatgatttttaagaaatgttcactaaatcaacatattttaatggatgaaaaaatgtggattttagtccagtttgttttgagctaaaatttatcaaaatccaagactacaaatataatataaccagtgtttttttgattaattttattacaccaacacatcatatcattatatgataagtcttaaatgataaattgttattgatataaaatgttctaaaatatttgtaatagggttcaggcatattatttagtttaggcaaatctatttaaaaaaaaaattgtgtgctacatagggcggaaattgtgtgttacataagccttcattattagaatatttttattatggaaattattttctaattaagaaaatgattttctatttaaggaaa

SEQ ID NO: 132934 - DNA, 671 bp, Cannabis sativa
aaaaaagaaaaaaaaaactttttaaaagagcttctagagaaatatggtatatacatataataattttggtcaaagtacttctaatataaaactaatttgaaagaagactaagttttacggtactaaaaaaaaaggtttagatgactgttttaaatatacagctaataaattattatcatcaattcataaggccgatgcttatgccaccaacacaaaacaggtagaataggcatagattacatatattcaataataagcatttttgactgtttgtaactgatgacaaaatggaagagtataagtgactgttctacatagtcgctaaggccttttcttgtcaattcctgatggtcgtttataagtgtttaactgaaatcgatgcttatcacatttaatagtgttgattaatccaatttaacactctgatgtatgatggggaaaatgtaattctttttattattttctccttaatttttagacttttacagaataatttcatatatttacagccacaataatatctcaaaaaaaaagggcttgttttatcaggatttatttactatcatatgtttgattataaatataatctaacattttaaaatatgaaataataaaatgaataataaacacatataaagcttcagatttcttacattgattgcagcgaaaat

SEQ ID NO: 132935 - DNA, 1348 bp, Cannabis sativa
  modified_base (886)..(892): a, c, t, g, unknown or other
  modified_base (1288)..(1299): a, c, t, g, unknown or other
ttttctaggttgagatgttttatggttgtctggtttgagatggttgaaggcaggtttgggtggggttgtgtggctcacgactgccatggtaatatgtggaggctttccatcgggatcatgtagggagggttcaaccgaagttgctgagatggttggcatcaaagaagcattaagttggattgatcgtcacaattggggacaagtaattttggaatcagacagcttggtatgcatacaagctattcaaagtaaagtcaatgttgaattgcgttttgtcaaacgatctgcaaacaagctggctcactgtttagccagagattcttgtttctctccaggtcgtgtgctttagttggaggattgttcctctgaagcacgttctattatttttaacgatttgattaattaataaagataccgatttgagtcaaaaaaataattattaataataaatagtattattaataatatggttttaaactacgttaaaataaatatccttatgcccgaaatcaagaaacccaaatattaggtattattaaaatatgttacatatccaataaaggtgtaaataagtggtgaaaagctaaaatataactcatttaacaaaaagtgtactccaatggtgtgccaaaaaagtaaatttggcacatagcaaattttgtgccaaatttggcacaacatttcctatgatgtaaaatttacaccacaataaatacactactttttcatttacattgatgtcttttttattattttattattatatttaactatcatattaaattatgaaatatttatattatttttttattgttttacatattaaaataataataaaattgattattaagttattcgattttatttttttaataaaacattaatnnnnnnntaaattttacatcaaaattttacaaatgtgcattagagcacaaagctaaaatttggtgtaaatttaccacaaaactattttttgtgccaaatataacacaatttttatatctcctattggagatggtcttaggcatactagttgaaaaagcaaaaaaaaaaaaagttgtttcttgatttaatgtcgatcatcatgcatccattcatcagaaaatattagtagattctcacctccctccgacgattgcagagctggcccaacaaggattttccaacgttgccaaagaactaggtcagcggcggtgttcttctcaaccctcgtggatttgctccccctcactatgcacactacaaaaaatagttacttttagtaacaactttttagtcacaatataannnnnnnnnnnntaaatgtgatttttagtcacaagaagtgactaaaatatagtatttagct

SEQ ID NO: 132936 - DNA, 584 bp, Cannabis sativa
taaaatgtcagtattaatgggcctccttttataaaaaatttcaaaaatattatttttttaatgcaaaaaaatatactatataaaaattttatgtcctaggtttgagtgagctctaggtacgggcctagcccgccttagcccagggtcggacctgacactaatatagagtgagacttgaaaaaatgacgtccatgttagaaattttatgaatgaaatatgaaacatatataaatcgtatattaaatgcgaaattaaatggaacatatatgcactatgaaaaaatgataaattttatctcctatcgttaattctttgagttttaatctcacacgagttttgaatcagcgaaagaaaagaaaattgattagtgtgagtaattgcatgtcattagttacacatatattattatcatcactattattatattataaccaataatataacaggtagtgtaatgagcaaaacagaatagaaattcagtaagttttgttgctaaaattttagtttttgtggttaagtattaaaaacataaaattcatgtagttttgctgtcaatattccaaactaaatatcactatattgga

SEQ ID NO: 132937 - DNA, 610 bp, Cannabis sativa
tataataattaattaaatcatgtgtaccatgtaacataaaatgcaatttctgatctttattagtaaatctgattattttgcaatgggttttatttatggcacagaacccgacatggtaggttttaaagtaaatttaaagggggaaggggctgaagccaggagatcctatttctcccttgctctttgtacttatcatggagtatctcactagaagacttcaattggaagttcaagaaaagtctttcaaataccatccaatgcgtaaaagtcttagtttaccagtttgtgctctttagatgactttatcctcttatgaaaaggcactcaacaggctattaggcatctttaaattgctcttgatgattttagctcagtttttagattgaaggccaacaatgctaagtcccagattttatttggtggtgctacaacagttgtaagattgaaatcattcggaagtgcaatttgatgaaggtcagtttcctctcaagtgtttaggggtcctgttacgaaaattgtaaatagtacgcaagtgcacgtaatcaagtagtaagctcacacaggtgaggtcgaaccacagggaattggattgagtaccactagattaaat

SEQ ID NO: 132938 - DNA, 809 bp, Cannabis sativa
tttgtttcaaggcagtctttagtttttattattattatttaatctcactaattatgtagaagttcactcttcattcccaatagtaataatttaatgtgagttgtcatggcaagtttgtatgcttacaattacagtgattaaattttagggcatggctgtccttcccttgttatttattcccatgagttttcttgttttgaattgactatatttattgtgttataggaagaagaggtctggtcatccaagtttcaggttgtggactttccctgtgattgtggatggaccttttggggtcgtttctgctgctgagcttgttggaattcttctctttggtgtgtatgttatctgggctgtctattcatattccttgaaggccatcagcttaattcctgaccagttaagctttaaagtgcaaaggtatatacataacatgtatttatatggttttttcaatcatcattttgtcctagtttaaaatataactgtccatcaatttttacaccaagggatgaaccgctctgttgttgttttgcaactaaaccgctttagaaaaggataaaacttaactctattttaatacaagcaataataattgataaaggttctgcatatatattatgatccataagaatcctactaagaattcggagattgtgaactatgaaattaatgaccattggagcaacatatgaaaaactaataagagtttactagtttgttacaccttattctattgtatgctatttattatattgaattgtattttatattatacttttgttaatttttatgtgcatataaataaa

SEQ ID NO: 132939 - DNA, 590 bp, Cannabis sativa
  modified_base (116)..(118): a, c, t, g, unknown or other
  modified_base (548)..(564): a, c, t, g, unknown or other
aaaaaaaaaaaacccctaaaaaaatagcatttaaaaaaatggagttattttataaatacacaaaaataacaaaaaatttacaaaaatacagtttacaaaattttaaatatttttannntttttttgattttatttacaaaaatacggtctttttacgttgaactcttgtttatttgttgttagttttttgttctttgtatgttatagtttgttgttattttaatattatttagatgttatttttatgttatatttatgtagttttttttattatttttgtgttatttttacgaaaaactgtaaaaatataaaaagattctttaaacgtaaaaatgtaattttcttaccaaaaaaagccttatctaattatcttttctaaaatttcatatttttataagttttcttacgtatatttgatgtaaatttgggggataagctgagaaatacttctttttttgtatttttttaataaaaaatactctcatattataattcaataaaatatacccatttttgtgagtaggttgtccatgttggaaatattttannnnnnnnnnnnnnnnntaccatgtatgtttcattaacatcct

SEQ ID NO: 132940 - DNA, 1346 bp, Cannabis sativa
  modified_base (1097)..(1098): a, c, t, g, unknown or other
aaaacaaaattggaccccgcaatcaaaggtggtttcaaaataaaagtaccccaaatataaggacaataattaagattagacaaaagttttaccattctttctttgcaatttgctatttaactaagtttttcttttctttgcaaaaaaagaaaaattagaatcaatttgttttgatgcaaattaagagcaaaagtttaactgatttttactcatgatcaattgtgtatgaagaaagtttttctcaaataataaaaaaaggttatgaagagagttagttaagtgggttgtcacaccttagctagttatataacaaccaaattcattgagaatattaaggtaagatgaaaataatctcttgtagaaatatttaggtaagataaaacaatcttgtagaataagttgccatgataattttatgcatgtaatcatattttttcttaaagtccacttttcttgtttgactttttcaaactcacaaactaaaaataaattggatagagaaatagacaatagtaatgatgataggccctaagttgaaataggtttagtgggctcttattataagaataaatgatattttttaaaataagataattaaaaaaatatatataaaaaaaatacggtctgtacagaatttttaatatttttacggttttttaaattttatttacataaagtacggtttttggtgtatttttatgttgtactcttgttattttgctgttgattttttattatttgtatattattttttatgttgtttttttgttacttttacgttattttttgtatttttataaaatatcgtaaagatatatatatatatataaatgaacgtaaaaatataaaaaacttataaaatttagtgttttatgtaattattcattcaaaaattacatatatttttttaaaagatatttttttatttgagtccgaaaaaggggctctaaacgcagacctaagtttaaggttggacctaccaataataccttaagtagtaaaatagttgagtgtatggaagggtcgaccctgagttggaatgagtcataggcaaatttttttttgcccttactataaaaataaataatatttttaannattattaaaatatatatataatttttaaaagatatttttttatttgtgctcccaaaatgattaggccctaggcgcgagcttagcctgaaaaagtgcatgaagttttatctcaaaattaattgatatggaatttagttttaagagattataatgggaataattacataaggcaccattttttgtaaaataattacattttttacgttcaaagaatattttttttgcatttttacgatttttcaaaaaat

SEQ ID NO: 132941 - DNA, 990 bp, Cannabis sativa
gtatttttgtaagtttcccattcttttatccttttatatgacattttaaaaattgaggggttgtaattttattttttttttatgtaataagggtgtaaattgttttctatatgatatgttaaaaattaatataaatttgtattttgatagtattaaatatatatttgaaaaaaagacatttatacaaacaaagtactatttttagtaagtaaaaaaaaatttatatttttatgttcaattattattattattttttatttttatatttttatagtgtcttataaaaacaatacgaaattacatgaaaataataaaaaaatgtagaattctataaatataagaatcgaaaaacagagactcagaacgaatgcttaagaaaatcttcagcattgtgaggaataaaggttttttatttatttattttttttttagaagggaaaccgatacagattaaaataacaaaggtaacaaagttacgcaaccagaggaggattttcttccatctataatagttcattgtttatcctaagagcatgcggagatatcctataaagttttatttagatatataggctcatataagagagtagaattctgttataacagaagtagttataagaaaacaaaaatactaaataacataattagagcctaaaccaactaatcttttaactatttgttggttattatcccccttaaatgaaaaggggtgttaactactttgagtttggtcttaaggtattggaatctctccttgggaaaaggcttagtataagaacacctgtaatctgattaacagagggcacatatcaaactgagatttcatgttgcagaatttaatcatgcacaaagtagagatcaatctcaatatatttgcatctggcatgaaaagttgaattagcagctaaggcaactgcaccttgtgtaatacccggtaaaaatatacatatattttaaattttatttgttatacaatttgtgtgagaataa

SEQ ID NO: 132942 - DNA, 667 bp, Cannabis sativa
atctaagatcctggtaaaatatatccaacaaaaactatggctgaacaacaatgagtgatgaacttagtgaagattgtacatatctagtcctctaaccctaaaggattgtgatctttgagacaccactgatatttttttggttatgccattagacaagaatttttgatactttatattatatatgttttataactagattttgggttccctgattgtaaatattttataaaagtgtttatatttagtaaaattttaattatcacaaattttttattaaatacacttttttatgttagaatcctttgattagaaaatgttagtgcaataattaaaaaaatattgtagtgtgccttagctactagggcgttacattatgtgtgtctaattttcttagatcttagagtttagatggatctccaattataattttaattttatgatttgatgaaaagttcagtatcatccaatattcttcatgtgattttaccttgtttaatttttgccatgattatgatttatgtattgttttgctttatgtgattataattagggctattatttagattgtgaaatttattactcgagaggaaaatttttgaacaatcaggtctcaggtagatcaacataggttatgtgaaattgagagataagcatttacttgagtaac

SEQ ID NO: 132943 - DNA, 830 bp, Cannabis sativa
tttataataattatataatacttaaaaaaaactaaataattataaatacatattaatcaaaacttttataaatgtatttgtttgtatttttaaatttttaagtctgctaaaaaaaatactaggagtgttcgtggtgtgggtagtgcggttttaatcattttttttaaaccaacccacacatggggtttttctaatttcccaaaccgcactagcaccgcgaaactaaaaaaccacgaaaattgcaccacaaaaaataatgtgatgcagtgcaagttttgcagtttggactatcaccaataatttattggatttaacaaatatttagtattaaaatatttttattatattaataaaataatagaataattaagaatataatatttggtgtaatttttagtattgtggttgaaattgaaaaaaattttattttaaataataatttttttggtgttgatttaataccaaatttaaatttacgatacccttaaacatttacttgagagagagaaaaagcatctatgggtaaaatatagaataacaagatgaattctcttacagaaagcatgaagatttccatttttaaataataagaataaaaactttttcaaaagaaatttaaatttgacatgacattatttttacccactcagaaaatatagtactagttcctccttctgataacaaccgacagataaatccaaaactttcccagatttgtttataataatgacatatttctttttcgacaccttacaaaatttattatttttagtcataataattttttgtggttaaaaataaaaaaattatgactaattataaattatcat

SEQ ID NO: 132944 - DNA, 794 bp, Cannabis sativa
aggcgaggagaagccgaagaagaagaaggtgaagcctgaagggtatgggattatgagtacagactcatttgcttctctgggcttgtctgagcccactttaaaggccattcaggagatggggttccagtttatgactcaggttagctcgtttctattataacattacattatttgtcatgacttgtttgcgtaggtttttcaggagtgaatttttggttaatgtagagcacccttgtactaacttttcttaaatgaaaatttttggatagtggatactcataaaatttattcgatccttttgacgaataggatgagtaagaactaagaagtaaagtgttatatgtttgtgagcatgtagtggatcattatttttttttttgtaggtaattcttttctatctcgtattgtagcaattgaaattcaaagcttttgatattgaaataaaattcaataataaatttatttttatcctttgcactgcaatatctatttcaaacactgatgcttatagtgaatgtgtcattcttgctttttgtgtatcgtgaatactagaaaatttcatcttcaataattttagtttttctaggattgatgttttcaatttaaatgtagattcaagccaaagcaatccctccccttttgatgggaaaagacgtccttggagctgcaaggacaggttctggcaaaactcttgctttcctaataccggctgtggagctgttatatcatgctcgctttaccccacgaaatggtaccggtgtcgtggttatttgccctacgagagaacttgcaat

SEQ ID NO: 132945 - DNA, 590 bp, Cannabis sativa
taaaaattgtcttaaagttggttatattaaaaaataaaagtattgaaaattgagttcagagtcttatttttatcattttaggaaatatagggtctattttgtcatttaacaaaatagaggatctaatttataacttttgcaaaatagagagtccaaaataatatttatccttttgaacaatctctagctctttatttttatttgaaatatttgcggtgaaacttttttaatatttacaattattatgcatatgactaagaaaaaaaaagtataagtaaaatactttattttacaattttattgtagtcatacttatttttttgacaataagtattaactcaaaaatatatggtaatatattattgaactatgcattaaattaaaaaaataataactaaaatttgtaattaattgccactgttgctgaattaattagcacatatactgttccttcaactttattgtaacaggtataccaataacaaagaggaaattacactctataccctttttatattgtctttttttatttttaccctcttttctaaagtctatcatttttacctcttttttaaatattgtaccaattt

SEQ ID NO: 132946 - DNA, 1005 bp, Cannabis sativa
gtgagtaaatcttatcaacatgcaagatgagttcttacatttagaaacttcaagaacaagcaatactgtagtggcttaatttgctttaaaattatcaaagacctttatgatccaagtttctttagaaacatgatttagacacatgtctaaaggtcttttacaatattaattataaaatgatgtcactcaattcggcaacaaagaatgtgttattaataagacttcctctacattacggcttcagagattttatagcttatctccatatagagaataaatattaataaatagtgaggtactttcattactctgagtttactatatttatttaaaacttgtgtcaatttcattaagaaaatgcattcacacaagtcaaaattagtgcatatgggaattctatcatattagaaattatacatgtcaattaacacgagtagatatggactcgtattttttttaaaaaaaaatcatctcatttattaatgattactcacataaattatatctctacaaaagtaaagatttatatatttcaaagacctttaaatcttaagtggaaaaataatacaatttgtatattaagaaagtgagatcaaatataaatggataatattacattaaaattcgtgaggatggataaacctatcttttatttacaaaaattcataaaaagcatgggttcattgcccactacatatgcctagtacactcatataatggtgcatgactggtttagaactggacccaaataccataaataaacatttcaacctaaatgctataatgtctaagggttacatgctttattatccatctcacaacaccatcactactacaatttaaccttttagtgacactatatagtgactctcacttttgtgcgcgtcactaaatagttaatgtaggaaatcacagcaacccgaaatggccccaacacccaacagtcacaaaataggggtaaaattgtctttctagttttgtacggatctaaaaggaatattcctt

SEQ ID NO: 132947 - DNA, 842 bp, Cannabis sativa
aaaaaaaaaaaaaaaagcccataacattttcagctttttttttaattgaaaaaaaaaaaacattcagattcataatcacactacatttattctctaacctattattacctaaatcctcgccatgtctaaatggtgttttgtttttcttaatatatttatatatatactaactacagtcattgttgtatttattaccgttgataatggttttattttatttttctatatttgtttataactgtagttgtttattattgagtagatttatagatagagacccacatgttatgttagcttaattaaaaaaagaaaagattaattaattaaagagctttaaattgagatttgatctattattatttaagttaatagtgaaattaagaagacgaataacaataaacatgcatgcattacttataaggataattgtgttggatttaagaatatttgttcagttttatttaattttactaattttgtaattgttcatatactaaatcatgttttttaaactttaacatctaccaaatcatatcattcgaactttgacatgtaccaaattaagctcctgaatttttatttatgttagactttttttactaaaattaaaaaaaaaatccttaaatctaataatctcaataattcatgagagattttcaatagacttaaaaattcaagaaacataatttgttgcatattaaaattcgataacatattattatagtgtgacatagtttagaaaaaaaaaaggtcactattattaacaactaacaaggacatcacttaagtgacaatttcatttggtcattaatttgacccaaagaaggagagagagagagaga

SEQ ID NO: 132948 - DNA, 715 bp, Cannabis sativa
aaaaaaaaaaaaaaagagacacaatgttttgtatggtcatgtatttttttttcctaatagatataaaataatataattttaaaaaatggttaaaaaaatgtgtataatcttaaaaataaacttcttatttatttatttatttatttattttaatttcattgccggccactggaataggtgcaacttcccctattatgtgtccaaaatttgaccattttgaatattaacatattacatgtagatattatatataatataatatatatttaaaaaagttggtgtagatattataaataaataaagatttttcttttctccaaagaaattaggtgagaattaaagactatatttattgataatgaaaatgtaaaaagagaacgtgataacataagttacatgatattctgattaaaaaaaaagaggtttttccattaatgtacaacaaaaatgaatatattaccaaaaaatgtgcaaaaaaaacttaattataaaaactcatacattttaataacatatttagtaatatttatatcatttaatataatatttactaaacttactataaatatatatgtatacataatatgattaaggagcatagtcattatatataacttgtgactttaaattttattattaatatatatatggtataagtacatgataaaaaaaatgaaatttaaatataataatataaattattataataatatat

SEQ ID NO: 132949 - DNA, 1002 bp, Cannabis sativa
tactcgcacttgttcttcatatagatttctttctgttattaataatatcatataaaattggtgttgcgaaattcactcgacaacatgctctaagtttgtttaatggagtgttggtaaattatgaagaagttccaaccttatttataggtaatttggtgaaaaaaaggtaatcatttggaaatccctcaaacgtttgattttcccccagaagaaattattgggaaattaaaatcaatcaagtgtaactgtcaaagcgtgcgaagaaaaccatgtttcaaggcattaattaagttcgagcattaattagctgaaaattgaagagacgcttggtcagactctcatcgaatcacgaacagacgcacccaacacgtgtcatccattcaaatgtaaaagcattttggatgaagtctacacgcaacttcaaaagtcccgcgcagacttgggggaaactgttatcccaatttttacactctgacgtgacatcacacgctggtgacatgtggagtcaactccccatatttgctcgaaggagatattctgagcagaacaccacatatacctacatggacaaagtcctcctagccgagcagtggacaatctgaacaacataccaacgccttagctgttttgacattttttttcatgaaacacgaaagcaatccctacaaatttgggatcgtatcacagagatatggcaagctatacaaatccctcaattagtgtattccatatatgtaatgtgtattcttaccaattatagatattgtaagcaaaatggaaaccttttctcaagcttatagccctataaatagtgatccattctcactggacagggggtcgagaaaattatttaagagaggatactcaaagatatgattgtaagagctctaagagaaaaataattgtgttctttgttcttaagtcaatacaaatcaagggaagtaggctattaccgaattgctcggggccgaacctctttaaaaactctgtgttctttattta

SEQ ID NO: 132950 - DNA, 991 bp, Cannabis sativa
ccaccgatagcaccgcacgatgacggacgaccacccaccgccaccagcaccgttatcggaccactccgatcgagacccgcactgtatcacacaaaaaccattgttttttgggtttttaaggtcgggtccgatgggcccatcggaccccatcggacggggcatcgggcccatcggacccgaccttaaaacccaaaaaaattggtatcgagccatcggacgggcatcgggccccatcggacccgaccccttaaaagcccagaaaaataaataaaaaaaaatcagagagaaagggtttgagtttttgagaggggtatttttgggattttagaaaagtggtcatatattttcaatgtagaaaagtattagtttagggaaaaaatattaggtatatgtaagtataaaaattcaaatttcccaattaatattactttgcacaatttgttctctttctttaaataacagttaaacccaaatatacataaaaaatagtaaaataaaaactaaaaaaaaataattataaattgtactaagaaattattgtgaacatgaatacttataaaattggtgtgataaaccattttgaagatttagttataaaatagtaaaaaaaaaaaattatgaataatgatatcaatcttagaaatattgttttaaaaaaataaaatttaaaatatcatatcatttttcgatgcatataacctatatttttgtgatattgaagtttctttttatcaccattttcttttatttttcttttgacatttttgaaaaagggtagatatagataaatggagtatatatcaggctgtctatagacagtggcagaacttggtgaacttattaggaggggccaattttttttcaagtgtatacaagtatttatatatagtttatttatgtaaattttgttagagatttgattataatggaagaaaattaagatgtattacaactctattgtaaaataatacaaggactaaaataagagatt

SEQ ID NO: 132951 - DNA, 1330 bp, Cannabis sativa
attaaaatacggaatttcagtattaaatacagtataaagtaaaaaaaaaagtaacaataaaatatatttggttcaataattaagacattaagtattattggtagaggttcaaatggtgaaataaaaatattaaagtaaacatatgaaatgactttaccgttatacgaaagcttattttatgtgtatagatatcacttttatttataaatatatgttgtaactaattaaaatacatatatatttttttcttgatttttttttcaagatggccccacctcgcttctatgtgagttcgccttgctgccaacacatattaagttgtacacgcatactaacatatttattattttcatagtcacattgagcaatattaattaccacattacattacaatgtaaattatcacatcacatatccaaccatgtaaatcattacatcatattattacattcaacaatgtaaatattgaagtatagtcctaatttcacacagtactcctttatcataggtccaagcaaaatcaatttaaccaattcttctttgagtgtataatcatcatcacaaaaataatacaaaatcaaaacatcaatatccaatattattctataggacaaaaacctatttaccaaactttctccatatatgacaatttcataatatacttaagcatgaaatcgatcctcatatcaaaattacaattatttatttggatcaaaatatgatacataaataatggagccacggagccactgttacgaaaaatatgcaataggatagatttattttcatgtttaatttacaaattataacataataatatgtaaaataacttagaatcatgttactaattgatttataataaacatatattacgtaatattttatcctttctaatgctaggtattctaaggaattaaaactgttatattcttttttattcttcataatcttccaccaagcctttgaattacctaagctagtgtaggaattttttttcaaactttgtggttaaatttttagagagaagagatagagataaaaacttgcgcatagagagatagagagacaaagagaggaggatatgatattgcatctcattagttgtattacaactgtagctataactctcgaaatgatagccactttgttacttggtattagaaattgatacacatttctacaatactcaattaagtctagaattttctacacatttataaaaaaacatactctaaacttttagataattgtagaataatttagaattttctagacatgtaaaaatacaatagaacataggcatttctagaaaactttagtctagaggttt

SEQ ID NO: 132952 - DNA, 2084 bp, Cannabis sativa
  modified_base (1473)..(1474): a, c, t, g, unknown or other
atccacaaatcataccatacatgaataagcaagtgtatgcatataattaattaaaataaataacacataaatatcactgtaaaatttgtctatagaccttcatttcaaatattagtgaaagcaagaatcaagctggctactgcagtagtttgatcaaacaataaagatcttctgatggcctctccatttcaagacaattgagttttccacgactgtagaatccacatgaaattcaaaggtcaatagtgaccgaatcaatattaattatagaaaatcaaatccatcgatgagtaagtgttaagctacaaccaaagaagatgaatcattaatatctaatgaccctaacttgtttcgtaagtaaatattcctgctactcatagtcccaaactgcaaaaggtaacagtagttaaggcatcataatctcaacaagataaaaaacaaaacaagcatttggtagtttttttgttcttcctaacttaaatgtggaaaacaaactggtatacctccccttatggctttcgatgttttccgaattgcatgtgaaacaaatatatgtttagttaaggaaagaaatttcatatttaacaatgaggagaagtaattattccagaataacgaattgagaatttattaattggttaaagcttagattgacaacaaactgaattaaggatatatattaatatatatatatatagccatagaattgaatactctctaactaaacaaacccccaatatgtcacataagcttgattagaaccaaaatgaactaaggatatacatatatccatagaactgaatactctcatgttttgtgccaaaccattgccatattaaataaaagtcagatgttaaaagcaaaaaatacttatatagtaactttagaggttttccatttgctttagagtcatctctgcctgcaagaaaaatattaatatgtctgactggtatgaagaagattagaagggtttgagtgctcaattgtatcgacccaatcgttcccctattcagaatcaagaattgtttgctaaacactaaacactgaatcgaccattccgatgctgaaaaggaccaatcgacaataaatcaattctaaatcaaacatatacaactcaatcgtatcaacccaatcgttcgactcaatcgaccattctgaagctcaaaaggatcaatcgacaaccatttgaaatcgattctgattcaaaaatcgaatgctcaactgtataaaagtacgtatatggagaccctgcactgacaagtatgtataagggttggcgatcaccaccacactttctatttcgcaatctgggaaaaaaaattctgacttttttcctctgcaggttgaaggagttcatcaaggaactattagttaacataccgatagctcagcgtgcaccttctcctcaagtgccaccaacacctcaagtggctcaacctgcaacctgcaaattgctattattattattattannattattattattattattaatgaagaattatcattgatcaccaaataatttacaagtcaaattacgaattgctaccagttccactctcggctacgacacaagtactcaaataactatacgtagttatatgactatatgagtacaaattgctacaatttactaagctgggctatccaacaattacaattgatcaaagagcctttttgccaccaaattcgtttacatataaatgaatttaaaataatttgtgttgtgtccagtcgagttgcagcattatcttgttggcttattgtgatgaagaagaatgcaacaacatttgtgtgaggatttgttcattatacacttgcaaaaaagaaaaaaaaaatgatttatacgaatttgagtagcactcgaactctaattgtgaacaaaaaaaactaacgcttacggtggtagagaatcaatagggagggagcaaatgataattagggttaccaaattaaaaacatgagttatttttttttcaaccgtataaatttaggaagaatattctgtaaaataatggaatattctgttaaaacttaacagaaaaaaagattaacaacgttaaaccaagaaatgccgttagata

SEQ ID NO: 132953 - DNA, 808 bp, Cannabis sativa
aaaacaaacaaattaatgattgggggaattgacatttgaataatcgatctaatataatacaaatcaaacttcaaccttaattatgaagaaaataatagtccaaattgacatgaggctattgataaggtaatacaatgaaattttccatgcatgcgtatatatatacatatacatatacatatatgtaacattaatatcatttttttccgattaagaatattaatataacgttgatctgtataataaagacaaaattattataaggctctttcgaaactgacatttggatgcaaaccgtataaggtatatatatacacggtcatctttattaataataattttggttaattttggatttattttttattttttgagagaatagtttttgaagtatatatattagttgaatagagcttaacattacatgttgaaccatatgttatatatgttttcttttcttatttaaaaccaaaaagaatgtcaatagagagagagagagggagtacatatgacaacaatcaacaaaccagcatatatcttattccccaagttatatcatatataatagatcatgaaattataaaaattaaattttttgttgtattaattataagaataattagcaaatttgctccgtgaacttatgttactaccaagttgtggcccctaaaatataagggctgttaaaaaatctccctaatatataaccattataccccttctgttggattttttaacagacccccgtttatttgctgatgtggcataagaaaatttgaggtggcatagtaatttgatggtagttgaa

SEQ ID NO: 132954 - DNA, 2070 bp, Cannabis sativa
atttttccatgcattgctactaacccaaatgttttaggttcttgccctagtactaaccatgcaggtaactcaatcaactttgatctaagacctactactccaagtgatgaactaggaaagaatactgttcatgaggaactgggagaaaacactgttcaggaagaacaaggagagaacactgttcaggtggaacagggagagaacactgttcaggtggaacaggaaaagaacactgttcaggtggaacagggagagaatactattcaagtggaacagggagaaatcattatttagttggaacaaggaaacctgagggaaggtcaggaagaggacttagaggactaccaattgactaaagacacagctaaaagagcacctagatagaatcccaagtatagcttcaacatttggaatgaggacattgcctatgaactgttaagtgctgtgcaaggatagaagaacaaaccagaaagttctggagaagctatgaagtgcaagaatgctaagaagtggaactgtgctatacatgaagagacagcctctttgagtaaagagaagacttgggtttgtgttccaaaacccaaggaaaagagtgttgtgaaacatatgtggcctttcagataaaaagaaaaatgcactaagataaataaagagttagaggatatgagtcagatcctcaactctaatgggattggttcaaagatgtatttcatgttgagtaccataccagatacaacatatactatagttgttgttagcaagtatatggtaatgactgggaaagtacattggttgactataaaattgattttaaggtacttaaagaagacaataggtgttaaacatgcatttagaaagtcacaaaaccaaatggaagggttttgtgactcgatctatgtaagggagaaaaataaggtgacacaaggaggtgtcacaaacatgaagaccaaggtgtttaccctagctaagttcaaactaaacttgctagcgataagcaaaaggtactgacccttgtggtcattcaagccctcataacattatcaactatccttgggtacgtaagagaatttgggtggaatatgttggtacagattcacttatataccttaaagttttataacactactcacagggttccaaaatgacagcttacaaaattacaactttacccatattttcaaatacaacaaagatcaagactaaagaagataaaattagttacaactgaaatagttacaaaacaattacaaatattacactaggcctctgccctagatcataatcacatatcagatctataaaaggatactttctctcatttttgagtgaataagtgagacaaacagaagagaacaacacagagaacacaaggccagtttgagagagctcctccaagagtgttgttggtgtgttcatgtaaaagaaaaaaaagagttttgttatatcaaaagagaggaaaaacagagagaaatcaaaagttgtaaatcaaagattgtaacttgttgatgattaatggattcaagctttgaaggcttgacagagacgtagccggctgttttgggcgaattccgagatcaaattggtgtctccatctttattatttctgcttgtattactcaccttaatctctatattgtttatatttgtatttgtgtgtgttttgtgttcttgctatttttgggttatgtgtgttgatattcggctaaggggttgtgggaatttctaagttattgttttcgggaagaagtgagaagagcaagaagatcttgtttcaggtagaagctataaggaaaataagaagagaaaagaaaacataaaaaccctagaaaccctacccgtgttcagtaaaaggagaagataagagaacccattagaacaatataaccctagctgccactagagtgagaagaagaagagagcttgaagaaaccctaatactagatgcggctgtaaagaagaagaagtgaaagtgttagtgtcattattttgtgacagtgtatgttctgttcaatgtctagtcgtgtctggaattttagactgttatatctgcactaacgtttgtttacgaga

SEQ ID NO: 132955 - DNA, 663 bp, Cannabis sativa
cacaatataataatgataatttataattagccataattttttcatctttagtcacaaatttagttgtgactaaaagtaatttttttttttgtagtgtggcaatatggttagactggtctttgatacaattcaaccaaactttctgaattttgagattagatatattaattaaagacatcatgcaaaatggtgttttgaagagaagagtgaagaaatatatgtagaagaagctataactaataattaatatatatgtacgaaactaattattatgtgataaacaattgtttattgtgacaatgtaataagtcaatttttcattcaacctaagaattgtaaataattatacaataaagataaggctagtcatcactattaagactgagcatttggtatcttaagatatccaatagattatttatagctagattgcctaatattgaattacacaaataataatatattactttttgtagtgtttgatattcttcattagcattttcccatgttttgcttatagctacaagatatgtaattatttaagattatagttacaagatatgtaattattaaaaaaaaattaaactaaaaatctttcttaaatatcaaaacagataaataatctacttgaatgaaggatcctttaaaaaatctactacataa

SEQ ID NO: 132956 - DNA, 649 bp, Cannabis sativa
gtatttttggattttagataaagtggtcatatattttcaatgatgatatgtattagtttaaaaataaaatattaggtatatgtaagtatagaaaatcaaatttccctttaaaatatacttaaaattttcataaaatataagagttgcataattatattctttttattaaattcagttattttaactgtcaactttaactaatactaaattttacattcttttatcaaaacaaattaatttaaaaaatatatttttctgttaattttaaaaattaaaaaaaaatattaaaaaaattgataaaattttaaattaataaaaaaaaatattaagtacacttaaaaaacttaaattatttaaaaaaaaaatcaaactttattttatgaagagaaaaatcaaacttatttgtgtttacaaatttatattctaaaaaataaagaaaaacatttagaaattcaacaacattaaaattattttaaagaaaaataaattaaactaaaaaaaaatggttatgtttatttagacaaatatagattttactaaaatttattcccgtaaaatttagtttttacaaaagacgaatttttagtagaattttttatatttaaatgaatttttttaataaaagttaattaatttttttaaaaaaaat

SEQ ID NO: 132957 - DNA, 1271 bp, Cannabis sativa
ggtaaaatatttccaacagtacatacctagttggatcatatgcatcctcacttctaggtacatatcatgtagtattattggtatcttcgttcctcccttctgggttttgattatcaccaccatagtttctccctgaacgtgttgttccagtggtatggagtctttgagaactcattggctctttcccaaggcgatgtgtggtttttgcatgataatttccttcattttgattgttatcaaccatggatatacttttgtttgtaaggagggattttctgagttttattactaaggctctcaatgaaagcaccaaactgttgacgcaaatttttgttaaccgaaattaatgagcctttttgtaataaatatatcacaaaaataaaatgaattaataaaataacaccagatatttttacgtggttttcgagttaaatctgcatactccatgagtctatcttattaagatattttctgaatacaaaatacaatacttaattaataatatatcttttttctctctgaaattctccgttccttttaacagtggaatctgcccctatttataggaatataggttggcagttatttacaatcaattcaaaatataatcgttaatgaaacgtgaataattctcacgtttcatttaaatcacatgttggataacacttgataactacttaactacttgttattcttatccttttcgatggtcaatgctgatttggacaatagtatctcgcttaactgtttggttaatactgatttggacaatagtatctcgcttaacctgggttatttcccttatttatcttgatgtagaaaaaataataagtgttggcaggtaattcagctcgtcacatctcttcatttatgttaatgttacgaggtgactgtctcgttatattatatatatatcccaaggttgcattgtgtgactgtattcattctatttcgaaataatgaatttcttcttcgactgtataactcgaggcaggtgcttgtctcgtcaatatgggttttaatagtcttatatcctcctctcacttaagacggtgtagtcaccgagttatgaatattttctattaaccattttattaacaagttatttgcattaaatgatataattttattatattaggtggttcgtattccactgcaagacacgtgtcaccttctaaagtgtagccaaatttcaagtataacattagggtttatccctatcatatctgagtggctccaggcaaaattgatcctagtttgccttcaaaaaa

SEQ ID NO: 132958 - DNA, 832 bp, Cannabis sativa
gaagctttgccaagatgccttgcctttcggatcaaaattgcagagtatttttggaaagcctcctggtgcttgttttctctgtggcaatgaaggcggggatgtcatagatcactttgttgctggttgttctgtcacgaaacggttatggttttcatctcgatggggccttcgggctgaagctctctcatttgacaatgggagagagttggttgcttggctttctcagcctccttttcatcatcttctccattcgcaggaattgtccagcttttttctttatggtgcagttttgtaccataaattgtggcttagccggaatgatgcttttcataacggggtgcctgtggatattaagattttgcaaaagattattgagagctgttttgctgagcacgacagggttcggattgagaaaggagttagaccgaagctgtgtcatggtgtggcggaaaccagatggggtctcccgaggcctggaagagtgagaggatttgtggatttcgcaacggacagggaggttggggcagttgccgtggtcctgtttgatgcctctggatcggttatggcttttggtgcaaagaaagtaatggttcatgatgtcgttcaaggggaattggaggccttgatctttggagtttctatggctattaatctgcagatagaagggggggtggattttcacacagataactctttgttggtcaagggtctgaaggacaaaacatccccgtcttggcggtctcatttctcttttgccaaactctatgatctgttactttgctttgattattcggttagctggatttctcgtgttttaaataatgctgcgcat

SEQ ID NO: 132959 - DNA, 929 bp, Cannabis sativa
cccccctcccctccaaaagactggatcaagatcaactatgacgtcaaagttggtgtgattcaatgtgtgtggtggcgatggctagaaatcacaaagagtcaatttgtgggtggctaccaaacggatttacttctctaacctgcttattggagaagttgtggcttatttgttagccttggagtcagcggtcctttggaagcattcttttgtcatagtggaaagcgactctgagacagttatcaataccctacaaggttttgtttcagtttggggtattggtaactacgtgactcaatgctttcagatctcgaaactgttgattgggtgtactttttcgtttattatttctggaaactataattttgtggcccataatattactaagtgggcttttgctactaatactactagactagttgatccttcttccatcccaagaaactttttttgtaatgaccatgaggtctaactcggttttttttcatatatatactaccatttattcaaaaaaagaatcaatatttataatatgttgtttataaaattatttagaaataaaataataatgatttatcttgtttacttcatcaagaaacgtaattggaatacttaaattaactaagttacagttaaattataatatatggtaattattttataagatatattttaaaggataaaattgtcattgtatatttaatatttaaaaataaaataaaaataaataaagtcattatatagcatttcttaaaaaaatagtaggaaaagtatttattttcttttatcctttatttaacaaagttttttcttttttaattttaataaaataaatatatcatgggaaattatagtaaatggccccaaatcataggagtatgttagtttatgtcctcatttcaaaaaaatatagcaaatggccctaaatcata

SEQ ID NO: 132960 - DNA, 1254 bp, Cannabis sativa
tctctctagagcttgaagtttctgattcttaaacaattgttgtaatcaccatctcgtgagaataaaaactcgaagtagacgtagccccattactatcacaacatagggggtgaaatactataatttgatgtgtctctcattaattactttacaattttttatattcttgtcaatctagtgagtgggtgtggcttagaagtctagtacaaatttttaagtcaacaaagtcctactgccctttgtcaacattgagctcttcgtacaaacgatcaaccaaacatgagtagcttaagttcgtatcaatcttgaatgtcaaatgtttagctgagttataaacccaatctctaccctcaagctcccaaacaccattatgcgaacacaaaaatagttaaacctgtcatccacagacatttaaaaaataaaattttagtcaaaaatcttatagaaatttgataaaaaaatcctcaaaaagccataactctgtcaagcatcgaacacaagcagacccatatcggaccacatatgataaattccaacaaaaaattgtcagacacaaccatcagacccatccgacataacattggacctgacatatcaaacaaaattctaaggagcatcggacgccatatcggactgaccatcatacctatttagacatcatccctaaccttgaaactgaactaaccatcgggccaccatcagacccgtatcatacattattagaccagacgaaaacaaaccagaaactaaaaaacgcaaaaaacttgaagaacaattatttctacacaaaaaaaaacataaaacaacaacaactaatagatcgagcatcaaaataatattataaagaaaatataacaaccagtaaaaagattaaataaagaaaaatcattacccattgaattcgtgtatgatgctccgttcaaaaatgagtgaagagaatgtagtgtagcttgtacgaaaattttatgttatttgatgatgaaatgagtgaagagaatgaagtttgtgagtgggtaagatttagagaagagagaatagagaatagagaagagaagagagatatggtgattttgagctgtatgtgtattttggggttatacttaatattggccttgtctcttaatgttgcaaaatatgagtttaggggaccaattttcccctagtgtatgcatgaaaagttaatttttttctaagataataatattatgtctaattattaagtaggaatgttcatcaaatcgctcaaaccgcccg

SEQ ID NO: 132961 - DNA, 662 bp, Cannabis sativa
  modified_base (604)..(610): a, c, t, g, unknown or other
ttttatttttaaaggttagctccttctcaaattaaaacatttaatctcccttatatgtattttagttaattatatcatatatttataattaaatgttgtaattttaacaaactattagctttccttcaataattaaggttaagttcaaatgccaacttaaacatatttttttagaaagatagtcttaatatttgaactcttatatttagtgcttaactattaaaactaacaattttattgttaattttttactttgaattatatttaatagtctaaaaaaattaagcttctatcaatttttaatatattatattatgtaaaaaatttaaattaaattacgtccctcctaatttacgaaaaaaaacgtcggccctcctcatataattactatgtagtataattattagaatagtaaatactacaacctagtaattatgttacttcgttggaaataattactagctagagtagtaattatacaatattagaggaatattagaattagtcccacattactaatatatggaaataaattatcataaataaataaatgggctacttctgtcattcactacaaaatatcttacttttagtcacaacaaannnnnnnactaaaagtaaaaaagttgtgacttattataaattattatttctatgttgtg

SEQ ID NO: 132962 - DNA, 1540 bp, Cannabis sativa
atttttttatttgattttttttttaaaaaaaaaactttttaattaaaataattaattttttattttttttaaatatttatttacgtggaccaataccattattccatgtgtacacaatgtccacgtaggatagtacaacatgacacttaacaactaaaaatggacggaaagggctaattgctaacagaatatcagtttaggaagttttaccactaaaattttagaattgagggttaattgcaaataactgaccacttaaggaggttatgccgcaaataaccctaataataataataaataaataaataaataacaaaaaagcatatcacctctgctcaattattagtaattaattatataaatgaatatatttattaatcttatcatactttatattatttatttatttattattaagtgagtgatttttgtgcgtggatgtgaggcatgcaagaaaagcaagccttttttgtgaacaagtttgtgtttgaagagggaaagaatgaggtgtgaggagggtccatactccatagggtccactttggttagctatgagttgatagccaacgtgacagaatcattgttggtttcaagtacctttatgccattcttccagccccattaaaaaaatatgcactgctcttgttttatatttttttttctcgaaaaaatattttgattggcattaattatttgattacgcaattaaaatcgaactttctttttttactttatatttggataatttagattcacaatctatatattttattttgcttttaccagcaatttttagttttattttaccatcatgtaacatgccagatacaaattcaaatacgtagacaacaatatgaaattataagtgagtcaacgagtgaaacaaattcgagaaatttgcaataattattatacagtgatgagattgtaagttgtttatatgagatattgtctcctttggtatttttctattttgaatggccaagtaaaaaaataaataattaatatgtcgtttcctaatattttttttttttaattttaaaattagaaaagtaaaaataatttttaaaaatatgttctatgaactatttttactttttaatttttaattaaaaatcaaattttaaaaaattttgaaaaaaaagttactttcaatattttgttaaacaattttattttcttaatcaatattttagattccgaccagacccggacccagacctaaacccgacctcgactgaatccagttctgaacccgaacctgaacccagccccagacctaaacccgacctcgactgaatccagttctggacccgaacctgaacccagccccagacctagacctaacttaaataaaataaaaaaataaaaataaaaatgaactttatagaacacctaagagtgtgcttagtaatatttttttaatcaattttttgttttttttttaatttaaaaagtgaaaatattttttaaaaatatgtttacaaaagtgttttcactttttaattttttaattgagaatatttttttttttttttaa

SEQ ID NO: 132963 - DNA, 549 bp, Cannabis sativa
tgggcggcggtgagatgtggttcgattggttgagagagaaagagatagacgaagagagaaatggggaagagagagagatggggttaagttatgagagggatagtattaggttttagataaaattgtcacatattttcaattttcatatgtattcaattcgggaaaaaattatccctcaattaatgcatagatattcaaatttccctattatatttatactaataatgtgaatgtggttggatttaaattttataataggatcaccaacaccataactcatgatcttgctatagtcatttctcttgataatgttatggtttggttgtctagatttctttattgtacgattctttgagtttgtgacagacaagttaccatttaatgaattatccataagattaaaaatataaattctgtttaaactaatattaaaaagggaattatctcatatactttttttaaaaaaattacaatttgggtttttaaagtggttacagcgctagttgcagtaggggtttctgtacgattttttgttgcaatttaggatgc

SEQ ID NO: 132964 - DNA, 680 bp, Cannabis sativa
ttttactaaagttattgacacgatttgctttatttctctaaggaaatttttaaggatttgtactgtttaatttttgtgcacttcatcgttattgaatttttgctttaactcaatgatcataatactttgtctttgtttttaaaccagaagaaaatcccaaactatttaaaagaattgcagtcattatttttattaattgctaatgtttttagtgtaatattttcatacaagtttagttcaggaaaagttttcactccacctaagaatatttgagttcttccaacagtgttatgtaggctactatttttgaaagtttaaaaaaaaatgcgtgttcgagctcccttagaagaatagaactacctatctcaacgtatgaaagtcttctctgagtaagttgatactacatataggaattatatagaggatacactaccattgaaaacggctaccattgaagtagtgtgacagaatctctattggctacatacttagaaaaaggttttttgacaacttgggcattgtttcttgctttcactattacacacatatgattggcacaatttttggaaaaaattataaagggaatatactcatttagtaccttgtgtttttatgaaaaacatatttggtaccctatgttttcaataatacttaattggtacctcatatttttaaattgt

SEQ ID NO: 132965 - DNA, 1195 bp, Cannabis sativa
  modified_base (787)..(795): a, c, t, g, unknown or other
  modified_base (856)..(865): a, c, t, g, unknown or other
tttttcggttttcggttttttcggtgtcggttttttcggtgttcggacggtcggtttggtcggtttcttggattttttgctcacccctaccaggtatgatatcaaaaccatagcaggcaaggttaagattactactaatcccttgttgtatttccctaaacagatcacttttgccaacccacctgtggccaccttcatgacaacaaaccccactagtgttgtttgtgtctcacttcccgaagctatgcccttgcttccaatttgaagcccagaagaccataacaccactctcagccatacccaacttgtgggactttacaagtccaacccttcaaatcaagtcaatgacacagtgctttagaaccaaggaaaccctcttccttcaacccttacatgtacccaacccgagcctaccccaccgtctttcacgacgttgctcaatgctactatgagcaataccgcgtgcaaaaggctccacaaataacaacccctactttttccaatacctcacaacattccagtagctctaaatccacctgctccaaatactgtcaagtcccccttcctgcaaatatactcctccttgacactagtaagcgcttggaggccgtgaattgaactttccaacccggggccaccacttctaccagctccaaaagcaaaaaaagaaaaataaatccacccaaaaggaaagttttaaaaggcaagctgaaatggtcaatggtgaaatttgtcaaagggtcaagttgttggaatatattttaccaggacctagatttactaacannnnnnnnnttaacatcctaaatatgaacttataaactatgaaaatatacacatataaagtatgagaaannnnnnnnnngttgtagcggaattaaatgactcattctactcagatctctaacccttgtatcctttctgtcgcagagcataatcaagatctgagcccgaaactcctttcgttgtttagattcttcatagtcttacacactatgattgaggactaacttgctattgttgggcatgcactcaatcactaaagctctaatttgtttgtgaagaagactacaggatttcgaaattagagaagagaaaagaagaagaagaagtctcaaactctctagttatctgacaagaagaaaactaggtcaagagtcattagttggattttgagaccattcttttcttttta

SEQ ID NO: 132966 - DNA, 832 bp, Cannabis sativa
aaaaaaaaaaaaaaaaaataggcctctttttttaaaaaaaaaaaaaaatgggtcttagaaatatgggagccttgtgcaatggcccaagctggccaatgcttgggccggccctgctgtgggtcgaacccttaatccaaaattcctaccactacaccacatattttgggaaggatgttaataaactatttttaccttattttgcaggaaagttatagcatatttagtattgttttctattttttgttttcaaaaaattatttttagaaatgagaataaaaaatagtttttgaagtttttaaaacacaagttacatttggttcgtattttttaaaaacaatattaaccaaaagtgaattggtttttaaaagtgaattttgttgttttcaaaattcttgttttttataactttgttttttgaaaactgtttttaaaaaacaatgccaaaaagccaaattgttttcaaaaataattttttatttttaaaaacaataaacagttttttagttatgatgtcaaacatgcacatagatactttcatttttattattattattattttattttatagaatattgctatgagcatcttgtagtagccaaactaattacaatttttgttttacaattaactagtgaggctatttatgtttttgatacttgaaattacaatttttgtttttgaaattttattgtttgatgctatttttattttttttttattttaaaataaaaatgtgcttggtaactttcatttataagtgaggttaaaaagaaatagttgttagataaattaacaattaacccaagatctatttgtatataacatagaacac

SEQ ID NO: 132967 - DNA, 1143 bp, Cannabis sativa
  modified_base (1089)..(1090): a, c, t, g, unknown or other
aacaaaatttgatgtatcaataacgtgataggttattaaaaagttttttttttattattttatctgttacaagattaaattataaataaatatattttataaaattattttgataaatgtatacaataacttataaataaaccaaataatattttaaacatcatatataagttacattaaaaaaagagtcaaacattaaatttagaaaaaattaaataatctaaccaatttcataagttactaaaaagattatttttatttaataattaaaagtaactaaattatatttttcatatacttatttttatagaacaattttgataaattttggcttcagtacacaattatttatgaatcaaggtgattatacctaaaaaattatcacaaattattttatatttagcataaaaaaacaactatatgatatattttatgcaatttttagcattgtattccatcatataaatgcaaacttgccgtaatatttattatatatatttaattaatatttctattaaaaattataaaaaaaattattaatttttaaaagtaaaagttcttataaatctccggttgacgctgaggaggttcggaaagtactctttcaaatgcatcttgataaatctttttgttttgatggctttaatactggattttatcagaagttctaggatatcgttaataaggatatcattcggttagttcaacacttctttacttttggtgaatttcttgatcatttaaaagaaacgaatattgtgcttattccgaaaaagtataaacccgaaagcatgagtgatctaagaccaattgctttgtgtaatgtggcttataaaattatttctaaggtgctggtcaatcggttgaaagctgttcttcctagtgttatttctaaaactcaaagcgccttcttacctggaagactgataactgataatatattaatctctttcgaggtgatgcattatttgaaaaggaagcaaatggggagggaggggtttatggcacttaagttggacatgagcaatgcttatgattgggtggagtggggatttttacaggctatgttgaggagattgggatttgatnngcatgtggtgaagttgttaatgcagtgtgttagttctgtctcctacacaatca

SEQ ID NO: 132968 - DNA, 2890 bp, Cannabis sativa
  modified_base (873)..(877): a, c, t, g, unknown or other
aacaaatcaataaaaaaatggttccttaaattaactaaataaaaaatcagttatcgaaataactaaattaaatagtttctaaaataaataattcaagaattaatttttgaattgattaaataaaaaatcagatgacataaattaaaatagattcggttccacaacaaaatgactaaaaacaaataacacacaataactcagaaaccgattataatttaaaaatagaagtggttctataacataattaataaaaataaataacacaaaataacgcaaaccggttataattaaaatataaccagttctgtaacatagtgaataaaacaaataacacaaaataacttaaactagttataattaaaatagaaccggttctataacagtgttgtaatgaaccagttttataacaatgttataattaataaaaataaataatacaaaagaactcaaaccagttataactaaaatagaaccggttatatatagacataataaatgagtatttttgaggtagatatggtatgggtataattatttggtgggttggagaatgttgaatggacatttttgtttaaactattttattaactggtttttgtgtgtgagtttttatcttagttgttttacgtaaccagttttttttgttttaaatttttaactagttgataaatataaacggtttctttatattatatttgagttattgtgtggtaatatttgtgtttatttattttgttatggaactggttcttttcatatttatgcctcaatattttttaaaattgatctctatttttttttttaaaaaaaattataaccggttttatgaggtattatgtgttattgtaaaactagttttgtttttaatttatnnnnnagtgttttaggaactgatttctcctttattttttaattgtaatcgatttgaattattttgtgttacttgtttgtattcattatgtatataactggttctattttagttataactagttataatttaattataattagtttgagttattttgttttatttgtttttattctttgtgttacagaaccggttatatttcaattataactggttctatttttgtttatatttgagacatctacttctggtgactttttttcagtaactttttccggcgacaatggcttttccaacgacgatgactttttcgacggtgatgatttttccggtgccgaaagttttttcgacagcttctctggcgccagtgacttttccggtgactttttcgacaaaacttattattgcttacaaatatgggatttccatctttttttacaaaaatatggcataaaaaaaacccatataaatgtaaaaaaaaaaaaacaaaaaaacgccccatgaaaaagtgagattattgagacttgaaccctcaatctcttagttgttaaaacacatatttagaattaaaagtattattatttattttatcactaactgtattttaattttttttttgaaatggtaccttgagcgttgggggcctaaggcggccgcctccttcatctcaactcagggccggccctgcttgtcggagtggtggtgactgagcaagtggtagcgaggacgggttggtttggacgtcagctaagagagagagacattgagatctataaacgagttggctgttatattatattataggatttgatatatattagggttgggacatatggacttggtttaatttttatttagttttctttttattattggcgtcggtttataatcgatggtattgaatttttatcagcgtttgttttgcactgatactcgatttcaatagcatcagttctaaaaaaaaaatgatgttttgacaggcgaaaatgcctttttctgtagtagtgcgtgcaagaaattcacatttacaatagtggaaaatagttggacactgtcaaaagtgaagctaatattgctcagaccaagcttccccaagtgaattgcagtgtctattcttagaaccatacccccgattcctatggtcctcttgctaaagggtttttaagaggtgctccaccaactcatgttccttattaatcaacatcgatgatcaattaatattgattttgtaagattcattttggttccaagtatatattaatatgaaatattcaattttaagcattattttgcttcattcacaagggaatttttccctgaaacaggtaactaaatgacaatatatagataagtaactttagcgttataaggcacacaatggacttacgaaagttcgctctcattatatgatcaaatccaaaagtactctctctcttgatattccaagtatataaggcacactagcttagttgatcaaagaactttgtggaagactaaaaaaaagtagaatggttcaattcttaattatcttcttcaactgatacaaggattagaatttagatatgacccatacttgatcttatttattttcagtatattacaatttaacataaatatcaattaacctaaaatatgtgctaaattgaatgaaataactagagctagaatgatgaatacttacagtggatgtgcagtgagaaatatgtctattttctttcaattttctaacccttctgtccaatatgtagcagcctattatcaagaattgaaatcaaataccaaaaactttgatgtagaggttgtatactacacacactttcatagtaacctaggtaccaactagaataaggtgtgctgttcctcaatcactaatttttaataataaaagagaaataaagctatagggtctactacttacggcatttccaatgaaaaaactcaaatttagtgttaaattaacacaaaaaaactattatttcaacactaattttttttttcaattccaaccacaacactaaa

SEQ ID NO: 132969 - DNA, 944 bp, Cannabis sativa
attaattggggctttaaattttgacatagggtattttttaagagaatagctaaaaaatattattcgtagaattaagtatcgaatctcatataatttaagaaaataatttttaaaaattatcgttaactaattgtaacacgttgcttaaaaaaatagtgagtacctctaatacttaattttaagcacatgtggtaaaatttctcaatattatttttatatgtgaaaatataggagactgtgattttgtttattattttatataaattttgaaagaaggtgttatctttgacttttatataatagaacaaatttcttttaatgcattaccacaaatagtcttctcctctcatcgttgactggttgacttgactccagcaaagcaagcagcatcttctcctcttctttctttcttttgtatttactcaattttttcttctaattttgataatatcattttcctactcatttcccaaatcaattttttctcatcctttctctctctacaataattcataagtgattagaattcctaatgacatgactacaaattcacaccacaacaaatctgaatttttagtctcaaacaaattttgtgtctgacattcttacattattattaaaaagttagtaacaaaaaactaatactcacaaaaatgatatgttaggactaaaattaaattagtaataatttatatttaaatattatatttttttattgtaaaattactttaaatttacttctatttgtaaatttggagtagcagttaaattttagggtaaatatcattttagactttgtgttttgtaaaagttaccaattgaaccatctgttttgttaaataccaaaatagaccctgtattttccaaaattgtacaaataggaccctaaactaattttttatcaatctaaaacttaataaaaatctgatttagagatgttatga

SEQ ID NO: 132970 - DNA, 943 bp, Cannabis sativa
  modified_base (723)..(749): a, c, t, g, unknown or other
agggcataaaatcccaacaccaacatctttagatctaataaatttatgacaatcttctaaaataaccctaaaagaagaaagcatatgtaatgaatttcgaacaacttctattgctaccaagcaatctgactccagctccactttctgccatggttgagatttaatccagcatagcatgtgtcttgtaatgtacttaatggtaaaataaatctcacttaacatactcaaaataaaatataattatcatatggtcattagtgtgatactcacatgataatgatacatcatctattaaagagttgcataagtgtatctctaatggtgatgcatcaaatagattatgtgtatagcttatcgtgcaaaaaaattgctccaacattattttaaaaattgtgtcaaaattgatacaatgcaaaaaaaaaaatatatatatatatatatactaaatttagcacatataatataatctaaaatttatatcattataaatacactattttttgatttattattttggtttttttttaatattttattaatatatatagctataggcattataaactatttacattctgttggaattattttacaaggatctagatttactaacacatgtaaagtttcagaaaccttacagtggttgcagcaaaatttaatgtcttcttccactcagatctctaatccttgtatccttcctgtagcagagtatcaccaagatcnnnnnnnnnnnnnnnnnnnnnnnnnnntggattcttcacagccttgcacaccatgattgagtaccacttgatgtgtttgggcactcactcttttcactttaggattttggttttgaagagagaaagagagagaggatttcaaatgggtagagagaaggtggctcaaaattttactgaaggaatgagtttgcatcatcttttcctttgaggtcatcactacc

SEQ ID NO: 132971 - DNA, 928 bp, Cannabis sativa
tttttttttttttttttcttaaggtaggattctgatttttcccattgatattttttgcaatcttttatcttttttttgctgatatttttcaaatcttcatctattttaaatctacaaaaataaaagataacaagtataaaaatgtgtcaaacacgagtaaaactaaactaaaaatatattaaaataaaactaaattaaatactaaaaataacctaacacaaacagagtttgactaccacaaaacctttagtatagttgttaagcaggcccgacccaagggtggggaaaccggggcctagccccaagccccctaaatttgggagcccaaaatgaacccaaaaataaaaattagtatatataatatgcagagaaaatataatatatacaaatgtaatgctattatttcaccataatggaagtagatatctagtaagtagtgtaattattggcttgtgttgagttcgaaacttaactgagacaaaatcttattttgcttttataattttaaaatccaaagatttttatatataaaatgctagataacatggaccacgatatataaatattagtaaagaaacatgcaatgtacaataaatcattaaatttagaaatgtttttaataataatacaaattttgtagagtaattaatatattatataaaattatgcatttaaactattgactgaacatttattattagtaattataaacatccttaattaattaaatatcaaactgacattctatcaaatttaattataaaaaagggcctcgttttaatttttaccctatgcccctcacttgcttgagacgatcttattgttaagcatgtcaatattaaagtcattcttaccattgtttataagaatattttatttaaggaaatatatttctatttaaagaaatcactactataaaattgggctt

SEQ ID NO: 132972 - DNA, 1164 bp, Cannabis sativa
aagttctaccatctagattcacatattcctatatcaaactagattgcagaacactaattaagcatcaattcttaagttacaaaaggtaaatgaaatattcttattctagttacaaagaaaaacctaaatctagaatttctcttttgatccattcaagtttaactactagatctagcccttccataacaagatctagcttaacaagttgtaactcatggctaagaaataacattcaaataaaatgacaagctcacttaaatgaacaaaggcaagatgctaaaatatgcttcaaaatttatcatatccaacataagagttcatagccattcaagcctcaaaaagtttagctaatgttcaaatcaaaaaataaaatccaagataaaagtttgtcttccatggttgctgccctttttacaaattatcaagtttttggtatttaaagacaagaaagaaaaaaaaaatataaaagaaaagggaagagaaatgcaaacaaatagaacttttgtccttctcttctcttgcacttgggtcccccttctcttttcttcctcactgtactttctgcaattaattaccttcaaaaactgcagctgccctcatgtgtagaaggaggtattgtacttagtctcttttagttgttgggcaaatagggtacaaaatgacaccctaaaaatagaagcccaatccttttgcactttggcccactaggtttagtcctcctctctatatcatccagctggcttaatttttagtgacaaacacgctcatgctgatgtggacagctaacaattaggcacgttatcctagttgatttggaaaccctaatcccctaatctaggattactagaatggtaagcgtaggaaattatacttttatgtaaaatagaatgaaaattaaacatgtaataattgtaaactttacaatcaaaagctacatatttcgggacccttaaaatcttttacaaagtattacaagtcttttcactagccgacctaagtgaaaaatttagagttacaaaagtacaacactggtagaccccaacccgcttggtctagtgtgacccgaacatgtacaagcattgccagactcttgcacttatggctgatcacagactgatttaccctttcctgcacagtagagcacccgtgagccaagcccagcaa

SEQ ID NO: 132973 - DNA, 531 bp, Cannabis sativa
tgatattgacatagcactaatgtgacaattaggtatgcagcaatgccatcattttatttgtcgtgtgacaaaacttgataaaaggaccaatttacaatactatgaatagttcatacattatttttaaaaggctgaaaagttcaaatagcacaataacatagtttgaggataaaatttttaaataacctaaaaatgacaaaaatgaccatgtattttctaaaataatacaaataggacattgagctcaatttttgacaattttttttaaataaccaactaaagataatttttagcacgaacggtgtagaaaacgtaaccagatttgtcataacacatttatatcatgttattgttaaattttattttggcaaaaaatttgttctggatactattttggaaaatatagggttcaatttattattttataaagggttatttgcagcaaaaccccctaaagtaggcagatttttgcaactaaccccaaattctaaaattttggtggtaaaacctcctaaacccagcttctgttag

SEQ ID NO: 132974 - DNA, 559 bp, Cannabis sativa
tcatttaattggaccatatataatatatatagacaaaatgaataacaacaaaatagggaaaaaaaatgcatatatgcatgcatgaacaaatgaggatcagcatatgtgtatttagcctctttacatatctgtatttacaataattataatgtattatttatttagtatatatgaggatcagcatttttaatgcgacaattgttggttttaatctttttctcaattttacaatgcgatttattaattcaaatattcaccattattaattctatttttgtcaattatcaaatgattgagaaaattactattatatatgtgtccaacatcgcttttattcacaattcacaataattatcacttttttttttagaaaaaaatattctcttttatttattttttaatactttttttaagtgatgctgcaaaatactatgtgtatatttgacatcataactaaaaaaatattttttgtttttaaaaacagaaaattgttttttgaaaataattttgcttgtttggctttgttttattttgaaaacagttttcagaaaacaaagtt

SEQ ID NO: 132975 - DNA, 579 bp, Cannabis sativa
ctgtggagatgaacttacttatcactttattacttgtttgactgcgtatacttgcgtatataattttcacaacactcaacaactgatcaaagcgggtgtcaggagaaaaattggatcaggtgcttcaactgaggtgcttaatacaccctggctgttaaatgatgataacccttgtgttgtttcaacacatcctgctttgactgattgtaaaatttcccagcttatgaaagccgattgtaagcaatgggatatggaggttgtttctaatttatttgagcctcgagatattgaacttattaaccaggtccctttgagtcctaatgtgatggaagacaattggttttagaataaggagccctctggtttctattcagttaaaatctcttatcatcatctacaatctgttaatggaaattggagttctaatatggaagctagtttttggaaggtgctgtggaagattaaaatccctcctaaggtgttgcactttgcgtggaaagctctttcgggttgtttgccaactcgttctcaactccatcttaagcatgttcatgtggagtgtaatgaccgctctagtaa

SEQ ID NO: 132976 - DNA, 1165 bp, Cannabis sativa
cgctcttccgatctgagagagagagagagagagagactgagagagatgtttgtatatttcttagtttaggatttatctcttatttcctacataaatacttaaattaaaagaatgtaaacctattattaattctatttcatcttataaattgatccataaaagacaaaaccttaacctagtgaaaagactattttgcccatccttaacacctaattcgaaaataaaacctaagggtattctagtcattttctagtgaccccgactaaaccgatatctaatcaaattctaacaagtcttgtacatatccaatacaactcaacttatatcgccgtgatatttctgaccactctatcaagtttttacggttgccgaacatgaaaatattttatttcaaaaatagtatataaaatacccacataatctgatcaatctttataattaataaattatactttatttattcatttaactcatatttcattaattaactcaaattaacttaagtaagattataatcctactctaatgtcaatataatcacatatttaataaaatatgtccaattaaatattattatattttccaagacattacaccatgtttcatacagaaatctgtgaacatctgctatcgaactacttaccattttcagagacaatcttgtgcagaagtccataccagtatatgacgtttttttactacaaaattcagtactttcttagatgttacggttgtcaagggctaaacttctatgcacttggtgaagtaaattattgcgaccatcgcatattgtactctgcttttactcttaggcaactattcgatcaggtctattccccatacggcaaaggaccatggactttgcatctgaattagctctttaggggtgtgttggggatttttgaaaatctctaggacttatcacacttctttgcgggggcctttaaatcttccatgatagttggctagaaaaatccttgtcttagtattttctttgataaactttgccccgaagcatgattaccacaaaatcctttgtggacttcaaacaaaagccgtgcaacttcttcttttgtcacacatcttagcagtggtatggagaagcctcttcgatacattacaccttctactataatgtaccaggtgttggtattatatttatcca

SEQ ID NO: 132977 - DNA, 1901 bp, Cannabis sativa
  modified_base (1859)..(1859): a, c, t, g, unknown or other
tttacatcatagcaaatgtcgtgccaaatttacatcactttttggcacactattaaagcacacttttttttaaaaaaaaaatgagctatattttaacttttcagcacttatttacacctttattagagatgctctaaaatgtataaatgttgtccataccttataaaagtattttcgtaaataaaatgttaatttatatttttcatataataatttcaaatatatatatatataaggatataaaagttgtattaggccaatcacagtgattttggggcttctgaactaaattcataacaaacatccaaatgtaatatcaataaatatagcttcttcttatcattataaatattttctttatagatatgatcatttaagagagcaaagacataattttttagtggaaaaactatactaactttttttctgacctttttctttatttttggtataaacaatgtcttttttagattatttctttagggaagatttaagtgtacttcatattatttttatttttcaaatatattaaatatttatcttcttcatttctatatttgtcacattaatttcccttcttctaatttttactttattttaatggtactttttatatatgttcttttatatttttttttgaaattacactattaattatttaggatatttattatattatatgttttttactacattctgctggtggtgttttatcgatttaatgtatataatataatagttttttagaaatagtattaatttatttaaaatataattttcaaagtgagatttataaaatatattttcttactataattaatggtatagaattatagttgggtattaaaagctaattttatcagaaaaatacttttacatgaagtttgagtatgggaccaactaaggtaacaggttagatctgtgcgaaaagatgggcaaagactccatccggactactaacctcctgatccggaacgctccatatccaagaagatgtcacggaccagacatgaatgaatgatgaagagcctcttagatgggccattgggatgctcccaaaggactttctaagagacgtcccgaaagctaggctaaagctgacttagcaatcctttgataccaaattctagggggttgtcccctatgtcaaaccctaagagtgtgcataccaccaaaaagaacattctttttgacctatgaccactactttgatactacaatatgcaaatgcagggcatgcacgacatgtgtcgacctcaactagtgccctcttgtacagaaaataatagccccacgagttgggcctcagtccgtgggtccaacgtcagtgtattttatgtatttatcctattagtagaccaggtttatattcagaccctaacgggtcacaggtatgtccatactcgaatcttagcctataaatactacatcataccctcatgcaagaggtggaaaacagtattaaacaatcacaacaacatttagcaatacaaaatttgtcacccattcgaccgcaatacatgtatttacagaacctacttcactacggatgaatttttaagatattcaaactcatctaagcatcattaattaataacaaaagttaatgaatgtacataataaaattaaaaatataaagaaaatgataaaaaaaaaaacagaattaatttctaaacttttgtttctaaacaaattttttagaaattaatttttaaacttttattttaatactctcctatctcattctcattcacaatttataacaaaactattagtttaaatatgcaatatatacatatacaatacatcaaaatatacaatgtaattataatatttgtatatgttgggttttgtgcccnaaataaaactcatttaaatataataagatttactagttaata

SEQ ID NO: 132978 - DNA, 538 bp, Cannabis sativa
tatatgaaacaaccgatgccatagcgtcacccggaacagcgtcggtagcaaatttcgctaataccgatgctgaaagcccttaaaaccgcctctaaagtccaatttggtagtaatgagagcttaaataaaaaggctattcttttaatctttttgccagttaagtgcccaaactataaatagtactgttgaaaaacaagagcttatgataaattttatttcatgtggctagtaaaatattgacatggttaacatgttgttggcacatcttaaataatttaaatttataaaatttattttctgaaatgttagcaattaataaataaaaataaactaaaaataattttcttatttactttatatccataacatatattgtgggatatgataatgacatattagccacataaacattttgctaacaaaaaattatattaatggaaatcatatttcaatgctatcaatatatcaggggaagaaattgattagcctaaaataattaattaatacaattgttataaatattaataattatgtggat

SEQ ID NO: 132979 - DNA, 999 bp, Cannabis sativa
aatgaaggtggtaattatagagtacacatagaccatatagcttttgaacactacagtttttgtaaatgaagatggtgatacatgattgaaaatcattgatacagcatcataagctactgcattgcttgagatttttgtgattagtctcaaaacatatgtaaaagaatagttgtatgagttaacctagctcaagtggtcataggaatgtgtatgtgtgttggaggtcttagattcgagtcctattgtaatatattaacgcttaattcaaaaaaaaaaaaaaaaaaaaagaatagttgtatgaattaggtgtgaaaaaacatgaaggtgctactggcaaattgctatgcttcagaggtgatttgatggagaatcttaaagaatttcctaaagtgcaggactgaaagggaggcaactatggaattggataatcatattttgatcaaacaacatacaaagagagtattttgctttgcaatatagctaatcaagggaaagtaatagtaattggataacttaacaaaactaccatatgacttacgatcttgagtaccaaagattgtatatggaaaaagttgattgtcagaaatacaaagattattagtcttttttaatttaaatttttaatgtgtcctatgtcatggaccttcatttatttatttatttagataactgtatttcataatcaaatatgttcaaactaggcagcaccattcaaaaggtctggctgtatatgctattacaaactcttaaaccagtctaaatctatacttgtaacttttttagacattatggttcgaattcttatttttccattcacttctatagtctttacaattaattacgatagcttttgtgtatagttaattaatcaatttattaattaagctaaaaatcagagcaattttgtaaagaccgcatatggttaataccttgaattattaaataattaagatttatgtatgagattaactaataattatgaaatgtatattttggaaa

SEQ ID NO: 132980 - DNA, 1468 bp, Cannabis sativa
aataataataataataaattaacattaaaaattataaacagaataaaataataaaaaaatcaaaagaaacctaaaactaaacctccatgtcatctgtctcttctcacaggtttaatctccgggggcaccttcgcccaaccccggcaaggcattctaccacaaccgatgaacgagattcccaccaccaggatcgcaagaattagagcacaccgaagcttgttctcgctctcaatctcgcttgagttctctccactctctcagtccctctctttctcgatttctctttactcaaagccggacggagcaaatccggcagtccatggcccaaacaaactttaccgcacgtaacgaagatacgtgtgaggagtctacaagatacttggtgttggttgagatctgggcatcgacgaaatctattgtttgtttaaatctggttgattaggttttttttactggatctataatctacttatatctttgtccacgatgaagattttttttagaattttttgtaaataatgtgttaatgcaacctggtgttgccagtgctagggttgcaatcgcacaagaggacgacgatgatgtttctgagcagactgttgaagtagtgtagaagagaaggcttctagggtttttttttttgttttaccttttttattttcttttgtttattgcatcccaatttgagtgacctaaattctttttcaaggtattatagatgaggattttcgtgggagaaatttattgggtttttttccttcaattttgggatatttgagtagagctttgtttgttggattggttaaatcagctttctcttagtgagaatatttttgagctttaagtgggtgaatggttttgggtgagaaattttttttgagatctttggttgaagtatttttttaggtttgggatgcctctgttaagaacataatggagaacatgatggtgagggagatgatgattaagttttaattaatattattattattttgtatatttaaatttataatcgggtttaattttaatttttatttaatttaatttttttaattttaaaatgattttcaaatattttaatgaattttaaataataaaaattataattaaatgatgtggacccatgcgaagatgacatgtggacacttacatgtcatttaacgtaaagacacctacgaaagtttcagaatcctaacagaaggtatttttaccgccaaaatttttaattggatttttatctgcaaccttgagataaacttaggtatttacgctgcaaatttatgaaaataaaaatataaagcatgctaataaaattatatgtcacgtcaataaaattacaataaaaaatagaatttaaatattactttaaaaaaatatatactgtataataaaaaatacatataccattcatcaaaatatatatactaacaataataaaaaaaattatatatgtatactatactaacca

SEQ ID NO: 132981 - DNA, 520 bp, Cannabis sativa
gttttaattggcaaaggatttgactgaagaaggagattaactattacagaaggacagagttgatcaaggactatgattggattggattgggaagactaagaagatttatattaaatgttactaactaatctctttctcttgtttatttctgaatctaatgtaatctacaaatggacaactgacaaagttggagaagaagaatgagagaagagaattgtatagagagagagagactttccctgaaaattgaccttttcctttctttgtgggtttttagcagaatgagataccaaaatggaactttgtttattggttagtgctggattccagcgcgtgcttctcacgcggcattgctccattgatgtaacaatgcaccccttaaaagggatgtactcatacactctaaaaaaaattttagtctaattttttttttcatatgtacgttatagctgtttaagataacttacaaaattttgagaaattccgaataatttataatatagaaaacaatgttcaaaca

SEQ ID NO: 132982 - DNA, 1210 bp, Cannabis sativa
  modified_base (1167)..(1167): a, c, t, g, unknown or other
actcctcttcttcttcttctccttaggaaggatagtgttgaagctcatggagcctcaaacaattagggcaagtaaatatggggttagaggataagtagagacggtgaaatgggaggggtaaaatgggaatagaaactgaaaaagagggtataaatgaaagattttaaaattcctccgaaacagttggtctggttctccattttcggtctcagatcatcgtcctagtaggaactaggaaggattttaaattttaaattttaaattatctttatatatatatttaatgaaatttagtctagtgattggatggattcaattcaatctaataaaaaattagttaatgcatttaatagtttatatcgatccattcgaatgcatcaacttgatcagttcaaatcagttgactcaattcaattggattgaatcagatgagaaattaaacattcaataaaataattagatttgatcagttaagttcaaatcaaatatacaaattttaatcccttttgagaatctactaaaaaagacaaaataagaaaatgtctcttctatcatttaaaacataacacataattatattaaaaataatgaaataataatatagtatttattttactaaacatcctattccttatagctttactctcataatcatttccatttctcctactactcatactttcttaaactatccattcattcctttatctccttcctacgaaacatacatagctttagatttaggctttgaagagaaaaataaagttaaagctctacttttttttgttactaatggttacaaactttgtttatctagatcaaaattagttttgatattgattgttttgaatttgtgttgctatgaatgtactttctttaaaatataataatttcgttacttgtagtttttttaataattttttttatctaaactattgttttgttattgatagttgcaaacttgggacaccattagtacataatctcattacgaagtgttattatttttggtacaatttaatatctgatctcatattttttaatttaaattagttattataaaaatagataaataacagtataagtacttaaagttttgattttgtaagtgacataaacataataatttttttagcggtataagtacttgttgaccgaggttttcgncaactattaaaatataattataataaggagctgtaagaaagtg

SEQ ID NO: 132983 - DNA, 782 bp, Cannabis sativa
  modified_base (742)..(744): a, c, t, g, unknown or other
cgcccctcaactttcctaatttgtcttctttaagttcaaatattatattttcctttttattcaaaaaatcttaaaattgatttagtaaaaaaaatcttaaaattgaataaaaaaaaattataaccgactaaaataatactaataaaatgaattatattatcctcaagtaataatatgtttataaccaaattttgtcttattcaactcactaatttacttatctcaaaaaaaaaaaaaaaaaactcactattttatattagtatatagtataaaatatagatacactaaattgatgtataaattttaattattacgataagcatatataattaaaagaataatataacatattctaaaaaaattaaaataaaatataaaattaagaaaaaaaattaaaattgattattaaaaaaccattaatatgagaaggtcacgtcatttaaaattggcgtatcatttgtaaggtcatataatataaataatataaagaatttacacaaaaatactaatttgcaataaacattacattatttttttactcttaaaaaatggtatttaatttactctaaaaattaaaacatcttaaaaatattaattaaattttatctttctgttcaatgtatttcgaaactcaattaattaataaatcattgggtgattctacaatcactcacttaaaaatgatatattgatacacctttgacttgtttcggcatccagaaaatttttttagtctaatttnnnttcatattcatgtacattatagctgtttaagataacct

SEQ ID NO: 132984 - DNA, 814 bp, Cannabis sativa
atgatggtactttatgaggtaacatgtataaagtttatattattaaataaatatgacttctgttattagtataattattttatattgccaaatatttatactgacgtttaattgtgacaaatgtgagtagtgatttggatctcatcttatgattaatgtgtgatcgtttgattttgattcttttataaataataatatttgaataataaattatatgattgttgttattacttttcttgttgagtccttgtggctcgtgggtgctaagtggtgcaggtaaatgcaaagaaaagctagttcaaccatgaggtgacattcttcttcagcaatgtacatattaaccctgcccccctgcataccgagttgctaggagttgtttttgggccgtatctgtcatgtattttgatttagtattttgtcttgttgtcgtatttagtatatttaaaaaacttttacaacatggattctcggaacacaattctgttatgatgttcgtttctagtgttttattttagtgaaaaattttatattatcataaattttcataattaaatattttattagtactacactagtttataaaaatatacacatttataggatagggtgttatactggttaactaatatgttaatggcttggctaaataagttttattgttgaataatgattgtatgtggtttgaaaaaaattctttttgttattttttttattgttgtaaatgattctctttgatttataataatagttttttcttaaaaaataaattaaagagtaataaaagaaaaataaaatttaaaatagattaaaaaaa

SEQ ID NO: 132985 - DNA, 533 bp, Cannabis sativa
  modified_base (458)..(463): a, c, t, g, unknown or other
aagctctaaaaatatttagttgccgaaaatctcagtaaacattttggtgttttcattgagagctgaagaaagaaacatgcacaatggtcgtcgatgcaagcctgtaaaaagaagggcctgtgcgagagaaggaaggccacctgaatgcctgttagggtccggccagaggttaggagggtcttggtcagaggtattgtcgagactgaaggcctatgccctcgaccgtccgaagaaggtgcagaagataaatgcatacgatcttaaaacactcactgtactcacgtttgcccctaaaatctcagatctggccagtaaactccctagagagatgaccggccactagcatcctcaagctcgtgtcctccgccgtccgctacggcataactacgcagacacgacgaggtgcaaaaggtgttggtgttggagattttcttcccaggatctagatttactaccannnnnnttgtttaacatcctaaacatgaatttctaaaacaatagaatttattcacatataaagttcaagaaacctt

SEQ ID NO: 132986 - DNA, 713 bp, Cannabis sativa
attacaaccaagagagtaatccaaattattaaaataaaaaaacaaaaaaatcgtaaaaatagataaaagttagaaaatagtatacaatttcttttttttttttttttctattttattctttcagaaaaaacataaaaataactgtcagtatgtttttttaggaaaaataattaaataaaactataaatgcatatttttataatttttttaattatttttgggtatttgtgaaaatattcctttgaaattggattctttttcacgaaattgagagcattcagtactttggataaaacttcatacatatcagatcagtgcttgcaatatatagtgtgaagacatagacatgaaataagtaatatttccaaaaacaatttattaaaaaaatgtatatttttaagagaaactattattgatttgggcctggcctctggcctagcccaagacccaaggccggccctggaatggtaaacaccatttactagtctgagcaatgctcatcagaaaaagaactaaactagtacaactatcagaaaaagaactaaactagtacaactacaaacataaaaaagtacacatcattcataaatcataataaccaaacaaaaagaaagagaaaatagtttgatgaatctgaaacgcttcacactacacatagaggcaatccaacgttccagccaaaaaaaaaaaaaaaaaatccaaactcaatagtg

SEQ ID NO: 132987 - DNA, 563 bp, Cannabis sativa
ttttttttttttttgtatatacttaaaaaaagttaaatttttttactaaaatttaatttctaaacattgagttaatgtgctgtgtaattgtattatttatatatattaatttggttaaatagaagaattattaataaataatttagtgattttattttattttatttttattaataatatttagtgattttatttaagtagctaatttcttttattgtcacatattacttttttttgggagaacattgtcacatgttaattaatagaacacatttgtgtttgatacaaaacacaagtgtagaaatacaaactattctatttaaaatactaataattaaatattagagtcttatataattacaattgtgccctgttttatttttacaaattttatttaatattattagcataatattttaatgtggaaatacaatcagttttctatattcaattaaactcaacttataactagggttgtacattggttgatttagtcggtttatactatatattttctaacccaacgaaaagatcgggttgtaaaattctacatgcaacctgcc

SEQ ID NO: 132988 - DNA, 720 bp, Cannabis sativa
tgaggagatatcacctatttgttatacattaaaataataaataaataatttgttaattagtctccaagaataggtttataataaagtttatctcctattttcatggattgttgaagctcaattcgttatttgaagtgttgtccaggatgtaagctgcagagacataacaagtgcctgccaggatagaggttggccagcctatgcaagccatagggtcggctaagggagtctagccagaacccttaagctggtcagttagtggtctcgttgtatttagactccctgtcaattcatatgttgtgtatgatcatttggccttcttgctgacaaattatactccacgtggcatcaatcttgtatgcatagacatgtcacgtcatgtagataaaaattagaataatatataaaaatatttattttaaaaaaaaataatatatacaaataacaattaatctcaatgtacaaaaagcataaccaattcgagaccccttctttgtttattttttctttttctacggccgttcaaaatttgagtactcatcaatgtatgaagacaactttataaggaaatgaatcatagtgtaatttctaaattaatttaagccctataatggatttgtaaattagtattttttttattgcatgtataataaatgtttcgtaattatgtgtttttttaaaataattataataattatattaaagggattatttcacaaa

SEQ ID NO: 132989 - DNA, 602 bp, Cannabis sativa
gccaacccccttttgccaacgcataacaagtaaattctattttaccagtgcaatactaacttttgctagcacaaaaatgtgctagcagaaatgatatttcttgtagtgtgacttaaccactgttgttgaagcggtaagaaattaatgttcttcctcagaatattgggataagccgccaaactgtcaaattaaaaaaataaaactaattaagaagatagtacttttatatgtttgtatatttataataaaaatgagtatatatttactttttctttatgactttaataggccttgaatattgaagcatatcacgaatgtaagttagttcacagttcccacattcgtaattatatggttgttttggacaaacaaaaggatatatctgcggtccctttgggcaaaatacaatagtatttgaactaatatttacatatgcactattaaagacattaaaaaaaaattataagttaagcatttagaatttattaattgatgattatattttaatgaatagcttaaagttctaaatttacgtctttatcatcttagcaatgattgacaggattttagatttaagcgggtttaagaatacaactcttccc

SEQ ID NO: 132990 - DNA, 1277 bp, Cannabis sativa
atgcattaaaattaaactataatatatcaacataatctaaccagccaaaaaaagaaaaaattaatacatgaaaaataaaatgagtagaagcaaattaaatatccctaaaatatttacatacactgccacatgtaaatgcattaatcataagtcaagagaaaggaaaaaaaagaaaaaactcggcacaaagacaagtctcaatacttcctctgtgtgaatgaatcccacgaccaatcccagaaattaaaacacacatatgaaacttagaaactatataagagaagcaatcagataaaatgtatttggtttattaggaagatcttaaatacccacttaatggtaacagaagaccctaaagtacaaaaacaacaccttaatttacaatctatgggaatgcgatctaatccatgcaaaaaattcaaaatccgggtacttttaatctacttcatcaagaaaacttgcatgagaaattgagaatttttaaaaaactttgaacggattgagaataaaaattggattttagtttattgtaaacgaaatcaacaaataaaataaatatgctaaaaattgaaggtattcgatattcaactaggaggattcaaatcaataaacctaaatctcgcattcgcttcgaaaccatcaaatccgccaaataaacaatcgaaactagcaaattgagaataaaaatttgaaaaagcgaaaataaaacaaacaagcagatggagagaatgaaatacgtttggaagtgcaggagtgatcgggcggttttgaattagagggaaggataacgtcgggtagatcgaactttctgtcagccatgggaagaaggagaaagtagagagaaagagaagggatcgagagggagagagaaatcagagtgtttatttgtacagagaagagttgcagagtaagagagagaatagaattagaaagggttgagaagatggagagaagggtttgattttgggttcaataggttgtgttgtgttcgcaaccagccaaactaatcttatttaaaaataatgaatctttaaccaaaaaatttaaaaataaaataaaataataaaaatcattttttttctaaaaaaaaacataaaaaatgattaatctttctttcttgctgataattaccataacgaaaaatatttgggataacctcaaattacacctcgtataattaaagagtgatatattctcacttaaaaatataaacagttaagggttagtttagtacggcatattacatcgtattgtattgtacagtattatattgaatt

SEQ ID NO: 132991 - DNA, 1027 bp, Cannabis sativa
tatgttgtattatttaatacataataaatagtatgtattagcttgtattataatatttacaaaggatttggggtcaacaccaatctctgacccggttacgaacccagacctggacccgggacccggacccggacccgaaccccagacctggacctgaacccgaacttggacctggacgcaaacccggactcgagacctagacccggactcgaacccggactcggacctcgacccagacttggaccccggacccggacccaggacgtgcacccaaacctggacccgaacccgaacttggtacccaggacccggacccgtagttggtattgggatcaagtgtattaaaaatatattataactttacacaatcaattaatacaagtcaataccaaacattgtattgtattaaataatactaatactaatacaatacaatacaatacaacacaatccaacacaatacaattcaatacattacaatactccgtaccaaaagagcgcttatagttgattgtaagaataatagtgataaaatagaaattagaatatttagtattcttatcttttaaaaaaattatacttttttatagttattaataataatctttgaaatataatttttataataacataatctttttactgtattttatttaattttatcatcaaataaataaagttagtagttgataaatttatacgtatagggctcgtttggtacgccgtattgtattgtaatgtattggattgtattgtattaaattgtataattttaatacaatactatttttggcattaaattgtattaatatattgtgttaaattatgcaatgtttggctcacattacattgtattgtattaattataaaaatttgcaaaaattcaaaaaaattgaaaaatatcaaataaaaactgaaaaaaaattgaaagttaaaattaataactaaaaagaaaattaaagacaagatttttttttttttttaaaaaaaaagaaattaaaaagttaaaaaaaaaaaataaataaag

SEQ ID NO: 132992 - DNA, 908 bp, Cannabis sativa
aaagtaaaaaatccgcttgacagtatttttgtaaagaaagagcaaaaattagtataccatgtaaatttcctaaaaaattaacccatattttattttttaatttacggtttgagttgctccagtattaatttctctaatgatttctacgtgggttgctatacatattttagttgcgatttaggttgctccgttaattactataagaatttttgtgtaaaattttataacaatacaaaaaaaaaattaaaaaaaataattacatctaaaacaattatattaaagttccatttaaaaaaaaacgattatattaaatttcaatatgtataactcaatactatttagctatgataggcatttgtatttgacattgataattttctttgataattagtaatttttcatatttaattatagtgataatacttcaattatatactaaaccctctcaagtctcaaaataagggttaatcttattgactaataagactatggtgcgtggtaggtgtaaagtttgttctttgaaattaaaacaagtacaaacagaagtcaaactgttgtagttgtagactttttacgaactacaaaaaataattaggttcattcatattgagaattaagatttacagatgttacaatatttatggtaatgtatatatgaatgataccgatataaaaaaatacaagataacctcttttattgttttaatttttttgaaatgcgtgctcttttattattattctaatttttactactgtattattattgttattattattattattataagaagctgcttgaattatatatatgaattgaaaagaatttttttctctttttttttttaattaaaatatcagatatctttatatattaaaagtgtctatctaacggcatttcttggtttaac

SEQ ID NO: 132993 - DNA, 1966 bp, Cannabis sativa
aaaaaaagaaaaaagaagaaaaaataattataattattttacatttattttgtttaaagaaaacccttgtctttgcagcattgaatagcacccgcaagcatttcatcaaggccgaatttgaacttgaacccagtttccaaaagcttcattgaggacagactagaatatttcttcttatcaaccttaatttcttttaaatcactgaaccaataaaaatacataaattaatccattagggggagaagaaaaactagaaatatatataaataagttgattaacaatgttaaggccaaaactcactctactaatgataaatgaaattctgggtatcttgttgaaagagaatgaaacaattcgtgaatggttatatccgtcgaagaacaaatgtacctccctgctttcgcattagtactataatgtttctctagaaaaaagatatgcgcacttgccacgtcatctatgtgtaccatatcaaacttaacaaaatgtttatatacatcctggtttcctgccaatttatatatacatgtatatgattaattaatgctaatatatattatagactatatttatagtaatataattaagaaatgtattaattaccaaaaatcatggcgagtggaaagtaaacggaggaaggtattttgggacaaataaaaggtccaaccaccaaaggaataaccaaagtaacgagatttaatccatgcttctcggcaaaatctagtgcggttctttccactacagtctttgataccaaataagaagagcttactctatcattattgctcttacgacgacaaacctcgagatcgctccatgtcgtttcgtcgcttacgcagctagggtcgttgtcgttgaacaaaaccgttacggcactggatgtgtaaacgacacgttttatggtgtcagagttggcgaggcaagccttgaggatgccaagtgtcccttctacggctcttctggtaactatttcttccgtctcttttccgtccacgttcatgggatgggctaaatgaaagactcctacgcacccttggattgctctgtcgaaactctctggacggtccagatctgcctcaacaatctctaatctctcttttgcacctggtaggcttgtgaggtagcttatatctcttttgttattatctatatatatattatataccacataacataaatttaatttgatcataaattattaactgtacaatatatataattgaaatttaattatatatgtgttatttatatacctgatgagtgagatctaacggtagctcttattgagtgaccatgttgaagaagtctcattatgagccatgaagccacataaccagttccaccagttacacaaattgtgcctctgccttcttcttcttcttccatatctaataatttttcttgtttcttgtcattttatataaactggttatatataaaggccttattataacgtataggaagcttaaaattaaaggaagtcaactctcaccggattcaactcaagctgtatacctgatttcctgtaatattacatgtgcaatttcttattttcgttcctcattaattttattttatttgtagtgcgagaacaagtctagaaaaagcctccaaaactaaaaaggcaatgtataattattataaaataaaatttttatctgtttatataaagttaaatactgaaaactgatgtactaattctacaatgtacttactatttgtattttctcatttttttatataaaaaatatcaattaataaaaagtatgaactctatttaattcttattttctagttttttttttctttttaatttatagttaacaatttaattaggatgaaatttttctctcttcttttttaattttacttttttgttttgtaatatatggttattatatttaattaatgataaattttatctattttatttcttgtatgattattaaataaggaaattaatat

SEQ ID NO: 132994 - DNA, 1050 bp, Cannabis sativa
  modified_base (606)..(622): a, c, t, g, unknown or other
  modified_base (729)..(738): a, c, t, g, unknown or other
  modified_base (829)..(833): a, c, t, g, unknown or other
  modified_base (911)..(917): a, c, t, g, unknown or other
actaatcagattgtaaagagttttatttagggcataaaacccagcagtacatccatcaagatacactataaatacaaagcaagaagaaaataaaaaaattaaagtaacttgagaacctactgaatcttctttgttgcgggagtacaagtattttatttttatttgaatatttatttaaattataagaaaaaaaaattagagaaaatagatatagagaaatttaaatcaaataaaaaagaatatatgagagaattaaggagagattagatgaaggtaaataaaataattttagactaccacgtcatcgctttatacttctattatatatatatcttgataaaattatttcaaaataaattatttaaatgatgttgaagaaatatagagaaactgatgtatgatgttgttgacctcgtttttagccaatgataatgagtctaatttaataagtgataaatgatttataacaatcgatatataataaagcaatatgaagacacaggaattttatagaggttcagctccgagcagttcggtaatagtctaatcctcgttacttgtattgacttaagaacaaggagtaagattccttttcttatagctctnnnnnnnnnnnnnnnnnatatataattcttagataatatttgtagggtataatttcagctaaattgtttgcgacccttttcccagtgaacatgcatcactatttatagggctagtaggcttggnnnnnnnnnntttcccctctcgttacaatgtgtataaacagaaagatcgtatgatcaatgcttagtacaaggatcgtgagattgaggctgaatacactgannnnnggatcgtgtgtatgccatatccatgtagtctgatccctaagttatagggattgcattgatgactcacgatgcgaaagnnnnnnncgctaagtgttggttgctctgcgtagattggtgaagactttgctctaggcatgctagcgagacatcctgctcggactatgcttcccgaggagatgctccaagtggatttcacgtgtcaccattcatgtgatgc

SEQ ID NO: 132995 - DNA, 576 bp, Cannabis sativa
ccgccaacgccgccgccgccggaaaaggaagaaaccgcactgtgaggcggcgaagcttgcctatacaaatccatattattattattaagtgtttcgtcgtgacaagtagtggtaatagtagtagtagtactaccacctttgttcacatcaatattaatactactaatgatctttctggctttattgtaagggtcaccgccggaaagacccaaagttaaagaaggctcaaatgaagaagaagaagtggttgtggtcgttgatggttttttggaacaagtattattagctgaagctgtgaaccctaaacctaaatctaggcctgtattacaaagatcatcgaaccccatttggaataatgataataaaaagaagaagaagtaattttgatcaaaagaattaaggagagaaagaggggaaaagtggaagctgtgtggagaggtaatttgtttttgggttgaatcttgaaatgttatggggagcaaaagggtcttaagaagagaagggaggtgatgaggtgagaatgaatgggactaattttttttaattttttttttttttttggtgtgggggcatttg

SEQ ID NO: 132996 - DNA, 657 bp, Cannabis sativa
tgtttatttcgtcccacaaatgaaggcatacccaaatatttagtgtgattttcaactaagttaactcccaattgagcagccaaaataccagccgaaactgatttaattttgctcccaaacacacatttcagatttatcataattaatacatttacccgatagatgctcgtacctatttaaaaccactttgatcgtcttgcaatcttccgaagttgcatcaagaaaaacaaggctgtcgtcggcaaaaaatagatgggaaagcctttgatctaagccaccgaacctcaatccatgaatatgaccagccctttccgcttcatgaataaggcaagatagcccttcggagcaaaggagaaagagaaaaggcgaaaggggatccccttgccttaatccccttgtaggccaaaagtgacctttgatagagccatttagaagaattgagaaagataccgatctcacacaattcattatctttttagtccattcttcctcgtatcccaagcaatccattatagcctctaagaaattcaattcgacgcgatcatacgccttagacatatcaagttttaaggccatctttctcccattcccgaagcgaccttttctcatgctatgaagactttcaaacccaatgatggcattatcttgaataattcg

SEQ ID NO: 132997 - DNA, 1224 bp, Cannabis sativa
tttccttcaaaataaggattcaaattttttttttttctaaagctcattatatttcagaatcaactctcctcaaagacctaattatatttcatctatatattttataaatccttacaatattgttcaaactattctatatccatttgtttcatcttttgtggcaaaattgttagaattctcgtcttcacgcacctcattacaaatttcaaatatgttagtatcgtcttgttccaaaaaaaaactatttctactcctccaaatatcattgtaggctctgtatactaatgttgtggcaaacacctgctaccgaaacttgaacatttatacccttttaatagaccctaggagctatcgaagaactggtcgttccagtggttttctagcctaaccgctactataaaaaaaattatctttagtgataacttttttgtcacaacatattttttttgtaactaaatgtgatttttaggcacaaaaaaaagttacttgtgactaaaatataatatttagatacaaattatcactaatttacttttagtcacaattagtgttgtgacttataatcacatttagtcacaacaaaatgtgatttttgtaactaatagttttagcccacgaatctttttatcataacgtgaatgataatttataattagctagtcataatttttttattttagtcacaactcaagatatctccatgaagtaacacgatcaatagtttcatcaacttgatcataaatcatacatgttccatctgaaacaatgtcgaaatgtagttttttattttttatttgtaactaaaagtaagattttaatctgtcttttgtttattcataaaatttatgatagatgaatgagtgaccgaaatagctacgtacaaagaaacaagaaacatcattttgatcatgtccgttaattcaaaaaaaaatagaacattataattctccattatatagatatacgtgtgtaatactttatttttgaaagctatatatgtgtaatattaatcatgagaatacattgtgtttaatttattcaggctagcttttaagatgaagcaaaatattactttgattaatataatactatatatatgcgtgtgtataatatcaaagtcaaaccctataataactatgattcaagttctcattgataagaacttcttttaacagtgttcacattactctttagtttactaaacttaattaacttggatatata

SEQ ID NO: 132998 - DNA, 835 bp, Cannabis sativa
acaagagggcaggtcaatgacgaacaaacacagggcctcatagcgccacaagcactgtctaacatgccaactagcatagaagatctctgttatttctcttgaaatgagaatggtggaggcaagcgcaacaacgatgggactgactaacataatggcaaaagagggaaattcaacaattcccttatgtcgtgaagcccaacagagaaggaggggaagtgtgcatgactcactgtacaagaaaaactccaaaagtaaagcatgcctaaatgtcctagtagggtaagtcagcaacaggcagtccaaatgcgcagctcggtgacaaagtttctcagccatatgccatgcttggatgcctcataacatgcaacaaactctactgccatggtagatgatgcactactccacaatattgctccaccacctaacaaatatatgtagcccgaacaggatctcctactatcttggcatcccgcaaagtcagagtcaaaatatccaatgatctcaaagttatctaacctcctatatgtgagcatggaatctcttattctcttcaaatatctcataacctttttggcttctttctagtgatcaattcctggattgcttaagtatcttcctaacactcaaacaatgtacgctatatctttacgcatacaaagttgcgtatacattagactcccaacagctgaagcataaggaatcttttgcatttcttgaatttcaaggcttcctttacgacattgtttaagacaaaattagtctcctttaacgacaggggtatcacctggtctacaatcttgtatgccaaaccgtttgagtactttatcgatatagc

SEQ ID NO: 132999 - DNA, 1309 bp, Cannabis sativa
ccggtccagtcccgagtcccagtcctaggctgggtctggtcctggtccgattcgatcccggtccgagtccggtcccaagtctggtccgggtctagtcccaactccggtccgggtatggggtcggggtccgggtctagatctgagtccgagtctgggttggtcccaagtctaggtccgggtcccgggtcagggtccgggtccaggtccaagtctagggtcaagtcttaaattaagtttttttaaataaatttaaatcgggtcgaatcagatctgatccagaaaaaaattaagcgaggcggagcagatctgacccgtatcatgtttcggatcagaggtgatccgccggatcggagctccaacccactccaactaaatggatctttttgacatacctaaacaagagaacgattcacagccaagaagaaatgaagagattggtattaccacatttgtaacaatttgtaacatgcctgacaagaagggtctgtattggaatacatgaagcaatttgttaagttactgacaccattaaagattgtagaacctctgtgcaacttagcattttcatgaatggtttactccctcctttaaaagttgaattatgaatccataggccctgaaacgtggacaaggaaatagattttgttcaagacattgaagaaaaaaatagagcgttcaagtatcgatatttttcctctaattgtttggtgcaatctaacctatccgcaagagccgtggaagttcactgattcagatattcaactcaaacaacaaaagggattttgtttccactatgatgataagtggtcactgagacattgctgctagaaaagggagctacaagttatcatggtacccaaggacaatgaagaaaatgagttcattaatcaatcgaaggatgggggttttgatgccaaagagttggacaccattgaagtgcacaaatcaatggaggtattatcacaatccgagctctaggttgtagcagatatgtaatatctataacttgggtggttaaatatcacactttaacccttgttggaaaataatacttacaaatgatcttttaatttgttcaacaaaattatataaaatatatatttaaaataatagactaactataataaataaaaaataattataataaaattagactactcattaatatatatatatatatttatataacaatgatatttccacaattatgtagtgatcagagattgacaatttaggcttagttgttggtttgaaacttcattatataacattgttaggaaaaaaaaaaaaaaacttcattatatataaa

SEQ ID NO: 133000 - DNA, 633 bp, Cannabis sativa
ataaaatattcatttatcagaatcaataatattattttatttccttaattagaaatattctaataacatcttcatcactcttgtatggatggaaggaagatgcaatactcatgcaacaaagattgatgtggttgagcaatccaaagtttagtggaggggttaaaaaatctatagtatttgtcatatccaatttagtaaaaaaaaaaataaaaaactttctatgtttttccactctaacaaaaaaaaaatactatttttacatatttaatactttagtgcttctgagatcttaagtacatgtagaatgaaagaattcaggtccttttcagggtttaagaccctttatatagtgttaggattttacgagttgttattcaaaatgttgtaaattattatatattatatattatataataaatatatatatatatttcaaataaaaaacgtggccatttaattttatagacttggtagtatatgtatgtgtgccacttaatttttgacttggcaatataatggagtttattgagttcctattaattaggatcaagatccacctttttctttcagattaaaaagcaacgttcataatgaacgttatttgctttgtatgtatatatatatatatactag

SEQ ID NO: 133001 - DNA, 874 bp, Cannabis sativa
tgatttttctatcaaaaaaaagtactaaataatttagagaaacaagcaaccacccctcaagtggtgttgcaaattaatatgagtttcacataatttaatttaataaataatataagaaatcgttaattaattgcacaatacgctatcggtatggtgttaaacatcatatggtacttaatataaaaggaactgaatttgtctagtatcgtagtttcttgttcttttggattgtgcgtatttacattatttaataattaaatttcagaattaatactttaatttaatataaatactaaaattttattctaaactttttagggtagctttatgggtgtttataaaatatctaatccgatcaaatctataaattacgggtccgaattaaattgaaaaatctaaaattcatacttgtgtggatggtgttagttctatttttggcatctttcaattgacaaaatattttataatttaattattatttttggctgagttgtttagtttgtttccttgattttgtttttatattgattgaattatataaggaatgaaataggattagtttttctatttatgtaaagtaaggcataaagtgtaagtttgatgactcaactattttctatctatgctactgtgtatatctgatcctctgtgggtttcctaaaatgtttgattggatttcttgtaaagaaaatcgaagcaagaccttccttttctataaaagaaaagtcgcacttgctactcacgattctataggtacaaaacaaaaaatttctagcctaattgaagaattattttaggaaaattttcaagtgagttgtggtcttgttcagactgtgtatgacctgtcaataaggtatatattgattataaatac

SEQ ID NO: 133002 - DNA, 1480 bp, Cannabis sativa
gtgtagccgactttgtggctcactgggcaattcaatctgggcagtttgggacaattgaattgaccaattttgtcagttccctcccgacttgggaggcagatggctgaatctggatttacttttttctggtttttttgctgttgtttgttttcctgttttttctgtcctagttcgcttctagcagggtctgaacccttagtttttttctttagtttctagctgtttgttttgtgtgttctgtttctctctgtttcgcttggtgttgtgttgctcctttggaggtaacagttatcaaaaaaaaaaaatgagtgagtttcttgccaaaagaaaaaaaattataaagattatttcacacaaatagacaaaaaaaaatcataaaaaattataaaaatacagttgttgagaattttaaatatttttacgatttttataattttatttatagaaaatacggtattttgatgttgtactcttattaatttgtttaagattgatttatatgttattttttgttattcaaaatgttattttcatattacttttatgtagttttcgtattgtttttatacaatgcagtaaaaatatatatataaaaaaaaatctttgaacgtaaaaaaaatataaaaaatttataaaaaatagtgtattatataattatcccaaaattataattgcacatatcattacccttaaaataaaataaaaataaaataaaactatacaacatataaaataccacataaatgagctctcaattcaatattatatatatatatatatatatattttatttcatcatgtgcttcttagtgtaagaaacatcaattttttttgttaataaaattaaattaatatatataatataaattatatatgaaaacaataatcacccaaaaacaaaaaagaacatagggccatgaccaacccataacccaatatagtttcgccaatgcctccaaccaaacgcaacttaacttctatcttgattcaatttgtgggtaacaatagtaattaaggacacttctttttataactaaattgtagagtgattgattttgattagattcatcataggtaataatggctagtatttcatatttagttagtctttagttaggatatgtgcctattaatttacagtttgattgaaagaacctaataaaggtatgaatgatcagttgaatataatcgacaccatttaatttgcatgcaaatattagggaactaataataattattatattataattattggattaagtttcgatagctacacaatgtagtaagaagaagagatagtggggagcactaactaaggattttatatttttttttttcttaatttaggtgccattatccttttattatggtaatacccaatattagagatatacgtatacttcatgtttatgtaagtatcataaattcatagtaatatatatagggaaatttgattttctatacttagaaaataaaaaaa

SEQ ID NO: 133003 - DNA, 1298 bp, Cannabis sativa
atcaaacggaagctcccttggtgtgaaagtgaccttttgcccgccagcttgtgctcagatactggccggccatacaagctcaccctagctgggctatagacttcccttggcccaccagacatgttggtgcagctccttgacagctcgattagttcctttttcttggtgcttgacgattttgccataccttgtaatgagaccttgtcttgctattggcaaggttgttttctacctgtactctatcttggcttatgtgggcatgccacgtcaggtggaaaaatttttggataacacatacaaattagttttggaggtaatcaaaatgtatctcacattatgtgatgcaaagatgaagttttttttatgtaaatgtaactaattagtttcttttcaccactattagtaaccataaaattactttaaaaaagtaagaaaataaataaaaaaaagacgaaaaattaaaattttatgtcacgtcaatcacatcaaatatgtcagatttagttgatgtggcacatccgtttagtagtaatatcattactgttgattaggtacaaaaaaattaattaccttgtataagcttgtttgcttatcctatttataaatagtaaagaaaaactatactataagggctagtttgaaactcaggattgtaaaagaaatgattagatttgattagactggattacatttgattatggtgaaagtaatcttgtgtttagttatacaatggattagactattttaatttttttttaaagaaaagtcaattaaaataaaaatatataataataaataaattaaattaaattaagtaaataatttaaattgtaaagtaaaataaaatattatttttttagaaaaaaaatatatcatatttatttaaatatatatgccaaacataactatatttgtgataagataatttatcatattattatttaataaataattaaaatactaaaataaaaattcttaaataatataaaattatttatgttaaataataatttaaattaatcactaacatgacacatatgctacttttttaatattttgatgtaaattttttatcccaaattttacacaaggtgacgtggcacttaacaaggtgacacatgttgtatatgtttggacatggacagagtataactatctttagtcttgtccagaccgagttagagctaaattgagtaagtttggactatctacaaccatcattcaaattgatcgcaaactgtgacagtcagtagtcccgtgatccgtaatgggaaataccgggtaagttgtgcaatctc

SEQ ID NO: 133004 - DNA, 1497 bp, Cannabis sativa
  modified_base (162)..(171): a, c, t, g, unknown or other
ccggacccatctcaaattatttttcccctctagtcatagtaaattcatactactaagacgtgaatatgaaaaaaaaattgtgttaaatttggttaaaataccccctaattcaaaaattgaatatgttcttatttacagttaaattttaacaagtttttttcnnnnnnnnnnactcgttagtgttctcttaaaatcacaccttacacatctcgaaaatagtaaaatttcatagggagaaagccaaactgttgtccatcacttttttattggacactttaagaggaaacatagttttcaagaactaacaaccataagaaaatcacaaaattctgatagtggtacccctttgtgaaatgtggctcgggcccatctcagaatatttcaggtaccaacaatcatttttttcaaaataattaaaatctcacatttcgaatagtggtacccctttgtgaaatatggtctggacccatctcggaatatttttctcctctagtcagaatgaattcgtactactaagatagaaatatgaaaaaaaaaattgtgaaaaatttggttataatgccccctaattcaaaatttgaatatgttcttctttttaggtaaattttaacaagtttttttttcttactcttacactcgttagtgttttcttaaattctcaccctacacatctcaaaaatagtaaaaattcacaaggagaaagtcaaacagttgtccatcacttttctattggacactttaagaggaaacatagttttcaagcactaataatcattttaatctaaatacagaaaatctcacatttctgatagttgtacccctttgtaaaatgtttctcgaaacccatctcggaatattttttcttactagtcacaatgaattcctactactaagatgtgaatatgaatattagtttcgcattaaatttggttaaaatggccccctaattcaaaaattgaaaatctcacatttctgataatggtacccttttgtgaaatgtggcccgaacttatcttgaaatattttttctcactaattataatgaattcatactaacacttgaatatgaatattggtttcacgttaaatttggttaaaatgaccccctaattcaaaaaattgaaaatgttcttcttttttagggtaaattttaacaagttttttccttactcttacacctattagtgttctcataaaatctcactctacacatctcaaaaaatagttaaatttcatagggaagaagccaagaccgatgttcatcacttttatattggacacgttgagaggaaacctagttttcaaatactaacaatcatttttgtcgaaatagtaaaaatcacacatttcttatagtggtacccctttgtgaaatgtagcccagacatatctcagaatatttttcccactaatcacaataaatttgtactactaagacgtgaatatgaagatttttttcgcgttaaatttggttaaaatgcccctaattcaaaaatt

SEQ ID NO: 133005 - DNA, 966 bp, Cannabis sativa
ttaaactcaggttcttatttttactattttggacaatacatgatctattttatcatttaccaaaacagatggtctaatcgataacttttacaaaacacaattcaaaataatttttatcctataaaatttcttatctttttttttttttgtgaaaaaaagcatactctcatagataaaattggttaaatctcacgatcattacataatatatttgtcggaataaaagttaataggataactctaaacctcttatgggtaaatgttcacttagccacattatgagcggcataattaaagcaagtataaaatttcttatgagtctttggaactttgcaagacatcgaaataaagataaaataaagatcacatgtaaatatataaagaaagtacaacctgagagagcagagagtacaagtagtgagaacacgtggaggggttcagctggaacaaataaaaaacagtgagtcgtaagtggggcccactcagttcaaagccaaagtcacaataatacagcacagacagaaaagactctttactccctgacaaacaacgccacgtcagcacacacgtgagagtccccatcccactcccacttgtatttttacattaattaattaaatgtgagatttaatctacaaaatagattaattaattaattcatttctatgtttatggttaacctaatctttttgtcgaattaggaaagcgtttagaatttttttcctttctttatttctatttttcttctttttttttttcaaaaaaaaaaaaacatttatgctatataaaactatttcaaataattacactaatttaatgtaaaatccactcaatttcattcaagtaaaggcggaataaatcattaaaacaatataatatataaattaagagtgtccatccaatctaatccgcactactttgctcatagtgcattcaatccgcactaatggcatgtttacttaaagg

SEQ ID NO: 133006 - DNA, 744 bp, Cannabis sativa
  modified_base (238)..(254): a, c, t, g, unknown or other
ttcaaaggctttaaacctagtttttttttctctctgacaactaggtttataagacttcttcttcttcttttcttcttttaattcaaaaattctatagccttcttcactatcaaattcgagccttagtgattgagtgcatgcctacacaaagcaagttagtcctcaatcatagtgtgtaagactgtgaagaattcaaacagcagaaggagtgttgggcttagatcttggtgatactctnnnnnnnnnnnnnnnnnagggttagaaatctgagcggaaggagtcaattaatttcgctgcaaccaatgtaaggtttctcataccttttatatgtttattttatatcgttttagaagttcatgtttaggatgttaaaaatatatttattagtaaatctagatcctggtaaaatgtattccaaaaaaatatagggtaccaccctattgaaataaatcaatgagaaaattctctcattcactctgtttctcttttctctaattaatttttctctctattctatattattttatgactaaacaaaattattaattatctatttatttttaacattaaatgttatatttctatgtatgtacacacattcattttgaattagaactttacttgtggcaaatgtacgtttatattagagaactttcaatgcttatgtacttcattctttaaaatacatttagggtccgtttggtacgtaggattggactgaaaatgattgaattggactggaca

SEQ ID NO: 133007 - DNA, 596 bp, Cannabis sativa
aagaattataccacataattttcatttcaaattatgaaaataatgaagaacttatcttgatattataatctctcgaactgtcataattaccacacaccacaacttttagcatgaacttaaaaattaacttgaaccatcatacatgatatatacatgacaaactaacatatatacaaacaaggcacactaagcacatgaacaaataaacttggcatgaaatacaaaacaaatataaattaaaaaatattattcataaatagtaattataaaaaatattattcataaatagtaattataaaaaatattattttgcaaatagtaattaattaattaatatttatttattgttttattatttaaacaagatataaataatatgagaattcaggaatgttgttgtgatgtgttatggtttacagctgtgttagaaaacaaacatacatatatgtcatttttcaagaactctcttctctattctaactattctgaactataactacgtgacatgcaacttgtaatcttttttggccatatttatagtaacctatatttatttatttatatatatacaagtatatatccatccaatccaatct

SEQ ID NO: 133008 - DNA, 614 bp, Cannabis sativa
cagctgatccaaagctgtcgccggcggccgtagacgaagagactgttggtttgactatttggaggcttccaggaggtggttttgcggttgggagatttttctccggcggaagaggcggcgagagggaagtgcccgtcgtttatacagaaattgatggtgggctccattcgggtggggctccgagaagggtttcatgggtatcgagaagaaatagaggaggaggagagagtcatggaatcggcagtgtttttcgtaacatgttctcgtttttggggagaataagacccaattctaattcgtcttcttcatcgagtcggactcatactgaatctggttctcttaatcgtagtcgtagttactcaattggttcagtgttcagtaggcatatgcggaggcgtaacagagcttgggttttggatgatcagactggaaatgaacggtggtgattttcttgaaaattctagaccaacgaaaaagaaaaaggtcaaattttgttgattgttatttcccctaaatttggattttttttttcgcaaaagcttttttttttttttttggttgaagatgtttaatttgcttaattactgtatatatgtcatttaattcgataaatt

SEQ ID NO: 133009 - DNA, 532 bp, Cannabis sativa
  modified_base (501)..(507): a, c, t, g, unknown or other
acaagaaagacaaagtttattatgtgccaaattttaaaatatattttacaacacaattaattaaagtcacatttttcatccgtatcatacaataatttataaaacacgtttactattctaagcttgttaaaaagtcaaacttgaatttaacacgtttccgcatatatacaaataaatatcgactatatattatttataattcataataattatgcactttttttaaatagaagtaaaatgagattaagtatataatttattaaaattaaaagctttagtcactataatcatattttatatatctatattacatacttatataatttgaattagaagcgaacaacattcaattcaatctaattgaaccgaagcaatttaattcaattacaaaaaaaataaatatttatggattgaatataaaaaattaaaatcattctcaaaatctaattaaaaactgattcaatatccaattaaatatatttccccttacggatcacgggnnnnnnnactgtcacaatcaccccccttacgg

SEQ ID NO: 133010 - DNA, 674 bp, Cannabis sativa
  modified_base (26)..(32): a, c, t, g, unknown or other
aggatgttaataaaacatacttggtnnnnnnnctagatcctggtaaaagatttccaacaattccaactccaagttttcgttgtactagccaaacttgtatgcacctttgttggtatcttgtaacatggtgcggacgttctcagttttgtctgaacatgcttgtcataggatcattgctctcaaggaatattattcagggtgtaattctcttacgaagaatttctttcctcgttctgtctgttgacgggcctggtaactctttatgggaagccatgctgctttgagttggcttggtctcttcttctttcccttttgtcaagggatcctgctagcaagatgttgtttacctcttggtcaatgtagaccacaactatgagagcagactgatggtggatcaggatggccaaggcaagactaggttgctagccacattaagggagcattgcctagctagttgaatgaggctatggatggccagcatgtgatggtagtggtcggccaaattgtagattctatggtcgtccagcctgttgaggtcatgatcggccagccttctacaggccaggtcagtgctacagtttaatccagtctacacttgattggctttgccccacagcgtaactgccgtagagcctttgtgcacttctgctaatagctattcagcttctttcttg

SEQ ID NO: 133011 - DNA, 760 bp, Cannabis sativa
  modified_base (700)..(706): a, c, t, g, unknown or other
acttttctacttttaaaaacagaaaattaattaaaaaagtgttaccaaacgctacctaagtgaatatttttttattatgtgtttattttattataaattaaccttgtaatttaattatattatatgttgatgcatatgatcgatcgatcgatataaatgtgaatatgtaatacatgagtgcatgcatatatataaaataaaagaacttcacatttttacatttaaaaaaaaattatattaatttataattaataaaatataccaaatcacgatcgaagattcgaatccacgtaatcatatccattgtaattaaattcaagagaaaaaggataaataaattcatgagtatcagttgaggtatcaaattattatttaagagtccaatgagtgggacccctacgtacgaaaaaattgaaatttattaattactatatattaatatagtgcatttcttttaatgaaaaattcattaataaattagttggaacatattgaaacgacaatcatataatataacggttctagtaaatatgagctaccatattcattgaactatttgacaaaaattacagaaatgttaagcaaacgcttataatcatcaattatatatccaaataaaaaaatcattaaaaaaattgccttacaaaacttgcgcaactaatagacaattggtttcaagcagggccggccctaggcatannnnnnntaggcccgtgcctagggcccacacttttcgagggcccaaaataaaaaaaaaata

SEQ ID NO: 133012 - DNA, 1271 bp, Cannabis sativa
  modified_base (550)..(559): a, c, t, g, unknown or other
attttagcggagaaaacgttgaatctcaacttccattaaggtataaatatgatttctatttattttattaatgtacattaatattattttgcttttgtaattttttttaggattttttcattttataaatattatattgtgtgtgtgctataggtggtcagatttttgtcgcaatttatcgccgaattgcgtttataggggtatatatggggtcggttgttttcaaccctacaacatcggtagcgaattttgtgaaaattgacgctgaaaggccttaaaaaccgtctctaaaagtagtttttgtagtagtgatatgataatcttgtgaagtgaggcatgatggtgctactctagaatccaactagtggttatgtgatcgaatttttttgtttaaaattaaagagaagagagagcaataaacattacatttggttttaaaaagataattaaagaaataagaaaaagaataaaaatatggccttttttccaaaaaaagaatatatatatttaatgagaaaatgttttaaaaaagttaaaaatatatatatannnnnnnnnntctattctatataaaatgtggttatgtaaaggaattctaagtttgatgttgtttatagttttctacgttaactttaataaaatatctcaattacttaacaatttattctttattaattttataatattattatatatatatttaaaaataaaaaattatgtagatattttatataaaaatatttaatttattcatatatatttaaaaataaaaattatatctatatatataatatatatttataccttaattttacagtaaattttttattttaaaaatgattaatgatattgttaaaaaaaatgagtaatgatatatatacgattctaataatttgtacgctttattataattatagtcttctaactacaaagtaagaatgtatatatcattatcattattttttttaaatatatgttttgacataatatatattataaaatgcattttgaaagtaattaattctctaatcaaattcaaattttgtcaaaatattttctaatataatccttatctatagagagagattaatataaaatacttataacaatgaaattcattcttttattgtatatataataggaaaatttacattccaatattttaatttcattctttttacaaaaatatggtgctgtcatttatatatcaaagtgtaccgttttgggtaccgttatcaaattaattcacttttttttattttttttttaaa

SEQ ID NO: 133013 - DNA, 558 bp, Cannabis sativa
tgtaacttttttcttcttctttttcagtaatattggatttttatattttatatttaggtacttgtttgagcatatgtaaagagagtaataatatattgaatatttaaggcttgagcttgaggtctttaacattttctccttgagcaatttcaatggggagtactgcttatgtttttacacacatatttggcaacattaaatagttggttaccattttattcagcaaaaaagaaaaatagttggttaccattagtgtgaaaaagggtaccaaaaatgaaattatatatatatatatatatatatattttcaaatagagttttggaaacccttctactattctttttcaacgtcgtgatcagagtcaccgatgattaacaatgcatcaattcataaatagtacgtagtgaaatttctttaaatcgggatagctcattgtctaactgatcaatgacatattttattgaaccataagctgtagaattcttatcacaagttacataagacaaaactgtcctaaaaaatttagacaataaaactataagggctcgtttggaacg

SEQ ID NO: 133014 - DNA, 852 bp, Cannabis sativa
agaaactagcaagcataatcacgaacttcagcagcaaaatacctctaaatcataccaaatttacaactaaactctcaaatcacaaaataaagttcctaccaaatattagatagtaagaaatacatatttcatgcatcaattccaacaataaaccccaaaattaagattgcacaatcaacacaaaatcatgctttaaactaacaaagttcaagctcatgaacttgagcttcaaacttacccaactcaaataattctccagtggcataacaccaattaacacataaattctgacctagaaaatactcaacaatctcatctaataatcaacaataaactcacaacaatatcttgcaattaacactcaaacttttcaaaattcacactcatgcaaccaagaacattcaaagcttagaagaacatgcttttcaatttctacctcagctacaaatccaaaattaaagagtggtaagaagagctacctcaaactcaagccacaataaagccttaattcttcaaaagcaagcttaatcacaagtaattctcatgcaatttccttcaattcaatgttgaaataaaagagggtttgagagagagaaaggtttcgggtatgggggtagccaaataaaaaaaaaattccttctcaatttctaaaaataatacaatgggtcaaaatgatcaaattgtccctagggccaattctcacatatccacacatacaagggtattcatgaaaattcacacataaataaatccaaataaattttcagattattcaccaataattcaatccaaattgcatttcgggcccgaaccctattcggcccgaaatacccagttgtgactataccgcgc

SEQ ID NO: 133015 - DNA, 632 bp, Cannabis sativa
cctctgaaatgaatcctgagttcgaacaatggattgtcaatgatcaattactaatgggctggctatatggctcaatgactgaaagtattgctactgaagtcatgggatgttcatcttctgctgatttatggagtggtttagaggctttgtttggtgcacattcaaaggctagaatggacgaatacagaaccaaaatacagactgtgagaaaggggtctatgaacatgacagaatatctcaagcaaaagaaacaatgggctgatgttcttgcactagtaggtgacccatatcctgaatctcttctagtttctaatgttctctctggtttggacatggaatacctgcccattgttttacagattgaagctagagaaaagacaacttggcaagttcttcaagacttactgctgagttttgacagtaagcttgacagacttagctcgttttctggaaacaacaagcatggaaacaatggttctccctcagctaatcttgctaacaaaagccaaactggtggtgggaactacaacccaggaaattcaagaggcagaggaggcaataacagcaatagtaacagtcgtggaaggtcaaatggaagaggaagaggaggcagaggtggtccaaaacccact

SEQ ID NO: 133016 - DNA, 865 bp, Cannabis sativa
ctagctaatcgctagcgacatgtcgagaaggtactaggtaccactggtgcctaatagcaatgttcatatataatggtgaaccaaatgatgcttcaatgccataattaatggcatgtttaattaaaggaaatgggaattaatgatatggtattgattcaaacaattgtttataaaattttagaaacgaaaaaggtagtgtggcccacacaaattagggagaaaacaaaaaaaaaagttctcccccatttttatagggaatattttttcttttctgtcttagtttattttaattttaattttattaattaaaaataaaaaagataaatttatcctttaaaaatctataaacagaaataatatgattcttaattacatgttctaataatgataatttttgtcaaattaaaacattatgattacttttttagttatgtaaacaaaataatatgattttaggtttttttttctagacagtttagtaaatagtataataaaatattgtttccgattattttttattttaaatcaattcatttgtcctattaattattataattctagctaaagtttgataaacgcgccataagtgaatccatccaataactattatttcaaaataataataatataacctctttcatatgctttgctaaagatattgaagaaataaaaattggatggagattttagatgaattcaaatgataaaataccatcacttaatagagatccgactgagatctaaacaaattaaaacaaaatcaaaactattaaatcaatataataaaagaaaaaatcaaacacaaaattaacaattcactatatacactacaaaaaaactgctacttttggtgacaactttttag

SEQ ID NO: 133017 - DNA, 847 bp, Cannabis sativa
tatttttgtaaattttcctaaaaaaatttatccccttttaaaattatattttttttactgattttaaaaatattatttttttttttgaataaacactgagtttcttttttttttttaatagtgaactaaatttcagagcaggccaactaatatctttaagttgtgatcatttgatcaaatcttccatcaaagtaaactcgtttttataaaaataagaaagtcaaatcatgtgctaattaaattgtataatataaaataattaaagttttattgatgaatgttatatgtttattaaaccgataagtcaagagtacgtatgttatgtttagctgtctaattaattaatatcttaatctaattttggggaattacattggctaaacgccaaaaattaaataaaatgaaggctaatcagatttttcttctcaattctcacatttactaaatcctacccctaaactttttatctaattaaaaattcctttggaactataaaaattattagatttaaggtttttgtgtaattatattcaattttactaatgcagcgattgtctatgtactaaattgtggccccaaatttttatttactatatcatacccccaaaccagaagtggcaattcgtattcgcgggtcgtgttcgtgtcgtgtcgagacccatgtataacaggtatatgctcgacccaaactacatgacccgtttaataatcgtgtcaaaaaatgaaacccgatcacgacccgattataaacgggttgacacgacacgacccgtgtaacccgtttataagcatattttgtttaaacatgtcaatcaataacacatttataaaatattcaacacgttta

SEQ ID NO: 133018 - DNA, 745 bp, Cannabis sativa
  modified_base (27)..(33): a, c, t, g, unknown or other
accataagaaaaaatttgactaaaaannnnnnncggatactaaaacagatagagatgtatcggtgtatcccttttaagatggtgcataatagaatttcccactaatattaacttgaaaacaaattacatataacagttataagtggaggtggaattttctctaaccaaatacattcactattcaccgtaagaataaacttagccaacaagtgagcttatataatatcaattttagttaaattgcatacataatttttttatataaatttttaaaaaaattataaataactgcacgcaaagcctattcctacattgatcacatgcgtcattgctgatttcatttgttttgaatgttactaaatttgttgaggagaaaaagggagggaaaagaaaagagacaaaaaacagattagttgttgggttggaaataaatagtgagagaaaaatatctaaattaaaactgcttagtttattcttgattcaatttctatatatacttttcaaataatcaaataaaaattatacaatatcttatattaaattagatatgttatagattttgagccttattttaggagttttattagatttgataatcttattaattatttattaatttatatgcacataatgtattttataaagatattttaatttggtggtttgaaacaacatttattaagtccattaattaattacgtgattttattaataatatttttatactttactatattattattat

SEQ ID NO: 133019 - DNA, 532 bp, Cannabis sativa
agagagagagagaaaaagagagaatttttcattttttgagtattttcgaaatgagaatggtattttaggttagtgtgggaattagtaggattaaatggtatagaaaaattaagggtttttttcgtaataaggaagtttattaagtatgaaaaatgattttttttattcgaatctatatatccttcatatattatggtcatataactatagactatagagattaggatctatatgttgatagttttgacttatgctatcttttttttgtattatggtttttattttggcttttttactttctaaatagtaatgataaaattaatagattatatttataatacgtggctgtggtatgtaattatgtatgtatatattaattccactttaaatagaaaatagtcaattatttacttagaattaatgtatataattttgtgtttacacaagaatatcaaacgactttacaaagtgcactcgagttagaaagatatattgtgttctcacttggtttagtggaccactatttataagc

SEQ ID NO: 133020 - DNA, 681 bp, Cannabis sativa
tttttttttattagatttattaacattgatcgatatttcgtaattttttatttatactttttacaaatattaattaataataatttaaaaaattcaaaaatctattaattcctaaccatctatttatatataacagaggtataaagcggtgacatgacactctaaatcactttatctattccctcctttattttctcatttttttttaatttttattaaatttattaatattgatcgatatttcgtcattttttattcatactttttaaaactattaattaataataatttaaatttttttaaaaatgtacttattcttaaccaattttaaaaatacttacttaatatatctgttacaccctgattttgtaaaaataaaacaaagacaacgtcccatggacaaggtctcatggccaaacctcatcactttatcatctcaacgctaaattgagaacctcatcatcacctaggctccatcatctttgcatccttccttaagtatcatcttgccaccatctccaaagactccatctcagccatcacagtcccattcatctaggccctacaagcatctcggcctcaccaagcatctcagcctcactgtgatagtcaatagtcatgtgatccgtaagagaaaataccaggtaaattgtgcaatcccacaccgcctggggaatgtca

SEQ ID NO: 133021 - DNA, 1415 bp, Cannabis sativa
ctgccactcatcatgattcttcactaagtcaccaaattcccgtgaatatgcttcgtccttctttccatcagtctggccctagagcacctgggtttgatcaacccattcctcaccctctgtcgcagcagatgcacatgacaagcaattttccacctaacctgcttcaaggattacataggggcccaccacttcctgcacattcaaaccgaagtgctcctatgcctggtcacccaaactttggtagtgttggcatgcaacaaccaggtaaaacctgggcagtactaattttgtttccaccttctgattttattatctgtcccaatttccatctaaaattaaactatcaaattgtgttttcgaagatgagtgttgataagtttgcgtctctaagctcttgtttttatcattattggggtctgcagcacctgatattggcggcggaagcaaccatccagaggcatttcagaggcttatcgaaatggaactcaggtcaaattcaaagcagattcacccttttgctacaggtggcggcggccctggccctggccctggtcctggtcctggtgctggtggacacagccatgggatgtatggtcatgagcttgacatgggctttgggtttagatagtagatataaaacgcctgtatacatcaatgtattcattgtcttttgctcagatctgcaactctcatcgtggatattggtctttctttatcctttcctttctcctccattccctctcaccttccttttcttttggttgggatggagaaaaaaaaaggtataatggtgtttcactttaagcaggactggacggcgtcagtgtgaatttttcttgcaattgccattttacttgaataccttgcttttgaaacccaaatgatatcatatgcgccccaataataaattataaattggttcaacaacttgaatcattattatgtataataggaatgatggtaattgcaatatttttaaaccaaaaaaatcctaaacgcatttaacagcccgggttataaattctctaatgattggcaatctttttaaccaatcaacggttttatttttttagaagttatttgcttgctgtttaagtgtgtataaagtatcattatttatttaataataaaagtaaaatttagttgataaaatgtcctttcttgtctccattgaagtgtatacaagtacaaagatgccagagatttgcataatcaatttgggcatgaaaagtgtgatacattaggcagacgaaccagttttcacgtccataatttttattaggagttcatccgatctaatctgcatttttttttatcaaacaacatttaaagtgcgaatttcatattttagattcaatccgatctacataatagtttaaatctaatccgcaatagtgcggattggatcggttatt

SEQ ID NO: 133022 - DNA, 731 bp, Cannabis sativa
gtttgggcaggtcaggttattcggtttttgggcggtttacaattttttttgtacaaccctaatgtttaaaccacaactaaaattaattacatattattatgtataaaaaaggaaatattaattgagtatatcaccattataattctactaaatttctttgactacaaatatattttagagatatttattttttttaatgatataatatatgtttaatacatttaataataatttaaaggagtagaattgttaaaaaaaaattatagaagtaggaaaaaaaaaatttaaggtagaaaatgattcaaaatataatggattaaataattaaaattattaaaatacatttacttatgtcaattacatttttaagaagtaataataataataaaattatgtaatataaatttgcttgtatattaatatgttattattacaacgaataatatatactatcattaaatatatataatgtatatataattatatttaatgtatcgtattacaaaatttaatatactataataataaaattatataccaccaacaatatttgacaaaagtaaaagtagtatattaatacttaaaaattatatacaatgctaataaaattatgtataccaccaataaaatatgtgtaccatgtcaaacttttttatataattattctatataataaaaaaaaaaactaaatatgatataaataaatgatatattatactattaaaattata

SEQ ID NO: 133023 - DNA, 841 bp, Cannabis sativa
aaataaaagaaatacgcgttaatggactatttaaatattgttttcagcgtattaattttttaaaaaattctcaaaaatatacaaaatattttaaataagtgcatcgtacaccattatctataaataatgaaaaaagaataaaattatatcgatttgaatgtacgaaggttgaagagtccatcgaggtgcaggggcaccttaaaataaaataaaagatacgtgttaatgaactatttgaatattattttcaacgtactattttttttaaaattcttataaatatacagaatattttgaataattgcattgtatattattatatataaataaaaaataaataaaactatattgatttgaatgtcgaagcacgaaggtggaagagagtccatgcaggagcaagggggcaccttaaaatttttctaaatcatattgggaaatttgacattatatacttaagaaaagcataaggtgtttgtttcttaaaaaaaatgtaaaaataataccctccaaatatcttaaatcccaacaataccttccccatttcaaacccccactctccctctaactctctcgtttctctctctttcgatctctaactctacaaacccactcccaacaaaaccccaccggaccaccaacgaaaccccaccggaccacgagaagcactcaagccccgagctccgaccgaccaagacaaccgacgaccaagacgatcaatgaccgagaagactcatgatgactcgcgacgacccacgacgacccacgagaagcacccaagacaacccacgaccattgcaccacttccagcgaaacccactcgcttgtttttagcatttttttt

SEQ ID NO: 133024 - DNA, 1257 bp, Cannabis sativa
tctgcaacggcggcaatggtggaggagcccaggatcgcgaacgtcggagtagccatgggggcccgttctcatggctagatccttgtgccgaagtcaaaaaggacgggtcgtgttggctccaaacttggaaaagtgtggaaggccatggttcctattgcttcgtgtaatgtttcaatgggttttgccatttctggcattttttcttccttgttgttgctgcaaaatggaaaggtttctactgatatgccaaaggtaggggtgatttgaattgtgcattgacaaatgccagctatgtgataggaaaaggtcacattaatattgacaattttcaactaaagctgacatgtgatatatttgagtctgagcacgtggttaattgtgagttcagctcaaaagagattttgggtcatgggttaattaagaaagaaattttgaaccataattttatgaagtcattgggccgtgtgactaatattgtgggggtgttgggccatgacttgcatttattgaagccaatgggccgtgggttcaaggcatatggggagatgggccatggctttaatgatgatgggaagttgggccatgatcttaagtatttaaatggttatgggatatcttcactttgtttgggccgtgggtgcaattcttggagtaaggaagctttggtggggcatggggtcaacttttatggtgatcctattttcgtacaatatttggatgatgggccttttaccatcaatgataaagctatggaggtaagtaaagtctttatttttgtgggaccgagccaagaaaatagaaaatctatgggcccatctgttcactctgttcactctcaaacccttgtggaggagaatgtcttatctcctccacaggagccatgagaggtgtagcgtggaactgtagagggttagggaagacctctacagttctggagttgaaagttctgattcggtcgtgcaatcctgatttcattttcattaccgaactaaaagtggatgcttcaagtctggtacgttcccttaagaaacttcactttatcataatattggtgtgccgactgtggaatgtgcgggggggttaattttagcttggaaagagggctttgaatttgaaagtattaatatttctaaaaatcaaattactggttttgtgtactctaacctgtaaggagcccctggctgttgtcttgtgtttacggtcctccgtacttccatgaaaagaagaaattttggtctagcttgatggttaatggtg

SEQ ID NO: 133025 - DNA, 644 bp, Cannabis sativa
acaataaaattaattgaagaaacggtatatgtgcaaattaattgaataacaatattatggcaattaatttcaaattttagttgttagatgcaattttttctaatttatttatactcaattccctttccactcttctctacaatcttcttctttgtctctctctctctctctcatatatctatgtctatgactatatatatggctatagctgttttgatatatcatataatataataattagttaggcctaatcaaacttactaatacattccttttgttctaaaaaattaaaacttgtattaagaaaagtaccaataatgcagcaaaaataaaataaacatataaaacacacggcttacactcaacaacaacgcctacttacgctacttatgatatataaggcgttcaattattattattattattgaataatttttatgtttaaagaacaaaataaataaaagaatgaatatctgtatataagattagacgtggatattatgatataatttgcttttaaatcataaaaaacattcattcaaaaaaaaaaaaaaaaacataaaagcataattacaattatttataggttaattagcaatttttcccccaaactttgacacataccaaatcatgccctctgaact

SEQ ID NO: 133026 - DNA, 1243 bp, Cannabis sativa
  modified_base (842)..(847): a, c, t, g, unknown or other
  modified_base (1005)..(1019): a, c, t, g, unknown or other
  modified_base (1195)..(1197): a, c, t, g, unknown or other
agtaccccgacctgccctgtttgggggtggacttcaaatcaaagaaccaggaaacttcgtgaggagaaggagtaccccacccttgggaagcgtagaggacaaagagggaaaataaatgcccttagaagtaaactgggccgggcagagagtgaagaagtctgccacatccttcaagtacttatgcaagggcatcaacgctccttgctgaccatgggcttccgaccaggcgcacatccccttgtcagggtttgtggcacgattattgtgggcgggaatgtagcagtccaattcgcgcaggtatccgccctggtcaagagttcgaaggcgcgcctccgtaatctaggatggaggagttacccacctggcccccaaggcaccctgcgttttatgaggaaccaccgcgacaagctcttcactgacgttgtccacgccctcaaccacgacgtctccgtcagcatcgactggctcccagcctcattgtactccccgtaatttgggggttcaacctcttcctcttcctcagccttggagggacttccagggcgtacatcgtgtagctcctcgatctcctggacctgagagtccccttatcaatcctcctccatctggacggccggatcctattcggcactgggcaaagtggcgagccgagccacttgaggatcacagacgcgtggttttccttgtacgagccatcattctatggctgggtacagggctagaagaatgtccttcactagaggaaggaggagtagaacaaagacgaggatgatcctcgtgcagaagttgaagcaaatcctagtcgatctgatgtccttgttcccaagactcacctgagttcnnnnnnaaaagacaacacacaagatgagtttttggccagaatatcgaacaataaacaagaaaatatgccaaccaggaatactcaacagattaaagaacgactatgttcaaagaaaagtcagaactcaagaagtcaaaaaaatttcttgagttagggcaaaaaannnnnnnnnnnnnnnaataagcaagatgaaagatagacgttatgcacttcagaaacaagaaatatggctgtaaacccgcatcaagacatgataaagaagaattgcaaatgtttctaagcctacggtttcctaaacatttttctacagcacagtagaaggagcattcaaaatgtaaacatgcaaagataagnnnaaaggaaatcagaaacttacttaagattcaaatgtctgggttcgag

SEQ ID NO: 133027 - DNA, 1128 bp, Cannabis sativa
gttgctgctgtaaattttctgaatcatgctcctcaaatttcttttccatgtgattattattttaaacaaatagcagcttgacagtttactgatgatattttaatgaaattacacctcttttctcattatatggttaatttgtatgccaccacattttacatggtgagaaattgtgagattgtttgatcatgggtgaatagggtaaagtgggggtgacatctaaactgaagtgttatggggatgcttagaaaggaaaggaatgataatcccaagattctctataagataaaagtaaatggatccgatcgtcttgggttcaattgagaagtctttctcatggctggagtggaattcaagtaccacgcagtattttggattggtctcagttttcttttataattcttaaattaattgtctctgctatatgaagtaggaggttgatagattgttaatcaataggttgtactgttgcacaataatgaagccttgagttctaataagttatacttggtgtcgttatacgataaaatgctatattactgtttcttaattaattgttgtagagattgattcagtttctattatctctgttcaacatagtctaagcttttctgtaaaatgttaaaatcaatttgaatgttcaaatggagtagcaaacaagtagttatcctatgcagttgaaagtgggttttggttctgttgaatgatttaaaatctccaactgccaagtttttaggaatcactatggctggcagtgccatttgtactatacaaaaaatgttgttcccacaggccacaccgtcacatatatttgttgatttgtactcatcatgttctattgcatattgtttttgtagagttttctgtcttaaaattgtccaagcacaatgtcgtctccccaatttatgtagtgtccttcatctatcgcaatatagattttacacccatagaagaagagattgtaaaaacaaaaaaagaaaaagaaaagaaattatagatcatcaccatatattgagtcttcacgtatttttctctttttattgtcatatatgctgctttatagtttgcagtgttttaatcattaatcatttgattttccttttcaagtatattttcttgaataatgag

SEQ ID NO: 133028 - DNA, 814 bp, Cannabis sativa
ggttgaaaaatgcccaacccgtcacttatgggttgataatcgggctggagggtttttaacccaatgaacccaacccgggccgtaaagcccaataaactttaaaaaattaataaatatttgaataattatagatcaatttttttttaattgaaaccctaaacctaatgcaatataaacctcatttgtcatctcctctcatttgtccaaaccctaacacagctgccacactttttttttttttgaaaaaaaaccctctcaactcactctcagtcgtcccaccaccactgtacaggtctcccacccgcgccaccatcttccagccacaccacgccacccaccgtctagttctcccagccgtgccgctgtattttcttcctttcggctctgagagtggtgagttcctttattgtaacttttaagaacttttttatattttttctctttgctggaagtaaaagtttataatgacgaaagagtcttattttttttgtttctttgaaatttcaggtcacctacaaaacatcgggagtcccttgcttaggtcgtgttgttgttgggagtccatttgctcagtgctctggagcaagtaaggtcgacatctcactttattttcctcttttaatttgattttattatctttgtgtaactatatcattgtgatgtatgtgataaaataatatttactagttttattatagtgtgatttttttaaaaatctctctatgaatctattgttgtgatgtttgttagggtgataatgtttgtgataaaaaaagtagtgtagtgtaatgtaaatgtatattaatatagtagt

SEQ ID NO: 133029 - DNA, 644 bp, Cannabis sativa
aggcaatacctcatctaatcggcttacttgacagattaatgatggtttaagagcttcttatcttttcttttaacaaacaattaacttctattttattttaagaaaccacctatcttttaaataagttaatttttaattataaaatatcacatttacttacatttgaaaattatttaagttcatatttaaatgggatatttcaaatatattgtttgttactttattttgtttactttatttcaattttttatatgagaaattaatattatcaaattatttacttattttattttattaattttaattaaaaaaaaataataataataaaattatttaatccatctatatatctacttatctactatatctttctatctatttatctatctataaatatacactttaaaataacttcaaatacttctatctattttcttcttaaatttttcacattttaattttttaacttttatttatttatttattattctctctttaatttttttattttttattaggtttacaaacatttatttatttatttatttattattactaattaataataagaaagatcactagtatatcacgttttctaattttttttcaaaaaaaaaaatctatataccataagacattttcta

SEQ ID NO: 133030 - DNA, 1072 bp, Cannabis sativa
tctctctctctctctctaaatatcctttttcccacctggataatgctgtgaatatcttggtcaaaggatagactctgtactaatatgtttaaaccatcacaggggtaagaaaaagttttagacacaatggttagaatctaagtacaagcaactacttgttcaaacattgggaaaagattaagatgtaataaggttccatgtgtgtggttaatgaagttcaaattgtaaatacaagccctgtgggagcacataaatgaattgccaactaattttggcttcattattttattatttctgagactgactggtggggtacttgaagtttgcttcctatatatgcttattaaactaattaaaataaagatataaaaataataataaattttcatttctctacgtgttgtggattttgctccatgaagtcaagcaatctttttggaaggtttcggaggtgtaacttccttatgagggaaaaaaacaaagagggaaagtaaacggtttcattatatttgctgtgatataaaagcctaaaatataatatctctctaagaagattaatcccagcacttaaaaccatgtcagtgagtcagtagctaacacctttatgaagattgatgatagtttagaatgtttagttgatcttcatgagaggttaagaaagagaattttgtgagaaaagtttaagagaaactactctaggatacatcaatttctctactactagagtagaattagattaataggatgggattggctaaattatcatagacagtgcttcccttgtggttttttttttcaaagaaaagaaggttcaacaaccttgtggttggtacaaaaagtagcatgttagaaattaattagattaagagaaaaaaaaatggtttctctttatgtttctacttatgacacacaaatactttgtttcaactatactatgatggttctatccttttattttcattaaaaaaaaaaggctaattaggacttttacccctcgaactttaacatgtaccaaatcattgttagatattattttaccaggatcttagatctaacaccctaaatatgaact

SEQ ID NO: 133031 - DNA, 1217 bp, Cannabis sativa
acccatagtcaatgtttggatttgggacccatacaaaaactcaaacccaaatcgagactcggacccaaacccagacccagaacgggacccgtaccccatgacccaaaattggaagcgaaatcggaagcggactgagacccggaataagaccaggggactaggacccgatctttgtcccaaacttggaatctgactaggtcccagacccagacccggacaaggacgcaaacccgaatcaaaactcggatcgcgactagggacacgaacctgaatccagacacggacttggagccaaacctgaaggccccagaccaggattggagactcagacacgaaattagaacaagaatcaggaccaaggactgggactgggacacaagacccgacccctgtctcggtcctagacctggaccttgacacaaacatttacacggacacggactaagacccaggatccgaattggaatgagaccgggacccaagattaggatctggatcttgacccacgacccttggcttggatccaacctgtagtcagtgtttggatcttggaatcgtaccaagacccaaacctggaacaatttccagaccaggacacacacccagaagtggaaccgggacccaaaatcaaaataagaaccggaattaggaccatggaacaggaattggacctggacccagaaccggatctagacgcgaaaccgaacacatacccagacctagacttggtccatacccggatctagacccgaactcggacctagacttgtaccaggacctgcgaccctgaacctagaacactggaccagtgacccttgacttggaccagacactgacccagaccaagacccagaccgaaacctagaatcagacctgaacccaaacccagacccagacccagtgccaaactcgtaccaaaactcgaactcgaacttgggacttagacacgaacccgaactgagatcaggactaggaccccgatccaaactaggacaaagcccagaacttggacttggactagaacctaaattgggacttagacccgggacccgagactcggacttgggagctgaaaaaccaaaacgtgacctagatgggggacttgggccccaaacccaaacctttactgtaatatcccgaaaaatatattgatattttaatcggacatattttattaaatatgtcattatgggttattagagtaggattataatcct

SEQ ID NO: 133032 - DNA, 651 bp, Cannabis sativa
aaagtaaaactcatcactatgatttgaatcaaaatgaataattttgacaagaatttattgtagttaagcaaaagaacgtcaaactcaataaataaaaaaggcatatctaacacctacaatttgacatacaagtccaaaataaacatgtaaaatcattctaaacgtgattaagactttgagagattcagattttgatacaaaattgggcaaatgtattgtaattgaatagcagtgggaattcacctgattagtttttagaatccaacatgaatctctaaagagaagaagcacaggtgagaaacaacttgaatctccaaagggaagatgaaactatgaaaagagagaagcacatgagtgtaaatctaacaaatgacaacttcaaaagctaaatcccaatatagtgataaaaaaaatcagctataatgtagcacataactcagctaaacaaatatctctatagctatggtattatcaacaattcttaagagggtcgagacaaggaaggggccatttaccaaaaaacatctaacactgcagcagcctctacaacttgtgcaaaactcagtcaatttagagaacttaaaccaaaacattgtaagagtttgaagtaagaacaattcactttgcaagttctctttttttttttttttt

SEQ ID NO: 133033 - DNA, 1132 bp, Cannabis sativa
tgtaaagggttttatttagggcacaaaacccaacactattatcggagaaatttcagttgtagaagatatcattcaaaataatgataaaggttattccataaacacctcctctaagaaaatctcaaggacaaaaaaaatcgacaaggtgtgataataattttgtttacctttgagaaggagaatatgataatggtcataacctatcacttatagtgaagcacttaatagtcctcattcttcaaaatggaaaagctatggattatgagattaagttcatggacaaaaataatgtatgagagttagttctattacctgatggttttaaaccaataggttgcaagtggatttttaagaactaaaaggatgaaatgagacagattgaaaggtataaagcacgtttagtggcaaaaggatttacccaaagagaaggtattgattataccataactttcttgcttgtttttactaaagattcattcaaaattattatggatttagttgtgcactttgattcaaatttgcatcaaattgttgttaaaattgcttttttaaattgagaattgagtgagcaagtttatatgtctcaacctgaaagattcaaggaaaataaaaatgaaaacttggtttgaaaattaaagcaatccatttttattctcaaacaggcatcttgctagtggttcttgaagtttgataaggttgtgacatcatttggttttatcgagaacacatttgaccagtgtatttatatgaagatcagtgggagtcgtcatattttttttcttaatctttatgtggatgattaaagaaaggtgaaatggtcatcaaacataattaaataggattgacgtttaaaaataattcataaaattaacagtattttgaacaaaataaataacagtggtttttgtataattaaaattaattttttatcacctcatgtaaaattctcttaaatatattatttaaacacaaaaattaataataataaaaaataaataaaaaataaagattaatttagattaattaatctgaccaaatcgataaaattattaagtagattaaacttttttaattttttttatttttttattgaacggattcaggcccggccatgggcataggcgggctaggc

SEQ ID NO: 133034 - DNA, 819 bp, Cannabis sativa
acgtggttgatctttaggattaaggtgtggattatcatagttatagttgttatgattgggactttcagtatcacttttgtttactttagggttttggttcttttgcttgttaaactattactagatatttgtctacacatacgttgttgagtactggaagagttatagcattattgggcgagtgaattatatcagctaatatagttttgatgtatactttttgtagcatttggtttaagttatgatcctgacttgagtttaatgttgaatgctattgtattcaggcccttggaaaggaaattgtaatttcgaggaaaactgttaattgactttacgaaaataaggcccagctaaattcaatatcaatgcatcttggagaaagtgttggtatgttgcttcaaattctctcttcattctccttgttctaattatagcatgtaaacaatccacaaaacgatatgaccttaactccatttttttctttcaagtatttgatgtcaaccttattatcatggaggttcctctattcatattttttaaattaaacagttagtcttttgttaatcccagaaagggttggagtcccagacacttaatcacacacaaccatgttatttgatgtctaacttctgaaatggttagtgaagacttgtgtgatggaaggaaggcttctctcagaggaggattcatagacttgtgtgaagactcaatctcttacagatgactttattctatttagtgaagacttgtctaaatgcaataatattagtgtttacaactattctattttggttttacagatattttattctagatctt

SEQ ID NO: 133035 - DNA, 1401 bp, Cannabis sativa
tattgcgagccaccttcaatacagtgagttctctatagacaagtctttctcgcggggagggtagatttatgcctataacagagattatacctttctccaataaagatagctaagattgtgcgatcttcaatcaacacaaagaactcaaaagctataaaatatttaaaatatttaattaacagctttgattcataaacacatcaaattaaagtaaaagtagataaaagtttaatttttataacaattatcaacttatctaaaaatttgtgtgaactaaaaatatacaaatatatattaccgataatacctaaacatcattaagtatattaacaacataattttagtaacctaccaagtctaataaagcttccaatcaacgtactcaaacaagatcaccactaccaataaacacacaaaattatcaatttacaattaattatataattaaataaaactatttaaacttaaattaattaacatttctctaaatattttttacacattaatttttttacaaaaacaacgactaattttataacacattacatatagactaaaatacattagatttttacaaattaaatttatacaataaaaatttacttaaaattaaaaaattcaattttttctaattatttacaaaaataaatatatatacatatatatatttggcggcatgatttccacagaatccgtcgtgcacctcagatagaagtcgtgcagcttcttcttaaataacacatcttagcaatggcattgagaatcctcttttgtacataattccctctactatgatataccatgcagccttccttctcattttttgagcttcattctaattatctcggagtttccaagtgtcgaggtaggctgctattggtgtcatcctgtttggggaagtatctatcatttcgatttcttttgtgccagtgatgctaggctcttcgaggaactggataggaatcaggttccccttgtcacttacaatactacttgccaattgagctagcacatctgcagttgtttttcttcccttggaatttgtctgagaccgtagcttttgaattgtgcgagcaggtcatgtattttgctcaaatatgctcatcttttctccgtgagcatcgtattatccggatacatggtttaccactagctgtgaatcactgtagatttcaatgtgtttggctttcatctcccgggctagtttttggccagcaattagagcttcatacttggcttcgttattagatgctttaaatctaaaattgactgcagcgtgcaggtgttgccccacaggcgtaacaagggtaattcttacaccagatagctcatctgtagctgacccgtctacgtgtagtttccagggcagcttattttcactattacttggctgaggtgttt

SEQ ID NO: 133036 - DNA, 724 bp, Cannabis sativa
cccgtcgcgactagggatattgctcgtcgcgacgggcttcgccagaaaagaggcctttctattttttttcaaatttttcctcttttgtcctctattcgtgtgaatacttcctttaaacatctagggacctgaaataagagaatcaagcaaaaaatagccctaaaactagaaacaaagattgaaaactaccctaaaaggtgacccaaaacttagactaaaattagcctaacaccatgcgggtagaaagcttctacaatgaacttatttacccgttctacttcttccttaaatgtctgtgcacatttttgtccaacagtcttcgtttttgctatactagatagaaattggggtcaatgttgagggcaagaaaaattataaatggatcaatcccgaccatgtcctcatgtgaccaggaaaaattatcaaggtctgctcttagagatttgatcaaagtggattttatttcgaacaacaaaccccatccaatcttgagtttcctggtcggcatagtgggatcgatctctacttcttctatttcctccactggcttgatgcttgtacttgggtccccaaagcgaggatccatgtattcattctcgccttgggcgtaggggtgtttgcggtgtgggtagttcaatttttgaccatttttttaaaccaacctgcacatgcagtttttctaatttcccaaaccgaactcgcaccacgaaactaaaaaaactgc

SEQ ID NO: 133037 - DNA, 583 bp, Cannabis sativa
atattgggttggaaaaaaagaaaaagtttatataataagttttgtccaattatattcagtcaaggtagctcttgaagacaacaaacaacaccataatatatataggtagctaactatagtaaatagtaattggatttatacatataatagtggatatatagcttcccaaattaataatttttatttatttattcatgtttttctttttatagtagttagcttttggtgaagaaacaagggccatatcacccactccaccacccccatctttatttatatgcgtcatcttcaactctctctatatccacccattaccactcatttattttcttttattattattagtacacctgatataattgcttcttcttttagagtctcagtctccctcttaaaaatctggtttattaatttactcatatcaactagtgctttctccataatcatatttctatagaaggttctcagaaataattaatagtttggtttctagctaatttggtttttttttttttattgcacaagagggttaattaatatattaatataataattaatgagacaaaaatgcttagaatatatt

SEQ ID NO: 133038 - DNA, 847 bp, Cannabis sativa
  modified_base (46)..(52): a, c, t, g, unknown or other
tgaaacttataaaaaaacacagtataaaagtaaaaaataccgcctnnnnnnntttttgtaaaaaaatgacaaaaataagtataccatgtaaattttcctaataaaattgtataaatgtaaagacttataatatcaattaataaagtatcaaatattacaaaaataattgacttaaacaacattagactctttctaataatttgttacaaccctttgtaatccacctcactaatatgacctctgaaacacactaagtagtaaatttccttagctcacttcctcccgaaatgagtttttgatagatcttctccttctcctaaagatatacactcactttctctcggaatgagacttggaaaagtcttctcctaaagactcatgcttgtttaaagcttctcttcaacatattctatgaacagtgtttgctaaaattgatacgcaatatacgcaattgaatcaagtaatataatgatgaagtagagtatcgttccaacgaggattgattatcaattaccaattaattaattatttgtttctatttgatcaataataattttggagaaaagtaaataaatccaaataataattaaaacttaaagaaataacaatgaaaaaaataaggattattataatcttcaactatcttttatttacccaatttctcttcttcatattcaattgacaagttgaattaagttgtttataatatggttaaagcttacaaacccaatctatgtgaaaactccttatatttctgtggtaaaatttaatcacaaagaaagcattaaacaaaacaactcataaaatcatacaaataatctagataattgtagtggccaaaaattgc

SEQ ID NO: 133039 - DNA, 1928 bp, Cannabis sativa
  modified_base (1881)..(1883): a, c, t, g, unknown or other
agataacaaatatagctatggttggaattatgaaagaaaatattcaatcttctctatataagttgcagaatcccaaaaacagatttgggcttttgaattcgattgtatgttactttatcagatatgtgaattatttttattcctaaaaaaaattggtacaaattcgatttcagatctgagtttttacccagctttcttgatgggttataaaaaaatttgatgattgaattcgtaactggtggttgtggtggtactatgatggtcatggtgatatagtgtgtgaagaagactgaaggaaaaaaaaaattaaagaaaaaccatctggaaaaaggaaaaataatcggagaagaattgaaaaaaaaataaaataaataattattattttttaaataatttattttagtttttttaattttaaattattttttaattaaaattatgagttggaccaataatctttaaacacgtggcattattgtcagtatttaacaggtctgttaaattgggtatcaacggacttacaaatatggcgaccttagggatttttaccgccaatttttgaggttgaggactaatcggcatcaacctcaagtttttggagacttttgccgcaattatcccataattaattaagttagatttatccaaggaaaacataaatttccatcctttttagagcaaaaataagaagagttagtaaggatttcaagtgtatagttaaagtaattcaagtcaagcatctccctttttgaattctaaggttaaagttaggtttctcatgcaatttttgagatttcaattctgcatgatatgggaatgattatgttttgtttttggagtaattatatggtcatttatgttgttattggttggtttgtatagttatttcaaggttttaagctcaaactttggcttctatggtaaaattgcattcttgggtttacagtagctaataaacgttgaattttgtttgttttagctaattatgaagttctggacagtttggaggagtttggttaaagtttgggttcaaaatgaggttttttggaaaacttgcaacaaaactggcaaaccgtttttacatcaacagtttaccgtttttacaagtataggcccagaaaaatggtttactgcttttataaaaacagtctgctgtttatttagggtattttttcgaagtctcattttttgtgttttcttgacatttagggtattgccatgttattcatcgataagaaaacttttagtttcgagtttaagtccccgaaagtgatttttcgggtcacttactagttttacataaattgtgacttaggatcttaaatcgtcgagcaacagttttcactcaggatattaccgacttacttgcattcataatcgaggtaatattagtataatgatatgcatgtttacatatttagcgtacatgttttatagttgcatgttagataacatattagtaagagcggtattagtgtacctagagctgcactgaatatcgacggctatatgttaggaaaattctaaagccattagttcaacatatcagtaagagcggtatcaatgtacatagaattgtattggatattgatgaatatatgttaggctttatcatacgaatgttatagacttagtacgtgttagacgcggaagaggattataaataggtgtatgggcgcctggttatgatctggttatatgtttatgtttatgcttttcttaatgagtctgttgactcacagttattacgtgcatgtgtagataggagccagaactgaaccaaaatgagtctagggttggatgaagattgtacatatcaagacagttaaacatgaagtgttcgggtctttgggacagtgtatgtaaagaccgcttagtttnnnttggaaattagcagttaatcacgtttatttatgaaattatttata

SEQ ID NO: 133040 - DNA, 915 bp, Cannabis sativa
gctctctcaattctccattcaaaacactcaaagaagacaattctgagtaaatatataaagaattaatatgtataatctcaggcttctcagctcattatggcatgttatctagcttagcttcattgaatttatgagcatcattgctatatttaatgctttaaaaaacattttgaatgtttgataaattaataataaatatttatgagcattgttatatgttttgtatataatataaaatactataataatattataataattaaatatgcgtatttgattgttccataataattaccttaatttgataatataatactatcactttctccctaagtctttaaatcaaagacaattttcattttatctgattatcaaaagtatacaattgtgatgaaactatatgtatttatagagttagggaggggacttagctacataatcttagttagactgactctgctcatcaaagacttcagttaattagaaaagctcacacttctgcttcaccttgactttacacacacagatactacgctcattaactattgatcacaaacaatatgagctaacacacaacaaaaaactattcaatcaacttaaattttaataaaaccaataaaaattaatgtaagcccaaataaaagtctaacgctcttatttcactttggctacattaattttaatacatatatatatgaaatatcaaactaattttgtttgaaaacaactcatgggctgaacaataggaaaatatatttgtggccactttaaaaataatagttctttgatagcatctcaacatactgacccaattcaacctttaatattgaacaatgacaatcatattatttttaaatcaacaaaagatattcataatcacaaataccaaagtattaaatcgacatggtcaataag

SEQ ID NO: 133041 - DNA, 829 bp, Cannabis sativa
atgtgatttggaggtttaaaatttttgctagattttttattgaattttgctgcagcaaaactaggcatgaacaaaatgcttttgtcgttaatttggagaagttcgcctactgcagcaattttctagcaaaatattagcaaaaatgatacaagttaaatgagtaatcagcaatacttttgctggacttttgcaaaaatattgctacagcaagcgaaagtgggaattgtttgcgagttgtgaaggaattaaaaaaaataaaaaaaaaaacctaatttctcaaataatatcccaacttctttccctattttctcttatttcaaaaacaatacccatattttctctgaaaaccctatttcccatcttcttccttttccatcctaaccaccatagccacctctttctctcacctgaaccacgactacctcgaccaccatcaaaccccaatcacatttctcattttttctttttgcaccatcaccaaaccatcattgaaattggttataataataataataataaaaaaactaacgtacttattttttagaaaggaaaaaaaaaatcagatcatgcctaaaatataggagaattaaaaataaataataaaatttctatgtgtgatacctcatgataatcaaataactacaacaaattattaccatcaaattaaaaatcaaaggtttaaaaaacgtcctcatgagcaaaagcgatgctctcacctaaaaattttcctatatatttatattgataatagatttggctacacatgatatagcaatgaaacatgattctttgtattaagaataaaactagtaaacatctcgcgtttcgc

SEQ ID NO: 133042 - DNA, 717 bp, Cannabis sativa
caacaagatcttcactacttcttaagaattgaagtcactagggatgaaacagggttatacctcactcaaaggaagtatattgaagaacttctaagcagacatgacatggtaaatttaaagctctgtctaacacctattgtaacaggaaaatccattttgttgacaagtggagaaatcatgcataatctaacaattaacagaagcttaattggggctctgcaatatttatgtcatactagacgagatattagctttgttgtaaataagctcagccaattcttaaaagcacctacaacagttcactgggggcagcaaaacgaatcctaagatattaaaaaggcaccctacatcatggacttcacattggttatagtgacaaattaagcttcataggctattttgatgcagactagggtgttgtgtcgatgacagaaggtcagttggtggttattgtgaatactttggtgaaaccttgatatcgtggtcatcgaagaaataagttgtggtcgctaggtccagtacagagttcgaatacagggctcttgctcatgttgctactgaaattacttgggttgaatccttacttaaagaactacagttttttatcctcaacatttgtcacatggaatgataatgtcagtgtcatagtgaggaagatcgtgaaaaaagacattcaacaagaaggagattcagcattacagaaaggagagaaagaga

SEQ ID NO: 133043 - DNA, 1001 bp, Cannabis sativa
aataataacatagtaatactaacacaatttcttagatttataagaagaaaaatataaggcccaataaattaaataataataatgtattttatgcaatcattacttccacatcgaaatatttagactatcataaaaaaaaataatgcctgaatatttttggttattacagactccaaaagaaaatgaattgttcattttctagaaaagaaaaaatcaaaacatttgaaaccgatcattaaagattcagactcttatttcaaatttgatgatgattttgagatacccaaagtactgaaggtatttatgttatttttcagttgttttagagttttttttttcctttttgctgtcgaagttttaagtgttttttttaagtgtttttttttaagtgtttttttttttttttcttttttttttctttttctgatctatgtcttcggcttatttttattgttgttgtatattttgtatttttatattttttttactgtattcatatttatgtttgtagatttgacaataaaacatggcttagaagtaagaatattaattaaaaaaaagttacatacaattgatactagtgaagaagaataaaaattaaccctttatattaatccaagaataaaaataaaaaattcataaattctgcatgcacatattcatatttttgtttaattctgtaaataattgaatttggacagacgtagatgaatagaggaaagggaacttaattaagtaataaggtttggaattgtctaataaatttatgttaaaagtatttttcttttttttgaaaaggaaatccattaataaaattcagtacaaaggaaatggcaaatctagctgaatagctcgactagtacaagggggagagacctcaatccagggccatccatttagctgtgcaacaagtgctaagggaattttttataaatatggaatttcttaaaagcattttgaaaaatatggacatttagtgaaaaaacttaaaatttggaaaa

SEQ ID NO: 133044 - DNA, 572 bp, Cannabis sativa
atatatatttatactgtgctcctcataaactgttatttcagcattcaaccaaaatttgatatgttgatttgtatggtcaaatttggattgaaaaatatactttgtatgttgatgccaaggggaagatttcaccaatgggtagatattaggatgtaaacttgaatatttttaatattactctaatatagttacaatgaaataaatgtcagcctgttacgttgttgtctttacatttttgccatggcaaggcaacattttaggtgtttctgtatcattatgattcttataactcctaaggacatctttaagttccccgtgtaaaatgagctgtatatttctgtcaactattagtattacagtgcgtctttcaattttcatgtggtttagccctatcacttgatttgcaatccatatggaagtggactacactactcacatgttatgtgtgaaacttttttgctttacatactatagttacacatatatatgttgtaggtttcggaaagctatgaacgagcttataccaatatggtccgtgttcagcagctgtcagaactcgaggaggtttgttt

SEQ ID NO: 133045 - DNA, 656 bp, Cannabis sativa
tttacttttagttataagttttgttgtgactaaaagtaagattttttataataatcttatattttttcatgataaaaaaaaaattaaaattacatatatgcactatatcagtgttgaaaccaaagcctaagagtccaactgttaatatattcataacttttaccgtaaataaaaaataacaatataataatattatataatataatataataatcttcaacacatacaaaagcaaaagttgtatacaatctatttttttttttaattttgattgacttaatttatttccctatagcataaggtaaaaccactaagtcctatagtagatttaccctatatatataaatatagggaagttctgtagtaggggatatactttttacctcatgctataaggaaggaaattggaccaatcaaagattaaaaataattgattgtacacaaattttatttcagcatctacataggattatttcatattttttttttttttttttataagttcatattctttttgtttaatgatgattttttttaaaaaaaaagtactgatgaattttttttattattttattcatttttgtagtggccaatcatggccggccttaggtataggcgggctaggcccgtgcttaggccccacttatattaggggc

SEQ ID NO: 133046 - DNA, 1159 bp, Cannabis sativa
cccctagatcaaccccagccctcagatcaaataattaccctatctaacggctgctgtatatcacagaatacattccgtaaaagtacaataacaagacaaaaatgtgtccctatataaatatatgatgcaaatatttatatatactagttgtggagttaagtgctagacagcacgtaatagtattacaggtaatacctgttaaaatttgtgggttataatcatattttttattttcattaattatatttaaataattattaaaaaaattatattttaataagaacataatatggtatagatttatttattgaagataaggtgattaggtgtcttgtctaaatgtaaactaaattgattttctttgctattatctactaagtaaagtttagaaataaaataaaataaatactactaacaaaaaattatgaaaaaaaagaataacaatacaaaataaattaatatcatatatatgcacatgtatttgtatagtcttttacattatgattatatatttattaataaataaataaaaaaaataagtaaaatgcattaaaaaaaattcaaatatattcaactttgcatcaaaatattataaagttattaattttttatacttgtaataaaagtattaaattttgcaccaaactttgtaattgtatattggagcataatactaaaaaattgatgcaaatatataacaattttttttttttttgccaaatatagtacaatttttacatattttattggagatattcttgcaaacttatgtataattaataaaaatttaaaattctaattgaagtttataaagatatgtgtacatattaataacgaaaatattaagggcactactacaaatattagaatttgcgacggtcctaaaaatgattttttttgggaccgtcgctaaaaaaattaaataactatttaaaaccgccgggaaaaatttaatattttcgacgatttaaaatcgtagtaaacaaaataggctatgttttttaataaaatacaaatttttaggagagtcttaaggacccattaaaaatcgtcacctacttcgcgccgcatatctcacgtgcccacctacttcttttctatttcccacttgcccacttatttcttctccattccccacaccgtaaaacgaaaatcttaa

SEQ ID NO: 133047 - DNA, 882 bp, Cannabis sativa
  modified_base (207)..(207): a, c, t, g, unknown or other
gtgaaatataactatacctcaaacttaaactaatattccacattttttaatttccgtgttttgttcattatataccacagcacattaaaataatataccacaatcttaaactaatgtactacctttcagttttttttaatataccattacacataaaaaaatgatatactattgtgtaacataactatatcaaacacttaattattnaaggttataattgtaatttcatcatcaaatttttaacagaatggacattttgttaattttttataaaaaaggacatttattaacttaattgttagatttagggccattttgcatcttgaccctaaaaatagcccctttgttcaaaattatcacttagaggcaatttttttgataaaaaccatagttgtattatttattaataccatttagagaaagttttagaattagattttgagtgtatgaagagccctctctcatgttgcttatttgaaaataaccgacgccatatcatatcgagacacgtgtttgtttttaccttatggcattggttatttgaaaataactgacatctatggtatagccctgttcagccttcttcttcactttgtcttcttcttcctcaacataaaaacatagcagccagccgtcatcaaaatccacaaataaaaccttcaccaaccaccttctaaaaaccatatatctctacaattttttcaccatttgagcccatttttattttttttaaaaaaaaaatcttctatttttgttacctaaacctatacacccaaaaagttacaattttcccctttttctctataaatcgaagtcatagaaataaagtggtccatataactctggccaccaattttagtggagaaaacgttgaatctcaac

SEQ ID NO: 133048 - DNA, 748 bp, Cannabis sativa
gtgttctatgttatatacaaatagatcttgggtatattattaatttttctaacatttattccaaacatgtaataaattttttgattacgcatgtatatggtaaaaacatacattcatgatattacattttagtgtaatagttagttagtgtttggaattttatagtctcaatcaatttgtattagttcacgagtcattactaagaattacagaaaaagattaagcttgactaaatttcaatctttaatttatatatatttatatgaatatgatcaaatatataaacatataaatttatttactatttttataatgtatcttttttttctctatatatatttatttgaatttttttgtcaccgacagtattaatagggatgattggaggcttttttttcaattgtttattggaagctttgatggaggttgatcggtttgttggtatcaagagttagtcccacattgctaatgtgtgaaaataaattgtgatatataagatgaaagggctatcctcccattaccaattgattttgggatggaacttcattcatcttattcctcaaattctaacatggtatgagagccatatcccttgcgggcaagcgatcctatctgatccgcatctatacagatattgactatgtccactctgatacggttcaatattgatgagcaaaaaatagccatcatcttgaggggggatattgtggacattgtcccacatcaaataaatggtagagaattgagc

SEQ ID NO: 133049 - DNA, 1328 bp, Cannabis sativa
tccgatggtcacttgatgctactttttttatgtacaaaaacataaaaaaaaaaaagggtagcatatatagtccgatagtggtccgatggtcacctgatgctacttttttaatgtaaaaaaacataacaaaaaaaaaataggtagcatcgggccaccattggaccaccatcggactctcattggactaccatcagactcctatcggaccaccatcagtatagatgggaatacggagtatgaatagtgaagttagaagagaagagaagagataagggtataatgggtatgaatattaattgtgcctatttttttaattttagtaagtttgtgttcaaaaatttaatataatccaaatgtaagcatataaattcaaattttccttataaatttaccacttttctactacatttttttatatttaatatttttgatagtatttgatatgtcatattttttaaaacttaatatctaaatccatatttcatttgtttttagctcaattagttttattttttttagtttattttacatttgcattttaaggtttctttttatttgagaaatttacaccaaatattttttttttgaaaaagaaacgtgcatagaaagaaattagacctcacggtcattacaaaggatattgttcgggatagaaaaaacacacaactgaccatactgattgtttgtgaaagcccacttgaccacattatgggggtcataacattacaagatctgttaacaaaataaaaattacaacactcaaataaccgagagagacttatacaaaacttggcatagttttttaatttcccaccgaaactccaattcgttgagtgaattgctaaccaccttagagtcactctctagaataatatacttccagctttcctccttagcaacttccagcgccaaacagaaagcaaccgcttcaccgcaaagagcattagagaactccaatctagctgtatgaaccccacttaccactccaaggtgatttctcaccacaattgcaatgtacatcctttccattccaactttaacatcacaatttagcttgacccacccaagagggggtgaaagccaaacttcttccagacacgggggatggagtggggaaaagagactccctgtaatctgcataagagtggtaaatatagtcaacacattggttaacattggacaaatatttattgtgtaccttgtcattccgcgtctgccaaatacttattttttttaaaacattatatttatactttgacaaggaaatttttatatttatacttttcttacttaattttttttattgttttttacttattaaagtttta

SEQ ID NO: 133050 - DNA, 707 bp, Cannabis sativa
gccaaaatgatgaacaacatgacttcattttcgagcattatttgcatatggagataatattcatgtatgcagaaattttgtttgcaattttagttgactagctagacgggccatattattgatgtgtttgcattgataatgttattaaaaatattgttcataaaataatgtaattaaattgatcatgttgttattgatgtcattgagtgttgacaaacaaataatttattagagtgaacgattcaaagttggcaagtactcaagctacttaagttgattgggtgttatacactgaaagtcaccactaacccttttgaaaaatctagaacaatcaaaatatatttagagaggtggaagtgttttctaacacttgagtcttagaccaaaacctaaaaacaattgctagaattatctacatagcatattaaagtcggcaagtgcaaaccgactttgagtggtatatatataacacctttgatcttattaaaaatatatattattttgagtgacaatttttaaattacaaccaaaaaattttgtaattaaatgtgatttttagccattataaaatattatttgtgactaaaacataatatttagatacaaaattgtcaacaatttaattttagtaatacactacaataatatcacttttactagcacagtccgctactatgctggtaaaaataacttttaccagcgcattt

SEQ ID NO: 133051 - DNA, 896 bp, Cannabis sativa
atttcgatccttcattatatatattatcgatatgattatagtttattttccgcatttcatatcgtatatatatgctatatttcatatactatataatattgtctaacaaattagatatgaattcctaatgagtttggcaaaatagttactaattacacaacaaaataatatatttttaatagataatatttaaaatgaaaagtttttagtaattacactcaattcttatggccataagaattagagagtgtaattagaactcatcaattaccttcaattacactattacagtgtaattaccttgaattataatgtaattacatgatcagacaaatgtacaaaattgtgtaattactttcaattacactaaaatccaattgctgtgtggctttacaaatcacctttgtgaggatggaagcattgctcttcatttatttgagaatttatgttttttaaaataattagtaattttgctcactgaactttcaacaatactgaattcgcccctgaaatatatagcttgttaaaaatttctcgtgaacttttacatttatagaaatctagtccttctattagcttccgtcccattattccgtttaaatgttgacgtttctttgtaaattagtaactttgcctcctaaattttgacaattattaaatcgtaccctttcaaaataaaaatgagaaaggtttaacatttttttttaataaatcttaaacaattaattaaatttttatttttttgaataattaagaaaattgaaagagaaattaaattttaatattaattaaacactttattttttttattaaaaaatcctcttagatattaaaaattaaattttacgcaaagaagtttgaatttatttttttttttttaaaaaaaaatctagatt

SEQ ID NO: 133052 - DNA, 810 bp, Cannabis sativa
cttaaatcccaaaaacaccattaatgatcaaggtttgagttctcaaactcaaaccttgataaaaccctactataatgaacaaaacaatctacaataactcaagtaaccttgattaaacttcagaattccaattcaaaccataaaaattcaacacagccccacaataccaagaactcaagaattacctaacttaagtttcaactaaaaaaaataaaagaaaaaggctagggtagaataccttgagttgaagcttcacaaatcaattagaattacacaaaattgctaggagagagttggattctcagctggtttcttgggggttcgaaagagagggagagaaatacttagaaatttctaggttgctttgactaaaattccttttttcctttttcttgatgttattctatcccttatattgattaagaattaaacataatactttactaaaaaggatatatattcagccccctaaaagtcataaaatccaaataataaaagcaataaaagacctattcacccctaactaaattaaaagaaataaatattaatttccaagggtaaactagtaaatctccaaaccccgaaaataccaacaccgctaaaacttaataatgatatcccgacaaatattctaaaccatataaaatgcgactctctaaaggcccaacgtcgcttccacagcttccgtgcacaattacagaaattaagaaatcacataaacaacatcataaatgtatttatgaactcaaataaattcccataaccgtattatttattaataataacataatctcatacatgaaccctaat

SEQ ID NO: 133053 - DNA, 957 bp, Cannabis sativa
  modified_base (725)..(726): a, c, t, g, unknown or other
atatagttttacataaaaatattgcataaaatacaatttaatataatacaatacaatacaatacgacctaatatggcgttccaaacgagcccttagtgtattgaatattctaattccttttcttttcttgcaggtatacggtacaaatgggtgtatatataatgcactattcacatgtgctaattaattttattggcagaaattaatagggattcaaaaagtaggtaaaaggaatcctatgctaccaccaacccacttgagaattagaaacatgtgttaaaaatgctattttcaacacgctctctcaagattaacttggttgtgacaccacggcaagcttgtcttttaggtaggtgatctggcttatggaaagtagcttttctgaatacatcagcagtctgttctgatgtataggaatgtgcctaatttcgatgagtcctctcttgattaagtctctgatgtaattgacatcaacctcaatatgttttgtgcggttgtggaagacatggttagaagtaagttgttttgcacctgcattgtcgcaccaaatgacggcaggggtattgtgtttgatgccaagttcaacaaaaaaggaaaagatccatgctacctcggttgctgtgtgagagagggaaaaattgcaaagtgggggcccactatccatcgccggccactagggaagcaatttgccactttattttttcattattttaatgctaattaannctaacctaaccctaagtggttttctataaataagtagtgatggctaaagggaaatgatgatgcatctcattccttcaataaaaatttcaagcctcgttcactaccttagccgaaaccctatctttatcttcctgtcttcaaaatcgaagcttcatagtgaaaagagtgagtgcctacacacatcaagtggtactcaatcatagtgtgtaaggttgtgaagaatccagtttc

SEQ ID NO: 133054 - DNA, 1489 bp, Cannabis sativa
  modified_base (380)..(383): a, c, t, g, unknown or other
  modified_base (1439)..(1464): a, c, t, g, unknown or other
cccggtccttcacgtcagcagcctcaagttgtatcatgaagatccagaagatccagcgcgcaaccagtctaccagggatgacatcagcattcaatgacgcagcatcagagaaccagaagaaatcattaccgaaagaactgttcgtgtgaagaggaagaagagaaaagagtacctgatcaaatggaagggcctcgctgatgacgagatcaactgggagaaggtagaggacatgcagtagtttttgcagaagactgaagatcatgcaacaagttcttcgaggatgccgaataattaattggggaagaatgtggcgtgctgccccatggcacacccacaatgggaccattttgtaacatgagcatgccttggtacttgatcannnntcaagtcttgcaccaagcacctcaattagatggggagacttttggtgattagctttcttttttttatatttccattcacatatgtatagagagctataatcatatatgttcctggaaatcccttgagaccccattaagctctttagggggtgacttactgacttatgaagcaccttgtcaccagcatgataggggccctgatgtgtactcccttgccctatcaaggacatataataataaaacgatatttatccatacttcttgtccatgcttctatattgcctttgtgatgcctatttgttgcctttgttgggccattatgtgccatttgtctatatgtttacttgtgggttgtgtgagattgatccttagggacgatttatgtttgcttgctcatgctttttattggcactcaatatgtgcgagacatgtatcgtgcctaacctttgagtttgtttgcctgtaggcgcgtttaggctgacttgctagctcggtgtgccagcaagtgccgcatgttctgcctacttgggactctccaaatagtcggcttgtgacaccatgcatcactcacgaacaacaaggaattccccaagtgtaagtcagcttctgagtctactctccatgctctttggagctaatgcactttagaagagattagacatgagctttcctttttgatcaagacaaaacttcctattcaagctaacttctatatgttgatctgtgagtgtgctatggtccttcgtaaagaagaacttgagactttcattgtagttctttggcgagtttggttcagaaggaataaatgggtgcacgaccattgtttgatagagaaagagggtgtggttaattgggtagttgactattttcttcgtttctttgaagatgatgtggtagacattctacttcaatagttgtttcagcccctactgcactagctacgttccactggcatgttctttcgttggggacggtgaagctcaacgtggatgcgaggctcgatcttcttgttcatcaggctggttgcagggcgtgttggaaatttattttaccagnnnnnnnnnnnnnnnnnnnnnnnnnnttattaacatcctaaataagaactt

SEQ ID NO: 133055 - DNA, 771 bp, Cannabis sativa
atttgtctatcttcctttcctaactccttaaaaggaaaaaggaaaaaggaaaaaaattacctactctcatgagaaaaaggatctgtttggggttggggaggagctgcaacaaaagagttctaagtaattaagagaagaaaattcagtgattcttatacaatttcagcattagtccattaagaatagagaaaagaagacatttttcaagggagcacatctatttagtgaacaaatcaactgaaagcgcaaacaaatacattcataaaccattgcaaaggattacaattctctcaaattaccaaatccaatttactgacattttgcagaattctcatgtaaaaacatttaatggaactgttgaggtttccttaaacttccctttcacacaaaactaaaagcaccataccaaaccaaacagattatgaaaggaggaacatactcttctgttgcagctactgacaaacttcagaagcaacaacatcctttggatgaaaaagctgtccttcaagggccaatccttaattttatgatgtcccatttgcctggaatgcaggaatagctagcaatcgaatgaagttatattcctcgagagccaattccaacttgtcaagactgaatctttcattagatgagcatcttcctctgaaaaagggaacaaaaaaagcagcaaaaaagtaatttggtatgtgctcacttctaattataacttttatttcttgacatttgaattactccttaaaatttgttacatgcaaataggttactaagtgc

SEQ ID NO: 133056 - DNA, 794 bp, Cannabis sativa
  modified_base (696)..(698): a, c, t, g, unknown or other
atgtccaaataactacaacatagacgactatgaaaaaaattaaactaaaaaattcttttaaatttcgaaacagataaaggttacatcgatagaccccttttaagaggtgcactatataatttttttaataattttcttatataaataatttaagaatctttctatataaggttgtacataattttttgtaaaatcgccgcccaatccaaataatctgtccaaaccaaccaagataatctgacaaaaaatacaaaccgaaaaactaaacgaaaatataactcgtctaatttttatatttggcgggttaaaaataatactaaccctcctatatcaaccggtattaacccgagcaaccgactaagaagaattatatatatattatatatttatatatcatataatatatatgactatttaaaatatataaagttttaactaatatgtttctttaatagtgatttatttaaactttgaatacaatctatatatatttgtcttattattataatttactaaaatataataattgaatataaaaattaaaaaaatatattagttgtaatatcccaaaaatctaactatgtcaataaggcatattttgttaaatatgaaataatatgtatatttaatgcataaatagataaaattataatattactaagctaattatgtaagggtaaatatcattttggaccnnntgttttgcaaaagttactgattggaccatgtgttttgttaaatgataaaatggaccatgtattttccaaagtagtaaaaataggaccttgagctta

SEQ ID NO: 133057 - DNA, 539 bp, Cannabis sativa
  modified_base (493)..(500): a, c, t, g, unknown or other
gagaggggggtgatgtaaatggagggtattttagggatattataaaatgtgtcatattccacaaatatcaaatattataagtttagggaaaaaaaaaaaattaagcgtatgttagcataaaaaaccaaatttctcgaataatattagacataaaaagtactttattatgtccagcattgctagatataaaaaggtaagaggacatcatatataattattaatttttgttggtgtatacaaaattatccaaacttatataattaataaataaataaataaatatttcataaatttgaaaaaaaaaataacaaaaattgcaaattgtgtatttctttgcaagttgctagacgtgatggatagatagatttgatggcatcaacatctaccatgcatatattaaaaaggaaaataattaaaatttaaatagtacatataacaagagtaaatatcattttagatcatgtgttttgcaaaagttattgattggaccctnnnnnnnnttaaatgacaaaatagactcagtattttctaaaatagta

SEQ ID NO: 133058 - DNA, 676 bp, Cannabis sativa
tttttttttttaatttttgttgatatttcgtgttgttgttgtgtttttttttagaatttgtttggtttttgggtattttttgttgttggttttagtgttaatttttccttcatttttagaaactggtttttggtgtaaattttttagcggttaattggcactccagctatacccacctgcccaattaattataaattatatatataagtcttcctcaaacaaataatggaaaacagagagagagaaggccatatcatatgtatatacccttgcaaataagtcaggtgttattttgaaaatgggtttctgtgtttctgtgtttagtatgggttaaatttcttctaataatggtccccactgaaaaatatggctttgatatgttttttcaaaatcttatataactattgaattcgtttaagaaaagccatagtcataaggaagcaatgaggtcaacagagagagttgttgtgtgtgtgtgccctgatgttagtgcactgtatattgttggtccacttttttagtgaaatcattgcaactacagtttctttctattattacttctacatgtcaaaaacccatttctagagattgatttgtgttatttgtgcgttatgtgattttaaaaattgtcattggaaaacctgtttctatatgaagatcacagtttctatatcag

SEQ ID NO: 133059 - DNA, 874 bp, Cannabis sativa
atgcgtttctgagctttatttttttccaatatataattgttatttgtttttgcttggtattttcctttcgaaaagagaaaagacaatcgtcattttaatcttgtgtttgtttgcttctataacaaaatagtcatattatttgtgctatgcatgcattcagcagcctaaccaaaaaaataaaagacaataatcattttcatcttatgtttacttgatctataacgaaacagtaaaattatttatgctaatggatttaacttgatgtatccatggtaagtagtaaatctttccacttattgttcactgagatagcctttaggaggacttgatttactgtatacagataatcattgcaatatactttcatttttatgcaaattatggttctttcatttaaaaattgttacaaaacatacactacttactcatcaacttggcaccaaaaagaataattgaggcgttttaatataaggactggactgtattgtaaacagacgtaggtgtagcaaacactactactgtcacagtggtaattgctcgctacattgaccagggttcgagtccatttggctagcttctgctatgaggatacatatgcactaacgtgaaggaggggttcttcacagtcatctggattatatgatgaaaatatgtgcgtttctgagctttttatttatttgttttatttataccatagtaacatatttttttttttttttttgagaaaataccatagtaacatattaaatcaagtgtgtatacataattgacatattaatatttaatgttgtaataaataaatagcaccagtggtctagtggtagaatagtaccctgccacggtacagacccgggttcgattcccggctggtgca

SEQ ID NO: 133060 - DNA, 1052 bp, Cannabis sativa
aattttttttaaataaaaaaatatgaatattatttatttttattttcaaataaatgtataaaaattataaaaaaaaaaatcaaataaaaatacttattaacatcttaaaaaaattcaagtaatttgaaattacaaaactcattatctataacacaaaactgacaaaatcataataaaataagaattaataattatccaatcttaaagaaaaatatttaaaaagttctaattgttaataaatttcactcattatattcatcgtcaattggctctctatatatgatcattaattttctcacgaacattagccattttacgaatttaatttcttgaaatgttaaactcagcactatcattcaaagtttcgtgggtgctttgtatagtagtatcttatccttaaaaaatgtctttatctccatcaaaatatatgtatttttctgcatttatccttataaaattgtgaatttcacaacaggcaatcacaatgtatttttgtattttcagatcatatgaaggcatttgctttaaaatgggaaaataagtctttaataccccaaagtatcgctcgatgacatttctcaaagacgaatgtcgataattgaacaactccctttttcctaaaggattacgatctgcatattaattcaaataatatatttttccttgatataggaaaagaaaaccaagcatgtttgtatatccagaatcaaccagataatatttttcctaaacaatgttaattgatattagtctttccatgtaaatattaatacaaaataatgtcaataaacataataagtttgataacacctaccatggggtagagctaggaattcataatatgggtttgtggcacattttgaaagaatttgtgcatcattagccgatatttcccatccagcaacaacatatgtaaacttcatgtcatatgaacatatacacattacattttgagttgtatttgttgggctttgtgccttaaataaaactctatttcaatgtaatcttttcttttcaattatcaataaagaaacagatttaatttcattact

SEQ ID NO: 133061 - DNA, 971 bp, Cannabis sativa
acctaaagtgttgttgtcttgccgcactatggaaaaaatagcaataggacacactccttttgctctaacctacgggtacaaagccatgatacccgtagagatcacactaccatcacatcggagactaacatatgaccatcataccaatcaccaacggttggccaagtctttagatgaaattgaagaaataagagataggtatgagcttagaaaggcggtgtatcagcaaagagtcacaagacatatacaactccaaggttaaagacataaaacttaagtatggagacatggtgttacgatgagtatttctaaacacgaaagacgcaataacaggagtactcagaccttcttgggaaggataatacatcgtgactgaaacactagaacccagaacatacaagttggcacactatactacaacttaaattttttaacttgaatcactaaatatatatattttatataattaaattattattaatatattttttaattttattatatttaaaaaaatcgtgtcaaattcgtgtaaagcgagtcgtgttgtgtttgactaattttatttcgtgtcaagtatgttgacatattctcgactcgcgtctaattttcccgaaccttacccataaaatttatgttgtgttcgtatttatttactgcgtcaaaatctactttggtgccacccctaatcttaagtataatgttgtttaaatttataattatatttataaattaaacaaaacctagagcccctgaagttgagtcttccaaagcatgatcagtacattcaaagaagtgggagccaatattgaataaattatgggatattattaagatattatttgaggcaagtacattattcaagaacactctaacttgttgtaagtaaaagttaaaatataaagtaatttgtggcatataatttttaattgtaaataaattatataagtaattttttatggtaaaaatattta

SEQ ID NO: 133062 - DNA, 707 bp, Cannabis sativa
caaatcccaacacttatttgtgctatgtttttctaagaattagggcattattctctgtgatcatgtccaaatttaacccaaaatttacactcccaaaatccttagaatcagattgtcctcaatttttagccataacttttaagcctcaaacccaaaaatctgaaaccatacttgaaattaataatacaaaaattaggaaccacctcattaggtctaatcaggaggaagcttctaaccattataggcgattcttacaagaagtcattgaggttagatgttgttatttacgagaagcagcttgacttgaatcgtctaatgtttttacctacaatcactgttactttttcactaggtgacttggattttgaaatcatggctcaagaagctcgcaaatccaagaccccatagaaccctattgttaccttcgaaaaggaggtacaacaaatatcgatacaagaaggagcaagagaaccttcacgcccggatctagggtgcctagaggaaaggtcaagagaaggcaaaaaagaaggcaatgaccaaaaattcatgcaacctgttcccaattccaaactcttggactctctgagctagtagatttggtgtccgtaagtcccttttaaactttcattatgttccttcagcttaggattgttgggattctttgccctaaataaaatctatttcaatataatcttatttgttatcaa

SEQ ID NO: 133063 - DNA, 772 bp, Cannabis sativa
tccatgcaaaacactagtggaggataaggaaatcatacatacttgtcttgtcttatattattatattatctatttattttttttaattatggtcactgtgaatacattcattcattattttatgtttggtttattgtaatagagatcgtaatgaaattaaattatccattataatatttattttgcttttaaaaataatataatgagaaaatattgtatttatattacattaattccggttacattaaaaaaattatgtaatgagaattatatcacaaaaatttaaataaaataaaattaaaatgactaatatcttttttagataaatataaaaattaaagtacaggataattttgtcaatttatcatttattctaatattcattctaataataaaccaaacatcttaatcaatgctcattactattcttattccgtattatattattattaccattccgtttcgaaaagaaatattactattaccattatcattatcattatattctaccaaaccaaacatcacctaaggtgtattcttttattcttattgacatccattcacttgtttgatattagtaatggatatttataactttgtgtgtgttaatactgttataatttgttaatagtgttataattagttttttgtttttaaaattagaaaagtataaatttgttttaaaattatgttttatataattattttcactttttaattttttaattaaatttttttttaaaaaaacgtcacttttaaaatttttttaaac

SEQ ID NO: 133064 - DNA, 721 bp, Cannabis sativa
ccggcttcaaagcctttgagcacccagaccttctgatggattgggtcaaggttccccccatgcatcgcaccacccatactcaactcttcctgaaccacgcacaagtgttcgctggttacaagtaggaagaactgaacgtgggagatctggtcacgatggccagctgcagaagggctaaattgatctttgagagccaatctgtggaggactttaatttgtctaaggttctctgccccaacatgcgaaacccagggagtgagaaggcgctctgggaagacattatcttgtccgtggaggacatatataacaaatacaaatataagagggagtaggagctcgcatttgcccgggctgaggctgatcctggaaggatcccccaggaggaagttgggaaagaaagagcttcagtccggcccaaatttccattcctggttcctaactctagggcccctggtgcaagcacttacggagcctgtaagtctcctttgaacattcagttcgtcctttctgtccaagactatgctgacctaaggccaatggagtttgataacagattgtatagtttttggatgccccattctcggtggggcgataacgccaaaagcttttatttctcaaacttaagtcactttttgggtcggtaccagatgggcttaggtcctcctgtaccaattcctttggatcactcctcctatacgccttccagttggttccttccctc

SEQ ID NO: 133065 - DNA, 655 bp, Cannabis sativa
gttgaaactatcctaaaatgatcgagttgtagttaaaccatctccgtgagagactcagtcaaccaagtcgaaaaagaaacaccttgcccatattgatacctcatttaaagtatttcaattgcaaattggtatttatactacttcaatttgatagcttcataaggagcatcccttagccccatatgagggagaattcaaaaaattacatctcataaaagagtccgtaagactactacaatgaaactaaaattgatatatttatttatttattagatatacacttattttagaacatagcatattagagtgaccattttttaaatcaaattttctcacttaagcttcttccttgcaattagagttttcttcaacctagtgctgatgtggaatttttgaactcttttgatgagggttggtcagtttggccttaggctcgtacatgactttagttgaaaggggaatttttcggttggtggttaatttgtgacctctctatttaaaggtgctctcaagtttttgtctctttagctttccatagtgttatcttaatggtgctcctactttatatatttatgatatttttaagcaatataaacattgtatatgagtgtgtgtatatgtatactaggtgattgttacgtgtcaagccacgtag

SEQ ID NO: 133066 - DNA, 1335 bp, Cannabis sativa
attatattgaaatgagttttattcagggcataaaacccaacaatacacgtatatatatgatgaatgctaggccattgcataaccttacttgagtaggtaatatgatatatggatactaacatccaagctatacctatgaggcaaccgttataaagtaaggactatgaatcgaaactgctatttgctaggtcctaacattatcaattttctaattaggtaatgataatgtgatgacactatggacataatgtatgggctcacctaattaggtgatgcgatattcctggcaacgtatcgggcgtaggtatgggcatcagtgatagaatgaaaccattgtagagtttcttcctggcgacgtatttggcgtatgtacgtgcgtcagtgatagaatgagaccgtgtagggtttccctattgccaggttatggcacataatgaaactgttgtaaggtttcttcctagagacatatcaggcataggtacgggcgtcagtgacagaatagaaccatgtgcggtttccttattgccgggttatggcacagatcgaaacccttgttgggttttttcctagcgacgtatcgggcataggtacgggcgtcaatgacatatgataagtactggtcgtaggtacaggctaatctaattagacgatgcaatatattagtgccaagttgtggcacgggttcacctgattaggtggtgcaatgatattatatatgatatatattgcattatgagacgaacttgcctgattagaaaatgcaagcatatgagcatatctatttctatgtatatggatggttatattacctactgttgaatgttatggtataattattttatgataatgaaatgtataattagttatttaatatatccattcttattacttttcttactgagtctatgtaactcacgggtgctatgtggtgcaggtaagggcaagaaaaagttagaagagccatgagatgacggtcttcctcagtaatgtacatattgacctcaccgacctgtgtgctgagtttctaggagttgttttggactgtgtatatctgctgtattttgaattgtatatagtcttttgagtaaatcttttataacagggatccccgaaatacctttttactaccgttatgatatctttttttagtgttttatttttgtcaagtttttaatattatcaaagtacttaataattaattaatctattagtattaaactagtttataacattacacacgtggctcttgggttttgtgctcaaaataaaactcatttcaatataatcaaatttactaattaatataagatcagaaatcacttttatgttgcatgg

SEQ ID NO: 133067 - DNA, 1178 bp, Cannabis sativa
  modified_base (734)..(734): a, c, t, g, unknown or other
gaaaaatcgttacaatatgtaacaattgaatagtcaccctattgtttatatatggttagtgttaaactattgtgtgtactttttatcttattttctctttctttgtatcctttttgttctttaaatttacaatcaatatggataaaaaaattgatcaactggtttatgttaagaaaaggaagagaggtgctgaaaaagttgagccttttaagaagaaattgttctatcctgagaacatgtttttatttattttttgttgttagttatgttttattttttatatgttgttgttgttgttttgtgtttttttttttttttgatataagtatcgttaagtataatctgatacattgttattatttttttaggatctagatcttatagttgattctttttttaaccgaaattggttcaacaaatcagcattgaaactgataatataaatagtaagttaaataattcgtttcatgtttatttttagttaataatttattttattcttcctcttggttttgaaatatttatgttttaaattttatttttttatagggatatttgcggctaaacaacttgaactttacgttttgtaataattgaccacaaaaattgatttttgggggcaaaactacataaacctccattctgttttgctctgtacccctccgtccaaaaatcatagttaagtgccacggtggactatccacgtgtacacacttgtacacgtggcaaatttntagtggtccacgtaatattaatttaaaaaataattataaataattaaaaaaaaattaaaaaatcagaaaaaaaatattaaaaaataatttaaaaaaaaataatttaaaaagtataaaaaaatatacaattataaaaacaatttaaaaattataaaaattattttattattttctttttttcttttttttttctctttcctttttattttcttcttcttcttcttcactaaaaaatcctaccaaaccctaacgccgacgaccacccccaactcccttgtgcggcatcggagccactaacggaccaagagaccacaaaattggaatccccaagccccgaaacccaaaacctacctcctcctctccccaatctctcgaccaaacccggcgaccaccacgaagagaaagaccttcggcgaccaccacgaagagagagagagagagaga

SEQ ID NO: 133068 - DNA, 2317 bp, Cannabis sativa
  modified_base (518)..(530): a, c, t, g, unknown or other
  modified_base (599)..(605): a, c, t, g, unknown or other
atttgttaattaagagaatttatttaaataaattaaaaaaaaaattatttgataattaattttaattatgaaataaatagttttgacatttaaatggctgaattggaaaataagttatttgtaaaagagaaagataaatagttgtataaaatggaaaaattgtaattggtgggtcggcatcctaatggttgtccacttaagctatatttagccatttatttatcactttttaatgccatataattcaaatctaaacctagaaggatttctataaatagatagtgatagactcaatactgacagatgatgaaaattagcctttcagtgaaatttgagccttctgtcgtctctctctaatttttgaatccttttccctcttttcttcgacaattttcatcccttatagtgatagagtacatgcacacacatacaaagtttagtactcaattatagtgtgtaagactgtgaagaatccaacacctgaaggagaatgaggctcagattttgataatactctnnnnnnnnnnnnnacaagggttagagatctaagtagaaggagtcttttaattccgctgtaaccaatgtaaggtttcttaaannnnnnntgtgtttaaattctattgttttagaaattcatatttaagatgttaaacaacatacatggtagtaaatctagattcttgtaaaataatctccaacaattggccatagagccatggtaatgatttacttcatgaaatattgatttcaaataattattgtgtttatttggatgtgttcatattggtttatgtgcatatttgatgattgtatgaaaattataattttttacgatgcaaaatatttttaatttcgttctaaaaatatatttttctagaatgtagatgaaaaattaataaaattagaattttacataactcaatttgaatttttatgaattagttatgattttttaaatttagataaaaatatctaattttggtgcacacgtgtgcgcgcactgagtaggagtgttcctcggtcattaccgagccttcatacaagccctatctgagatttcttggacaagggctgtctgcagcccatttcattccgagtaatctcggtctgctaggctgcatggtgcccatttccacaccaagcaaccctcatatgcgcgcgcaggagtatgttgtgcgtactcttggtgtctaattttctttttgtgacattttttgtttcaaaaatcatttttcagtgaaacaaaatttaaattttggtagaatttttatagaatccaaattttcaaattaaaatccaattatcagaataaaattaattttcattaattttttttaattaaaattagttttaggtagtagtagcatttgaatttgaaaatttaatttttcacaagctagcctaatggttaattttgaaatttttgattatttttgcttgttgtattaattttaattataagatcagatattacttatcctattattaaaatttgaaatgatcttattttgacattaaaatattaataaaacttaaaaataatcttgttaaaattttaaatttgctaaccctaacagatttttcaaattcgttattttcaaaatatattttatttatttaaattataagattagaaaaattttaatttttccattttatctttatcttagtttttatatgttttgtcaaaataacatgataattttgaaaagatgttaactttggtttgaatagatattttagggttttccaaccataaattttttcaaacttgggatattttattttaattttttttaaataaaattgataacatcctaactatcaaaatatcttatttttaattttgtttattttgttaaatttatttaattaaattataagattagaaaaattatattagaaatatctgaattctcaaattaagatattatattatattatcgtattagatatttaattaatttaaattatttaaataaactaaaaatttgaaaattagttagatattttaaatttcatttagaaatttagatatttagaagatttattaaattttaaatattttctaataacctaaatttaaattgtagttaagatatattttttaaaaatatttgatttttaaatagagacagcttaacctactttcaagatttttgttacatgcgtgtttctttgtttatttatttaattatttattcaaaaatgtttataagaaaacctattatttatttgatctaaatttctatgattaacttgttgatagatccaatgatccgattttaatcatagtccaattgtcaatagatcttat

SEQ ID NO: 133069 - DNA, 944 bp, Cannabis sativa
ttattaattttttttttatgtattttaaattttattccattcctattcccatttccattcctatttctatattttcattcctcccaactaaacgccccatagtgtaactctataactaaaagagtaccatgtaatacaataaaatggatttttatgtgtttgatgatgaagatgtactcgatcggaacaagttgataggattacgtccccatgtccgaatggcaatgtgggccccagcaataaggttcgacagggacttaataaatttatggcttatacatttttttactattgcttgatagctttgatgggtttaatcggatcctcatggttttctcgatgagtagtcactattgaattttattgagttttaatcgagctcatgatgaaaatcacacattaggccctattgagttcttattgaacctaatcgagttgagtatgttgatcactagctcatacaaaacttatcaagaacccattgaacacccatcaagctcatcgagtacatcttcaacaatcgagtgtgtagcaaatacatataaaacctatgaagcattaacaaaaaaaaaggttgtaaaacaaagcaaatttaaccaaacaaaattaatgggcaatcagccaaacattgtagtaggctagaaagagagatcatcgtacttagactaaatcataaattaagaagtattttagttatattaaaaattatttaactaaaatcaaattcaaaagtgaaattctaatttatttttaaaaatacaacatctaaattattattttataaaaatataataatgtatttgggccaaattgatatttttcttaggtgcttctataatgatcccttaaaaagagtaaatcaatacatttcttactagtgaaaattacatcaaatatgagatttcataacaaagttagaaaaatatggcatttataggtttgcc

SEQ ID NO: 133070 - DNA, 607 bp, Cannabis sativa
ccagtggtttctcccctacaacctttcttggggatgacgacaccaaccttttaatgcatgactttgctagggctgaattagatcgcctgtgtaggattagttttactgctttggtcttgcctgcagaatttcttgttaatgttctaaaacctttatctgtctgtttcttaaagcagctaagccaatggatgagctcttggaggccctcgctcagacctacagtcccgacccggccctgcctcgggcacaagactggaaggtgactcctgggaggtcttcttctagcttccccttgggcaaaattgtattgattgatgaggatggggaggtagaagaggaagaggggagcgagattctcacccctctagaccggaagcgcaagggaaaaatggtggagaccgaggctgccaagaagcccaagagggtcgatactccggctcccagtccagattcagggatccctccagaggcggaggagtacacagctcctccaagtatcattctaactcccgttcctactgacgtggaaagaaaccaactccggattgccaagcataactattccacggcagaatatgttggaaatttttttaccaggatcttagat

SEQ ID NO: 133071 - DNA, 1299 bp, Cannabis sativa
gatgacccacccctgtgcgctctggccgttagcctcctaagccccgtgagcttcgaccatgagctctctcgggatctctctcttccctcactttgctactgttgaactcacgctgcaccaaaggtatagttctatctctctctatatatatatatctctctctatcactctctcgggatctttttctatttcttttgcatgtttcatagaaaaaattaaaaaagactattgttccttaatctccaataataatctatttctatctccatttatctacaaattaaaccaatatacatatatgtcaatatgtatatgtactcatttttagatttacaataaaatataaatgtattcattactaaaatagataaactagtatatatatatttaaatttatgtgtatgtgtttatgtgaataaaataatttttcttgtgtttccattataaaacaaataaaatgcaccaactcaatatatataattaagtacgtattagattgaattggattggttactttttgagatcaaataacattgaatctgcacaagtacatattttaatttttttaatctaatctaatccgcacaagtgtagattttcacattttacgaattaaattgaattgaattatgcgaattaaattgaatcgaatacttcgtgaaaagcatataagtcataataggtaccaaacatagtactacataaaatatgtactatacttcatatattattagtctttttctttcatttttttttttgacaaaactccaaagaattagggaatatgaatgaagtgataggtccatgtgggtattgggtcattcacttaaaaaaagaaaaaagcaagatataaataaagagagttctctctatatatattgatcatcatctaatataagatcaatcaaatgtcaaataaaatatctaaaaatcctaaaatatctcaacaagatgtttctctttataatttctttagagctctagagaaatcgaattcatgggcccctatatatagcttgctaagaaaatgtatatataaggctagggtaggaggagggggtccaattccaagacaaaaaaccatgacttttgttttttgttttttatggctttgcttaatatgcatgcacttgttaattaagattgatcataacaagtacgtagaactatgtgcgttaattaagaagtagttaattagattgatgtatataatgggtaaataacattatagcggtacgataagtattttcagcttaaatacttaagtttaactctcgattgtagataaatatctaagtt

SEQ ID NO: 133072 - DNA, 1293 bp, Cannabis sativa
tttagtgtgtcaaaaattaatccaaatttgccacaaacaaaagttataaaaatctaaatcacaatataacatttttgtatgacaataaatgtaatatttttatattatttttaatattttattactaaatttaattattacattaaattataaatattttatttattttaaataaaaataataaatttttaaaataaaaagattacgttatcccaaaatttacactagtgacgtgaccataaagtagcagagatgtaccatgcgtaccaaaaatttaattggattgggtaggatgtaaatcttaaaaatctaattggatcagatcgattattagataaaacatccgatccaattatcatcctgtagtcatcccattatatttatatgtttttaaaatatatttattaattttatatatttatttaaaatatattaattttaatatgcatccccacacatgaaattacatagaattttttttattttttatctatcacttctcacatatttataacattaataaatatattttaaaaacatataaaaaatacatatttattaattttatatattttaaaaatatatttataaattttattaacttgtatcttattattatcttataaatgtcatgttatatatattaatatgaaaattaaacttaaattggctaatataattgttattagatagatttatttcagtttaataaaatcagttaatccattaaatggttgaaaacgatttatttattaaatcggattaaatcaattaactcaattcgattagattaaatcggttcacaaaatacaacatttaaaattagattagatccaaatcaattggatgctattgaacaccctaagcaccttaaaattttccaaaagtctcaatttcatccattttgttcggatttgacttgttgaatgtttacacaaataaatatatcaattttaatattttgaactagttgtactttgtcgagagtatgcccatattttatatcttcgattctctaatcagaggcaaacaattttcttgatgaaatatcaattctaactaaacatggttgaacacatcctaaccaattaaactcattttttaacaacaatgttattttaaccagcaaactcatttcacttattttgttatttaccaaataaaattttactaatatagaatattgagtgattctataaagcaccccactaaaatgataccatccctagatgtttcgtcatatgaataatgttttagttcaattttttcatagtcgtatacattatatttatt

SEQ ID NO: 133073 - DNA, 1511 bp, Cannabis sativa
aggttgttggcaggggaggattgcttgagaaaaataattgtcaatctcagttgatggtatggtagagatgaatggaaaaatattctcatgaaatgtaacatctctagatgtgtatatttgatgagattcaatatcaagtaggagataggctttcatgccggttggatagccaataaaaatagaggcgcggctcctaggtgaaaatttgtgccgtttagaacttaaagttgaaccataagctaaacatccgaatgatctaagatgatcataaataggtggtttttggtataatatttcaaaggatgtactgtgatgaagtagcacagaaggtgtacggttcattaagtaagtagccgtggcaattaggtgaggccaataaaccaatgggagatgagattggaattctaatgcacgagcaacatttagaatgtgctggtgtttcctctcaacaacggagttttgttgaggtctctcaacacatgagtgataatgtatgactcatttggatgcataaaaggaggagagatttaattctttggcattatccgaacggacaaccttgatattgagagcaaattgagtggaaatcatggcaaaaaaatctgggatgattttgtttacttcagatttcgttttcaacatatatgtccatgtgtatcgagatttatcatcaacaatagtcaagaagtatttataaccttcagtactaattattggaaagggaccccaaatgtccatatggactaaatcaaatatatgagattccaaatttttattggatacaaaagggagtttcttttgttttgcaatatgacaaacatgacaatgagtattgtgaacaatggaagaaccaatttttttattgaacatgtttgaaatgtacaaagatggatgactaaggcgattatgccattggtctacatttgtattattgaaagctaaactagtagctgctatgggagtgtcttgatgtatgagatatagctttccgtggcgtttagctgtcccaatcaccacactccgagaaagatcctgtataacacaattcttggtgttaatgaacagatagtagtttgtttaatcaaccagggcagtgacagataatagatttaaatgaaaatttggtatgtaaagaacattttcaagagtgagatattgatttatgcttactgtccctatgttggatataacgatttggtgtccattaggcaaatgacatatttgggaaaagaagagtctttgaaagatgtaaaacaagagagattagagcacatatggtgagtagcaccactatcaagaatccaattaaaagtatgatttgaaagagatttaccagcttggttagatgatgcattgttcatagcagggtcaatctgaggaatggcctgactaagctgctggctgagcaataaaatgagttgctgacattgcgaactgaggtcagtagcaggtgcagccttggcttgagcagtagtgtgatcagttgggttacttgtagaggcttgattgac

SEQ ID NO: 133074 - DNA, 1337 bp, Cannabis sativa
cactaaaaatatcattaaaataatagaatatgatattctaatttaaataacaatataaaaatagcataaacacaacacaatttgattttaaaaattacaatctcattctatctttgaagatgcttcaagcaacttggaataggcttggaacagagattttggataatattatcataatgtgcaaaccttcatttctctgaggaattaattctacatccttatattttttatttctattctttaatgttgttattttttttaataaagttgaggaacaatacctgcaaaacacagccaaacacaaagacaagcaacaccaaagagaactagaagaaaagcaataaatcaaacacaatgaaaacataaataaaacgatgataaacaatacaagagttacttagttcagacacaaggcaaggcaacagtagtctttgaacctgtttgacataatttttgaaaaatttaaaaattatttttttaaaaaaattgtaataaaaatgtattttgtaagcagttaaaaacaacttattaaataatttatggagaaattaaagctagtagaacccaactttaagaaaaaattattttgattaaaagactataataaataattttgtactcaaaatgtatttaattattatatattacaaaaataaaaatattttttgaaggaaaaaaatatttaaatttcttatattttttattttgttttaaaaagtattttatatttatatttatatttttattattaacaaaccataccaagtaagaattttttataaactacaaaaaaaattacaagtgataaagatataataaattatttttatcaaatgtatataaatttatattatggagaaaaataattaaaaatatagagaaaataaaaattttatataacataattttttatatatttgtgattataatgaattagattataacattatcattattataatagaatcttaacaacttgcaacactttaaaatttataatttaccaaatactcagctaagtttttttccacaagtctgctacaactattttttctcacagtacaactacaactgtttttttcccaacacaactatgccaaactagccctaagtccaatacaatatctcagaagtgattactgctggggtttatgccttaaataaaatccaatttcaatataatcttatttacttatcaataaaatatcagagatcatttttttactattgtatattgcttggttcacatgttattttcataattatttaattaatatataaattctactaaatcctgaacatatagttattcacgattatagtgttgtcaccatagt

SEQ ID NO: 133075 - DNA, 589 bp, Cannabis sativa
agtgggtgtaaatttccctaaaaaatatgcaactaataaatcaactatttagttgcttgtgataactaaaatgacacttagaagtaactatgaagttattttttctacacagagcacaaaaatgatttaaaaaatattgtgatggtggaatttttagtggggactaatgatattttaactagtaagttaatcctatacaccaattacttgtttataaaatttttacttctataattatttgtatacattattgcaatttaattaatgagtatatatcttgcaaaaaaaaaattaatgagtatataattagtattgtaagcaattaaataattactttaattctaaagaagataagaaatatatagttttcacatctcaaaatgattatattcaacattaaatcgcaatagtataatttttaagactaaattagcggtgtaattaattttttttaagttagaaaaaaaaatatttattttattttattatttctatgtatagttacctaattttacaagttcttcaaaaaaaaatatatctttatatattaaaagtgcttatctaacgacatttcttggtttaacagaat

SEQ ID NO: 133076 - DNA, 1015 bp, Cannabis sativa
  modified_base (67)..(70): a, c, t, g, unknown or other
tatatgggacctgatacttagttagaccaatagcgatactgacacgtaggaaggtgctaggcaccannnntgccctttagcatttctctaaaaataattataattattagaacttgaatatctagataaaaaatatttattattgttattatcattaaattatagcgatattttaccttctatactttttaacataccattttaattattgggctttttaatgtaacatactttcgtgcttaaactcatatttttcgtatcgtatcatgcttaagtttatatttttttatatcgagtcgtgctcgtaccgtataaaaaagcctgatccgtatttacaagactgaggttgtatttccctccctttccttatgatgtccatgtatggttttaattggtggatatagtctacactcgtgtagcggacttggccttggtttgccattatttcatcatctatgttatcctatatgaatgataattcatttttaacacactagtctatttatggtaactaagacagagttgatcactcacgtgcaaagtacagaaaaatacaatgaataaaataataaaaaatgcaaaaaatcaattagaaagtggtacaaaataaaaaagtgatataaatcgttagattataaatataggaagggcttttttcagttttaaccaaaaaataactatattacaaaaatactttcagctccaaataaacaaatatacaacacagataaatttttttacacaaataccacttacacacacattcaactcaagatctatgcttcctgggcaactatcgtgcaaccatcgtgcaattacgcagcaacctaacacaactgaaacaaaaatttaataagatagagaaccaccattaattttggcgacttcacctgagaagacggccagaatcaatcaaaataggggctgctacgaattcataaaaaacgtgtagaaaaactactaataaactaaaattcaactagaaatccaatttaatttgcataaaactaatgtc

SEQ ID NO: 133077 - DNA, 619 bp, Cannabis sativa
ttcactttctctttctctctttatcttcttcttcttcttctttcttctcatttattttatattattttataacaatatataatttattataaataatttaataattaatatatatttcaaaaaagtttaattatttttagtgacattttttaactagagaaaaaaaatatatagcgacatttgtatttttattcacagtagtatatcctacatttatcaaaaatgttattaaaccaataaatattactaaaaccaaataatactaatattttctataaagtcatcaataattataatttttttttttgtatttcaattaaattgatttaaaggaaatacaaatatgaaaactaactgtataataataataatatatataactaattaaaacaatttaaaaaattatgatctgtcatattaataaagggaatcattttatacactacttttttaatttttttttaaaattttacggtttggattactttggtagttgctcatataatttttaagaataaaaaaaagtttaaaaaaataagaaatttttatatgaaaaatcctttttgcacaatttattacaaaattactcctatacgcctatatcaacttttttacttac

SEQ ID NO: 133078 - DNA, 574 bp, Cannabis sativa
aaaaataaacattgagtatttaagtgtataaaatcgaaaacattaagtatttatgccgcaatttacttttcttttaaatatgttaaattattgagtatcacataggacaagatcaactcaagtggaatatatataataactgatactgattcagtgatttttaatactgttttaatttattcttatttgtttttttgtttcaatatttattcttatgtttgattctccatacctttttttttttttgttaattgttactatatattaataattttttgaatgaataataagacagtagtttatataatcagtgagtatagtctatgataatatattatttattatttgtgggaaaaatttatagtatgatttagttttgttcatttatagtttttttttttttttttgcatttaattttttaatgaaatattaaataatttttaacattaaaaaaaaaggtaaccaatctaatccacactattgcggattggattggatttaaactgtcatgtggattggattggatccaaaatttaagatccgcacttcgtgcagattggatgttgtttgacc

SEQ ID NO: 133079 - DNA, 672 bp, Cannabis sativa
agcccaacatgctctagcaaagtcgcaagtcagtagagcatgtgttgttgtttctgctgtaatatggaaaacgagacactgtgaagaaattggtacatatttcgtgacaaggttcacacaggttgggagagaacctgctataacacgccacaaaaaattcaagactttggaggtatcttcaaatgccagaacacttacgcaaaaaattagaattgtttggccgtaaaccaactggtttttgactctgcagtaggtgataggcgctttgcacagtaaaattccctttgtgatccgctgtccaagaccaacaatcaggtctagcagtgttgctaagtggaatgccaagaattaaatctgcttcttgaggagaaaacaagtcacaaactacatcagcatcccaacagatcatgtttggttgaaatagggaacttacagtgtgagttcttagaccaagatgagtagaagagacatatttattatcggttgatggtagccaaggagaacctagaattctagtatttctaccatcaccaataacccgagcagccccaagccgaatcaactccttagcaccccagatactacgccacacaaagcttggattatttccaagatcggatgaaataaagtcagaattagggaaatactttgctttgtagactctaccagcaa

SEQ ID NO: 133080 - DNA, 1060 bp, Cannabis sativa
ggcctgaaatgcaatttgaattaagtgttggcatattattttatatttgataatttgaaattagtttggatattaattgagtgtgaaatgtcaatattgcccttgaaagtgtttatgcatgttattagccctaggggcaaaatggtcattagacctttattttctaagtttattaaaaattgattttggaggaaatagattaatttttctggttgtttctccctctcacccgaaccctctttctctccctaaccctctcaatatttttcaaagctaaattgtgtgaattggttgacttttaaagcttggaattggaagaattttaagcttggaattgaggtattttctagctgagattatttggaaatttttgttgtaatccttgctggtattaattgttgaaaagcatgtttgggattgtggagttgcatgttcttcttgatgatgatgataggttgcatgataatggtttctttgattagtttgagcatgttatgcttagattttttgatgttgtgcttggttgagctctagatggaattttagggcaattctcttgtgtttaattcaggttatttctagtgtttgattgttggaaattatttaaggagcttggctttgaagttcttgagtttgagcttgggttttgataatcttgaacttgatctttagctttttgagcaatctgaatttggggttattattgaaatgttgatgcatgagtatgtgttttaaatccctagtgattgctagtaacgttgatttatgatttggaagttttggttaggaatttgagtgagtttggttggggtttttgctgaaaattcgaaggtttgcttgctggtttctgggttctgcacccagatgccgcggcatgctctggagcatgtcgcagcctgccccttttggtggaacctgggttttgtcccaggtgtcgcgacatggtttgggcatgcccgcggcccgccctcgtgtttttgggcagtttcgagttgaattttgaaaaatacataacttttgattccgagctccgatttgggagttctttatatcgttggaa

SEQ ID NO: 133081 - DNA, 556 bp, Cannabis sativa
tttttttccatctcgaaagctaattccatcatacttcttaggaagacaaaaaattttccaagaaacaaggtggatcttactccgatttccattagtaccccaaaaaaagtccctgcattttttttttctatggtcgcaataatttttttaggtaaaataaaaatgttcatccaaaaattccttaccctcagaagaaccgaattgataagttgagctctaccagcaaaggacaaattcctactagctcagattttagctttttgtggatgttgtcaaggatgattccacaatctgaggctcaccatttggttgggtgaagatgaacaccaagatactttagtggaaaagtaccctcctccatttgtaaaatactcaatagattctctttacaattgccattgattcctccaaagtaagcatgagacttatgtttgttggccgataaatttgtagcctcacaaaacttgttgaaagtatcatggattaatctaatcgatctatcattgcccttgcaaaaagttacaagatcattagcaaagtagaagtgaacaagctt

SEQ ID NO: 133082 - DNA, 1130 bp, Cannabis sativa
ttcttatagctcactattatattcgtattttattagttgccgaaaatctcggtcaacaggtgtgattttctatataatatttattaaaataaaacaagcaaaatccaatattaaattgcatcaatatcgatcttacacatcacataagtgttaggctttaacatttctctttttttatatattttttttctaaccaaaatctaatttccaaacataactttatgcaactaaaatctatgtgagagatgtacaaaataaaactcattttaaatatattatgacacttttgactttttaaaatacttgttgcttacaaaattagctcaacgagcacctattcatattagattaaaacgtggtaaggaaccaatgtaaatagggtgaaagctagcctaaaattgtgaaaaacatgagaaaagaaagataagcttgacaaataagcaaataagctgacaaaaacaatgtgatatcaataaaaggtgaatttcagttggatttttcaacttttcaatatcttttacaccccccttacaaactttatttgtaattgtatgtcattccataaaaatctatacataaattattgagaaatattaagaaaattctttttgctactttattttactgtttttttatagctttgccaaaagaaaaacactttttatatgaatatttcgtgacataaatatttaagtttaacttcccgttgcaaataaataactaagttatatttttggaatttttgtaggtacctgatagttaagtgttgataattcttgattggtccaatcattaaatttttatttttctttaaaaaaaataatttaaatataccaagaagaaaatgacacgtagataatgacttaatatttaaccgttaaataaattctaaaaatttaacttatgtattattaccgtaaaaaattaaaacttaatatttatttgcaactaataattaaattaagtattttatgacgcaaattactcttttatataaatatattcaccaccaccacccctcttttggccaggcgatatcacatctagcaacaccaccaacaaagtatcatactaatatttgtccagggccggccagagggtggggcagccagggcctcggccccaggccc

SEQ ID NO: 133083 - DNA, 627 bp, Cannabis sativa
tgttgctgcatcacgatatgttggtgccagtatgtcatgtactctcctaatatcttcgaacgataacggcccatttacgtgatttagcagtatccgcaaaaaataactttcgccttttaatgagtttgctgtaacaatatgccctatcactgtcttttttttcgtggaggccactttctgttttgattgttctaaacatagtattcaggaatttgtttgtacagtaatatccttgcattttcatctactctatttaatgcaaagaattctgttaacatggattttttataatgttttgaattagcaatgtttgacaggtcagaatgtcctcggaatgtcaccaggtgctgattcttgagatgtaaatgcaagctatatactgtcgaggacatctcatttacaataaatttgtatattctccacatagcttcaggggaagaaatccatcgagctgtttggaactgaagtatttcatcaactggttgattatttgattcaaagactaagtttaatgcaacacggtcatggcctttgtaaatatatttacagagatactttaccgccttcactgtagagcatatttctacattaatgtggaagtcaaatgtggcaaggagatatgggttg

SEQ ID NO: 133084 - DNA, 706 bp, Cannabis sativa
  modified_base (62)..(68): a, c, t, g, unknown or other
tttaataataaaaagtaaccaatccaaagtaaccgatccaatccgcacttttgcggattggnnnnnnntggatttgagctattgtgcggattggattcgatctaaaaatgaaatccgcacttagtgcggatttgatgttgtttgaccaaaaaagtgcggattgaatcggatgaacaaccctgtttttaacgacctaaaaagttcaaaaacatgatttgatacatgtcaaagttcaagagattagacaaaaaaaattatagtctcaagctcaaactaaaaacattataaaaatctagcataatcaaaagtacaattaaatattaaaaatgattaaatgaatcatctgaagcggaaataacttcccactcatgttgattagttttactatcgaaaaaaatcatcctcacactccttatactttaattatggaatctcaattataatttagatttaattataattataattataattatggaatctcattagggacggtatattaggattgaaaattaggcaaattgatcgatttttaggtgtatgcatgggtttggattatacgagttttgggctttaaaaatagagttatttacattacaatacgtaatttttaaaatatttatctaaatgccgtccaataattaaatgttgtcattaccgaaactattttaacaaaattggtactgtgtacctaaataaaaagtca

SEQ ID NO: 133085 - DNA, 817 bp, Cannabis sativa
ttcttgattattgcaatatgaggaagctgaaggacatttgaaaggcctatgtttaacacgaagtgctccatcggcctcacacctcctctttgctgacgatagtctcttgttctgtcaagctacggagcagtctgccttagcaatcaaacgttcacttgaaacatatcataaggcttcgggacaactactcaataatgacaaatcggtgatgtctttctctccctatacatctattgcttgttagaattattttgcacaaacattgcagatgcctattactgattgtcatgagaggtacttgggattgccttcttattcgggcagggataagtaagaacttttcagcaatatcaaagaaaaggtttggaaactcctccatgcttggaatgaaaaaatatttttagtaggagggaaagaagtgctcctaaaagcagtggctcagtcaattccaacctatgatatgagttgtttcaagctcacaaagaaattttgcaaccaactggagagtatgatggaagatttttggtggggtactaatcaaaacggtaccaaaatacattggaaaagatggaaatctttatgcaaatctaaacatgaaggaggtatgggttttcgctcttttgtacattttaaccaagcactcttagctaaacaagcctggaggatttttgacatgccaaactctttgttaagccagttactcaaacatagatatttctcaacaacctcttttttggatgctaacattggtcattcaccatcttatacttggcaaagtatatgttggggaagagaattatgttggaaattattttac

SEQ ID NO: 133086 - DNA, 555 bp, Cannabis sativa
aattaaataaatatttaagaagatcttttttagcaattaaaatttataaataatttttttatttatatataaatcccttagcttaattgttatttatataattatatggataattagaaaaattcttcctcgagattaataaaaattagtgaaaattatatatatatattttactttaaaatttttaaaaagttttgaataatttatattagtgaaaatataatttaaatagttttttttatcacccgtataaaatatttaaattttattttgacactgtaaattatttaaaaaattttaaaaatttacaatcaaaaaatattagattaaaaaactttaattgatataaaaataaatagatattacttataatataaattaggggaattattttatatactaatttttttttttttttaaatttaccatttggattgcttaagttgttgctccagtgatttctatgtgagtcggtatataaattttgattgctatgtgagttattatgtagattttagttgcgatttaaatttccgttagttgctatataaattt

SEQ ID NO: 133087 - DNA, 755 bp, Cannabis sativa
cttgtgcccagatcttggccaaccgtacaagctcaccctggccgacctataggcttctctttgctggctagccaagttggtacatctccttgatggctcacttcactcctctcggttgctacttaacggttttgccataccttttatggagaccttgtcttgctattggcaaggttgtattccacatttactctatcttcacttacatggacatgccacgttaggtggacaaaatttgggataacacttactaaggtgagcctgagtaagaagttggtcatttaccatttgccacgctatgaatctgtgtttgggaagaaatagtttatgctaaattgtagctgcataatagacttttccagccgagattagggagatagaaatatctcccatttatttcttattaaaactctttatcaagtgcttcagcttgaaaagtttgctaactattccccacagaccactttgactaactagtttaaactagttttcaagaaccacctctttatactagatgtgcaacatccagtgattgaagaagcataatggcttgataccaactttgcctatatcatgttgctagacaaggcagaaggtgtgatcagatataatttcccagttgaaaattacttcattatttgaaaaaatatccatccacatctcattggtagacaccctatcaagcttagagaagatacggtctcccttctcttgtttattggtccacatgaactgttgggtttcgtgccctaaat

SEQ ID NO: 133088 - DNA, 646 bp, Cannabis sativa
gaagggactgaaacaaaattagtgattgggaacacagggtctggttattacaaggaattagagcactatgaacaatacattgatctaaaaggcatacctgaactctcaacaattcgaatggatacagagggattcgaatttggagctgctgtaacaatttcaaaagtaattgaagttctaaaggattctaaacaagctggatttccctcaagaggtgagatggtgttcaataagatttccaatcatatggagaaaattgctagcagatttattagaaatacagctagtatagggggaaatttggtgatggcacaaaggaagcattttccttcagacattgcaaccattcttctagctgtggattccatggtagaggtgatgagtggtaccagatgtgaaactttcacattggaagagtttcttcaaaggccacctctagattttaagagtatacttctaagcattaaaattccgaactggggatcaactggaaaagtttctgggcaaaaagattctgtcctactgtttgaaacctatcgggccgcagttagaccccttggaaatgcattgccttacctcaatgctgctttcttggctgaagtttctccttgtaaaacttctggtggagttttagtgagtcgctgtc

SEQ ID NO: 133089 - DNA, 534 bp, Cannabis sativa
tagtaccattaattcactagtggaagtataatttaaattccatctaaatttgtgaacaacatttcagttatagaattaacacttaaagagagccagcatttaatcctttaaaaagttaggattccataattgtaaattatgtttccaactattaaccccaaaaattaatgtgtgcataactctcttagctttgaaaacacgaggggtattattcttttggtcatgaaaacattattgcagttctaacagaatatctacaaatttctccaaaaacattatgttgtagcatcaaagtatccaaaagatcactataggttgttacattgacaccacatatcctaataatcatcatctttagcatctagtacaagtaattttctattgacgagcttaattttattccatgcgaccaatactatcaccattgaatgcctccactagttgtaattgtcacgacccgagccctagggcgtggcagatatgtaatatccataatttgggtggtcaaaggtcacactttgacccttgtaggaa

SEQ ID NO: 133090 - DNA, 579 bp, Cannabis sativa
  modified_base (27)..(30): a, c, t, g, unknown or other
actaatcagattgtaaagagttttatnnnnggcataaaacccaacacatatgtcgtatcccaataccccctctaagatgtgttaccacgtaagaagttgaatagctattggtaggagtgcataaaggctctacaacaataatgccaaggggtaaagccaactgagtgtagatgtgattaaactgcaacattgaactgtcctataaaggctggccgacctccatggccttagtaagttgcctagccatggaatcaataatgtggacgaccactacctccacaggcttgccagccatagcgtcatccaactggctatacgatgctcccttaacctggtcagccaccttgtctgtaccgtggtgggttggatccaccaagatcctactctcatgcgtacacccggtagcaccctcgagaaaattccaaagcaaggtctatgaaacttagtgaattaaaagtgaccaagagattgtatataacgccctaaataattaggcacgctacccaagttacttacgaaaccccgatcccctaaatgggattactaatcaaaaaggcgcagaatttaaacttttgtaat

SEQ ID NO: 133091 - DNA, 698 bp, Cannabis sativa
  modified_base (636)..(644): a, c, t, g, unknown or other
aattaattttcagtggctttaagtttacgtttggggtcatataggtcagatttgtacggcatttcctgccatgacagaccagtgtcaactgctgctgtattagtagtattgtatagcagtaataccatatatgtgactatataacaggaaagagcaaaatgcaatttaattttgatttctaatcaaattaaaaatatgtatatagaatggttttgactctttgaatcttgatcttgagtcaagtgtttcattctaaacatgctgtgataaatatgtaagataggtatgtatgtgggaaaattataactaaatatgcctaatcaaaattaatgaaactcttttttttttttttatgaaaaaattaatgaaactctattaataacaagattatcaaatttaaaacaacaatcgtatgaaacagggacagtaatgaaaatcgaaaataataaatgctaaaaataaagaaatcaacaccaagataaatattggttagagtctaataaattgatgtgatctatgactctactccagttttgaaacaccactgtaatccttctttattgattaagcaagaataggtacaatacagtctgacgagattcactgtaatccttggcgtttggttgggaggaatannnnnnnnngaataggaatgggaatgggaataggaataggaatgaaatgaaataaaatttaaa

SEQ ID NO: 133092 - DNA, 515 bp, Cannabis sativa
ctacttttttttttttattaaaatgtggcttaggcacgacatgaccattttaggcatgtaaaatattatgcctaggtttatttttttcgaaaatgtaccattggagttaggtgggaatttttcaagacagaatttcaactcaacaaaaagtcggccccatcgttctaccacgtcgtgtcatttgaggcattaggcacacagaaagaagggaccgacaaaatttcgtgcccactctgaaaggtgatcccgaaggctcctttttcctcattcattcttttttcagcagtcattttcactagtacaaaatatttttttttgtcatttaaaggctattacccactaatactagagatgtacctaaatgggattccccaatacattggctcctctcttgcatttactcttaatcttgtgtttgtattgattacttggagaaattcagtgtcaaatttctcacataatagacaacatagacaatatagggctatatatggatatattttattgattattat

SEQ ID NO: 133093 - DNA, 836 bp, Cannabis sativa
tcctttgttataataccacatcatcaatacaaatagtatagtgtcataagtatagggggtgaaaaagataattattcttttacataacattacctttttttttgataaaatataacatcactataaaaaattgtgtattaaaaagctcaagtacaataattaattttagttcaaacatttatttgattgtgcagcaagtcatcaaaaagtatttttttttcttttttgatggaaacaagtcatcaaattctttttgaactataataatataaaatagtcttcgcacgtgtacatttccgagccccacgtgcggagaatttactacggggtgtgtgtgtgtggacggtctaaaactacgttcggaacagaacataaaggcaaataaaatccctctcaaagatttgttatatgagtgtgtcttattctttgctccccactttctaatctatttttttaattaataaattccaaataattatataccaagataatgaataatgataatgtatcacatttttctcatcaccaaaattattgattttcttctttatgaattttatcttttatatagaaaagttattttcataataatccgttccttatctgaaaagatatccatgatgatctcataataataaattggaaaaaaaaaaaatattgagtatcttcctcctccactaaatggagtgtaaagtgacgcatcacacttaactaaagctattgctaactatgcttatactgtagaacatctattcaagaatacacttgggaataaataaattatattctaattaagaggttataactaaatagagttacactaggaaaaaaaaatt

SEQ ID NO: 133094 - DNA, 887 bp, Cannabis sativa
cgactttcagcgactaaatggtgaataaaaataattagtcgcaaaaaattttgggtgactaattaatgagttttaatgaccaaaaaactagtcggcgaaaatggctttttttgtagtactcacctcccaatcatattggacactttttattagaaaaccaaattacttttccacaaggtttttgaacttgattaagatattaacgattttatttttttgtgtcaaaggaaaaatccaacagtaacggctaaaattatcaagaaaacacatataatattaaaaaccatctttggatgttgagatgtaccctagagatccgtgtgaataagtgccataggttaagtagccctattgatggaactggaaaaggtagtttgtgactcttaccttgatggaaagctttgcaaagtttaaaagtctttatggaacaagtatatgtaatttgaggcaatagtttggttaaagtattatgtgaagactgatcaagtttgcaataccaattatttatgtgactggtttagagacagaaaaactttactagaagaattagagaaaagacaaagatgtttttactaatatctttggtagtacaagatttaattgacttgtttgattgacaattacatgtgcaaatacaagactcattaaaattatttgaagttgtagttatgcaatgccttaatgctaagacacgctacaataatttttcaattacagtgctatctttgctaattaaagaactttctcgaaaattgtgtcaataattaaaacttttatagtgaatatttaactttaaaaccttacataatcatttacaagtttcgggatcccgtttctaaactttcatacaaaatacacaaaagtacataaccaggtcgcacaacgac

SEQ ID NO: 133095 - DNA, 532 bp, Cannabis sativa
taataataatttgatctagagatgctatgataaaactgactatattttctatatttgttaagttggttatattaaaaaataaccttgttaaaaattgagctcatgttcttatttaaccattttggaaaatatagggtccattttgttatttaacaaaatagaaggtctaattggtaaatagtatttaccctaaattttattctatataggcttaattgttacaaaaaaatatttatacttactcctaataaatttattaaattttaaggactcaattggtataaaaaaatattatttgtgaaaggttttttactatttttttaaagtgttaaataaaaaaaatatatatatagatttaatttttttaaatgaatttttattttgagttgagctacaacccccgatagacatataattggacatgtccttgctctttgggcctctaacactcagggccaaaattgtaagaaaaatattaggataattacataaggtactattttttgtaagaaaattacatttttatgtttaa

SEQ ID NO: 133096 - DNA, 1165 bp, Cannabis sativa
atatatataatgtagtgaaaataatatatacgtcaaacttaaactaatattttttctttctttctttctctcacgatatatcatatcacatacaaatgatatacctaagaccaatcactacaatattttgcttcataccagcggaagtagtaccggcgtagccaaaccgccggtattaatggggttattatcggcgaaaaaggtattctgccggtattactttttaataattaaaaaatttttaataaattatagtattacaggcggatatagagtattaccggcagaaaatccgcctctaatactttcggcagaattttgaccgcccaaaatttgaaatatgactaataccggcagattattagaggcgggttccgccggtattagtcaatgaattctgacctttttttattatcggctgaacccctattattaccagcgagtcccgccggtaataaaaatctatataatcccatcccttaactcagaaaacattttccatttttcccccaccaaatttcacccccaccctcctcctccttcgcccatcctctaaccctcctcttctctgcccatttctccaccgtgaatttactattgcaccgctattttctttgacaggtaatgtgttttttattatgttttttttttttcatttctccatttcatttctgaattttttttttatagttttctattttttgtccatgcatgagaagtattgggggcgatactttgctcggaacactaacggaaagtgaaaacgcgagaagagtaaaaagcttggccaaaaatttacaggtttgtttttttgttttttatttttatttttattaattagatttatttttccatatttgaatgtttagtgattggcatattgcatatatatatgtgtatgtgtaaatatatgtgattggtacagtataaatatataattttgtttatgtgtatatattatatgtatgtgttttatgtaaatgtataatttttaaagaatgtattatatcctatatatatatatatactatatgtattatatatataactagagaattaatccgcgcttcgcgcggtgttggacaacatttgttatttatttattttttttttgaaattgctattttttttaccaaattaatgatataatatagaatattatata

SEQ ID NO: 133097 - DNA, 608 bp, Cannabis sativa
ttttggtatttaaagacaagaaaggaaagaacaaaatataaaagaaaagggaagagaaatgcaaacaaagagagcttttgtccttctcttctcttggacttgggtcccccttctttttttttcatctctggactttgtgcaattaattcccttcaaaatgacagttgccctcatgtgtagaagaaggtgcagtacttagtctcttttagctattgagtaaattgggtacaaaatgacaccctaaaaatagaagcccaatccttttgcactttggcccactaggtttagtcctcctctctacatcatccaactagcttaatttttagtgacaaacacgctgatgctaatgtggacagctaaaattcattttttggactttttccacgtcactgccgaaactgcccagaatgctatagcattgcttcaacattttctttgcatcatttccgtttttctagcaacttaatttttctttcccataacaaacaagcaacatttaattaaaaaacacaattaagataataatttttacaagacttaaaagttagcttactaaatagaaaatgaaactaaaactaattaaaattaagcaaacaaacacattttca

SEQ ID NO: 133098 - DNA, 507 bp, Cannabis sativa
ggctgccatgggggcgggtgcggccgccgccaaagatggtggtaataataataattcttctggagggaatattcatcgacaggatttagtagtagatcatgaggaaagaggagtttataatcatcatgaatatgttgatgaagatcttatctttaatatgcctaatgttctagttaatatggctgaaggaatgcttcttagtcctcctcgtttggacattgcaggtgatgatgatgatcgtgactactacgttggtaatgctggggatcaaaatctttggaaatttcattaataatgtcattgccttatatttatatataatcaagagtaaaactttgagaaataaaacgaaaccataacccttaattaagatcatcatgtgtgtaagatatttttaaattaagggagtgtaacgaaacctagattaattaatccatgacaaaaccacataatattggtgcgaactagcagtactgtacgagtggattgtcatcttttgttttcttt

SEQ ID NO: 133099 - DNA, 722 bp, Cannabis sativa
atctctaatctcttaatactatttgttaagtttatacaatagaaaatcataaaatgttgatgaagataaaaaatatttttgttttttttaaaggaaatatatatattttttttgagaaaaatcacaaagaccaccttaatttcaagcatagagccagggttggtcctaggttaaggtgggttaggcccgcacttagggtccactcattttaggaactaaattaaaaaaaaaaatactttttaaaaaataacatttatctttattataagggcccattttttttttttttttgcttataacctatttcaactcagagtcaaccttgcatagaacttaaagaaaatgtgaaggggagactgattgcattaatttttctcagaaaatgagctcatggatacaagaagaatagctaggccactataccttattaataacttccgacaaagcatattttgccgatgggtagcagtattagtagttctagaacagaaagaaagactaatacaatttgaaatcctagtaagtggcattggacgacatcatgttttaaagctaatgcttctgccatttcaagagaaaaagtattgtaccaaacaacagagaccatagcctcacatgtggattcatgaactactatatctaacccacatctccaattagaagcaccaagtgcagcattgacctttgaaaaaccgtgtttttgcaaatgtcagttgtatata

SEQ ID NO: 133100 - DNA, 925 bp, Cannabis sativa
  modified_base (43)..(67): a, c, t, g, unknown or other
cattaaatgttatttctgatttttattaataagtaaatctgannnnnnnnnnnnnnnnnnnnnnnnnggcataaaacccaacactttattagtcccgagattgggcctaattgtgttgtttcttcaaagaacccttttggatgtatcccaaacgcgcatctagagcgtcttgactgcttcttttaaagtggggcgaggttccctttcaaatttagagacatctggttccgatcacagatttcttgtatcttggatgcttttgaggcccatctcttcatatagtctttacccattatcttgctgaagttctgagtgggccttaatcaattaattttgtattgaatgccacatgtcttcctttcaaagatatgaataatatttacccccaagcttttagacttttgagagttcaaaggctttcagtcttctattcaggtcgttatggacaagtgagtaattcaaaaaatgatctttccagcttttgcttaaaaaattctcaaatactttttccttagtgaatatctaatgttacctcagagatcttcaagattcttattcatttctatttgtagttattccccaacgcacccttaatctcaatgatttatccgtcaaagctttcggtgtcatcatctttccaagcaagcttctgttgggattttataccctaaataaaatatatttcaatataatcagattaactgattaataaaagatcaaaaatcatcttgtgttgcatgattcacatgattactttcatgattatatgtttaatgtataaattctattaaatccacaacatatagttactgatgattatactgttgtttacacaatgaaaaataatcatgattatatgtttcaaagtttaagtctcatgatttgtcagtacactggatttatactgacatgataatcagcgata

SEQ ID NO: 133101 - DNA, 582 bp, Cannabis sativa
acagtaaaaatgtaaaaaataccgtctggcagtatttttgtaaaaaaatgacaaaagttagtacaccatgtaaatttctttttttttttctcatttttggggcctctaaaactaaggagccttgggccaatgcctagttattgggtcgtgtctgcttaatccatacatacaacaacatgaacacatctcaagcttatttattttattttattatatgtacttattcagctgaaatgagaacttttgtaagacccctcattggttcgagtttgttgtccaaaataatgcataatgaacactggcgaccaggatcgaacgtgacatttgaaagaatctcacaaggttaaatattggaaaagttgtgggtatacacgtccggaaatttgtggattttgaaacaggtcaaaaacttcaacactagaaattggcacatattggccgaaaggtcccaaatagaggttaaaggggagacagcgaaagtatctgtttggaccggcgacatcttggctcacaacggatcacaaacagctttttggaccggtggcaatttgggctcataacggatcacaagtggctcaaaac

SEQ ID NO: 133102 - DNA, 892 bp, Cannabis sativa
ttttttttttttttgttatttaaaaaataattgtacagattaaattatgtgataatctcacataattcagaaactaatttgttattatctatgtacattatacataataattttattatgttaatttgattcgtctaacatatagtatttttattgatgatattaatttttattattattcgtgttttcggtaagagacatgtgaattctaaatagaagtcaaggcctatcagtgggcccaaacaacatggactaggccgagcccaataccaacctagccttctgggaaagcaatcacacttctcgcttaggcgagcttctgccaaggttactctgcatcgggaaggatcctagttccgtgtatctggaagaactctttagcatgtatctagaagctagccgtagtttcccgtttattgttacgtgcaaaataagaaaatcactttccttaaatattggacaagaataaatatcaagctaaaatacataattaaagatcaaataattaatatcgcattaattatccataatcaaaagatacagtatgaatagctatgactgtgatcaacatgccaagtcaacatacagctactgcctcgtgggctagacttcacttgataagcacaaagtgatgtattacttgtaaactccccatcaatgggaaagggtaacgaagtatgacctccactactctataaatacacattgaatccctcatacaaaatgttgaaattttttgcctcacaagctagagaagagaatagagtgctcataataatacatactcgtggactgagactcattaacgctccaaccacgttgtaacgccctaatgcttaacgtgccgtgtgacagtcagtagtcctgtgatccgtaagggaaaataccgagt

SEQ ID NO: 133103 - DNA, 602 bp, Cannabis sativa
atatataaaattcaattaacacattattcaatgataaaagtaatattaaattagaatagaatttttatttcaatgttaggaaaatattctaaattattatttttattaaacttatatttgatattcttacgagagtgttattgctaccttacacactatacgtaggatgaacccaaaatatgacataaaaaaactgccatctacatgatacaaaacaagccacaacaacacaaaattaaacatatcattatccatagtacaaaacaagtctcaatattgtagctattgtctatgcatgctaccaagtttggtagcctaaattacccacttgtgtttggccatagtttggcttaccattgtctactttttaaattgcctttgccttctaaaaatgaactctatgttactcaaaaaattaaaaataaaataaaataataatgtggtaaataatccactcaaaactaaaccagttttttatctccacagttattgaaaagttagttactttcagttatatctctctggtttgtaacaatcggttgttagttattgtgttagctattaactaactttggttgagttgttaagagctggacatgtca

SEQ ID NO: 133104 - DNA, 1535 bp, Cannabis sativa
  modified_base (992)..(992): a, c, t, g, unknown or other
tcattgggcgggttacgattaaattttgcaacccgatatttatattgggttaataaaaatatgctataacccgactaaaccgaccgacgtacacccctagtgctaatgatagaaggaaacatttttaagccacccatgcaactcatcctacgacgacattaatattattttcctccaacttcgttgacaccctcagaagaagcaagaaaatgccagaagggtgatgatgatgatgatgatgaggaagaagagcaagcagaagcaagtgtcgtgagatggtgtcgcctcttcttcagactgaaccgccactgggctcccagactcagggcacctacgatagactagactacattataaggcaaaatcagtatattatccaatccaaccaggcccaagttgcttattataactcctattttcagcagcagcatgaatttgctcaaacgcaagtctaggagttgaattgtgctttctctatgtggaggatgaaccctcatgctccagaccacttctcacagccaccgccatggtacccataccagccaccaccaccaccgtcgccatactgatgtggcgcacaggtaagttcccttttctctctctttaatgtcacattggggataatgtgtcactttagtttgggagggggtaaacttaagtttttattttgctagttttaacatatttttttaagtcttttaatttttgttttttagtttttattgttttgagtcaatttgcaaattatgagtcaatctgaaagtaggtagatagcatgatttgaaaagtttatttatttttcgaaaaatccgtgtgcttggtgatattacactcttgactaatttcaatttttgttttagaagagcatggaatcatattaagtaattttctaataattgaagtggtttatgtatgctaattgtgaaatgtggaaaattatttgaaaaattcttgaacttgcttgattgctatttgagacgaaataataaatnatgcatgactgggaaagtgatttatgcattttttggatcgattgtgcctttcaagtcatccctgtaattttatcctagttactttttttgagccttaacctattctttgtttctatacattctaagcctagaaaagataaacacatgaatatccaaaatttaacccatattgtaccataagtagatatttagtttgtgagaatttagatggaaagtttattgtgtgtgtgggaataagtgtgaaaattgagagaatataaaaaaaattgattggcaacaacttgagaaaaaaaaaaaagaaaaaaaaaatctaacaaccagtgtcaaattcagaagaaaaaaaaatcaatataaagttgttgcaatcttgtcaaaaaaattatctcaggtaattagaaagaaaaaaaaaaggtattgggattgtgtcaaaaatatttttgggtgacatgattggagaagcttatggtatagacaagcctaaatgaccatttcaactacccttacctaagtctaacactacaagcctagaaagaccttctgatt

SEQ ID NO: 133105 - DNA, 1171 bp, Cannabis sativa
aaaaaggaaaatgggacaaaacagaggagtatgcactgcataatcccccgcgcacgcatgagggggatttactgaggatcaaggctgcatgcagggtccgtgggcgtgaaatctcggtcaatggcccgttcagacagcttaatgttcaagaattctcagacaaggcttgtctgaagccgtgtctcgaccgagtgaggcccaccatccgcgcgcgtaaggggaaaccctagccccgatatttccaaaatttcaaaaaatcataactatttcaattttaatccaaattaagttttgtaaatactaaaattgcttaattttttaccaacttttcaaataaaatattttcagaacgaaaataaaccaaatatccttttaaattcatatttcatgaaaataaatattgttttaaattcatatttcatgaaaataaatctttaccatggctctaagaccagttgttgaaacttattttattaggaactagatttactaacatgtatattaattatagaactataatctaacttcctaaatatgaatttctaaaataataaaataaacacatataaagttatagaaaaccttacattggtggcagtagaatataatgtctccttctgtttagatctttaacccttgatcctttctgtcgtagagtatgatcaagatctaaactggatctttttctcttgttagaattcttcagaatcttctacaaaggcctgagtattggcttgaattatgtgagcgattcctcaattcactatagggcacgaaaattttagacgaagaagaagagggtttcgaattctaagaggctctttctttattttctaagttgtctgacaaagtagtttaaaaaatatgtaaaaaataagatcatcttattctatttataggatttcatctagggttaggtttaaaattatatggtattaaaaaaagataaaataatactttattggccccttgagtggccgaaccctagtggaccctatagtgtcttaattttatcactttacttaagaacttatcttttctttcacaaatgtcatatttcaattctaactctataaaatatcaaatctatctataaatagttataaataattatcaaataaaattaccatttaacttatttattaattaaaccttacaaagtctcttaatt

SEQ ID NO: 133106 - DNA, 1099 bp, Cannabis sativa
ttgtgtgaggtggctggggttcgggcaaagtcggagtcgcttgtgtgaggtggctgggctgtgatcgagcatgaaggaagagggaccgagagagagtttgagtggaagagagagaaagggattgggatttttgacaaggctattttgggggtttttgaaaattggtcttattttaaaaattacctacactaagtgttctccaaaccaattttgtattaaaacaatcataataattcaaatttcccttataaaactgcaaactttgacaaaggttggttgaatctaactgaaggaatgttgaattggagcatgaagtcattacagcacgtgcaaatgctaacgacacgcatgtaccataaactaaatccccagtaaggcgatcacgaggaaggcctcgtgggtcaaggaccagaagggcactaaatgtccctgtcaatgagaacaatgtaaaaaaatcatgcatatcctcaagaacaacaaccagggaatacaaggaaagttcccattaatagagagattccacgaaatccaagtggtctaaatctaaggcaaacacaacctgaagttctggaaccatcttataggaatatgagacccccaccaaaagaacaaacaactcaaccctctagtcttttaggctggtaatgtgctgaaggtagatttcgatgaagaaaaaacaatttcatgggccaagtggcttcgagtcaaagttgtgttctccagtgcggatccccttttctttgaatgtttcctcaaaaagcctaatgaagataaaatacatcttcaatttaaatatgagaaattagggaatttttgttattgttgtggtagacttggacaccagcggagaaattgttcacaaagggaacctgacatcatcaccaacaaccagggcatccctttcctattaatttgtccctggctcaataccttctaccatttttcagacttgcttctctggtgaaactcatgtgttcaactctgagggtgccattaccagatggaaatgaccctcagcttggagaggttgttctggccccttcgactagagtcacgacggctgtgaccgttgttgtaacgtccccgcttcaagcctcca

SEQ ID NO: 133107 - DNA, 791 bp, Cannabis sativa
ttaaggtactcacgtagctttatattaatttagggtaagcttacaacttatatttttataaattatttatatataatctggtttgcttgatattgtaattatggcagagaggtttattgtagccagacaaaaagagtattgtgtatttatatattatatttatgaaggttggactatcaatttcgacttaaaagctttgtggacaaagagagagttaaaatagataataactctgtggtgatcagtttataatggaacattatcaatggtacataaattgttggcagtcagtatatattactcaatttggtccccaaacatcaataacaaatccatttctaaattatttcgtttcctttgctttctagttcaattatttatttactttatttgtcaatgttttcagttaaattgccagctgataattgcattgctcacgtagttcataattaaggggttatacataatagatttatgtttttctggaaatggatgtgtaagtttgtaaaaaagttttggcaaaattttaattggagaaaaaatagaaaacatcgtgaaatgataagggtaaaattagtaaaataattaaaaaaaatgtaaacataacagattttaaaaaatgaggtaaaaatcaaagacatcaatttaaaagagatatgtagtgtagtttcctatttttattaggaaaaatttacaaaaatactggaatttgggtcaacttttataaaaatactgtcactcagaatttttttaaaaaatactgtgtttttataaaacaacagtaaaacaca

SEQ ID NO: 133108 - DNA, 569 bp, Cannabis sativa
ataactatatctaaaaataccaagcattattagcatctaataacaatgctccttataaaattttctttcaaaaaacaaaatataagaaaatggaaatgatagagtagagtagagtagtcaatctctacatttgaaattacataccataattttttttataatgaaatttgttataattacaatattaatttttgaaaaattctgaataatttaccgtactaaaaatagggtttctaacattttgatctaccacacgtgttcaaaaaacttcaaatttatttttgttattttaaattatttaaaaacttttaaaaatttacaaaaataatattatattcgtaacaaacacatcaataaaaaaaaattcattttttttacttcaaaatagttttattttttaatttttatgaaattttatataaaaatttgcaacttaaatcgcaatttaaattcatataataacttacataaaaactacaaaaaaactaccttagaaattcaaatcataaactaaaaaaaatagttaaaaatagtatataaaataataggtgattctacaatgcacctcc

SEQ ID NO: 133109 - DNA, 834 bp, Cannabis sativa
  modified_base (41)..(67): a, c, t, g, unknown or other
ttacataaaaatattacataaaatacaattcaatataatannnnnnnnnnnnnnnnnnnnnnnnnnngcgttccaaacgagccctaattgaatatcattaaacctaaaaaaaaaaaaaaaaaaaccattttcatagtcgaagctctaaatattttgatgcgggtgattttttttttaactaaataaataatatgaatatagctaatgagttaattaatatcatgatatatttagggatgcacacggggtagaaaatttacagagagtgctcctcatttccaatccggcccgttaaaatttttaattctcgttcgcttatttcctatcaggaacggggcagaaaatctcctaataggacggagacaggacaggaacaggacgaggaatctataacgtaaaaataaaaattattttaaaaattttaatgtataaattattatggtgatcctcattgccgctctcatagtgaaagatctcgtctgggatcttcattatggtgatcctcctgaggttaaggaagcaattgcccatgttacagttgaggaagctccgagggctgttaaggctaaccaggaatggttaactgattgcagccaaaaattctcggaggctctaagcgaagaagaagagcttcaaattcgttttagggatattgtctgaaacgaaggtacacctagagcgagtatgtccagaagtggtaagatgcccttctatttagtttgtgctccgtccttggcaaacttaaaccattttaactagggatgtacatcggtcggtttgggcagtttattctatatagtttctaacccaatctaaagttcgggttgctaaaat

SEQ ID NO: 133110 - DNA, 1088 bp, Cannabis sativa
  modified_base (28)..(32): a, c, t, g, unknown or other
  modified_base (61)..(65): a, c, t, g, unknown or other
ttcatatttagtgtgttaaacaacatannnnnatttagtgtgttaaacaacatacttgtgnnnnnatctaagatcctgataaaataaattccatcagatacatgatctaggtaatcaaaatatggctcctttcctgaagttgaagaactgtgtagattattttaattaatttgtcttccctactcaaatccactttttctgtattctcaatcactctttaataaaattgttaccttcaaaatgtttttttaatttgtagttggtcactttattcttttccattgattgtaaatcaaacaaaataaggaggcaatttgttcatatgtggttctaattatgtgttgtataatattttctactgtctagtaacacaaaagttttgaaaaaaattttgtttacatctttcagatcttcttagatatcttaccaacttattttattaaattttatattaggatggtctgtcttcaattttttttttgtttatatatatatgactatgtaggatgggcagatcttgttttgtattactttgcctaaagtcaatggtctttagtgttttaatgtcaaatcttcattgttttcgcctttcatttttctttatgttcaaatcgtttttgtgttacttggcaattactagatggttctagagaaagaaacgaagaaaaaaagtttaaatgttatattcttagccctgacatcacatatggaatttgtgaaaatagattttgtaacgccctaaaaattagacaagctacaccaacggattacgaaaccctaatcccttaaatagggattactagaaagataagcgccggaaatttaaactttatttgaaacaaaatgaaaattaaacttgtaacaactttaaactttacaaccaaaagatacatgttttgggatctcgtaaatactttcataaaaatattacaagttcattttacgagccacctaagcagcaaaattggagttacaaaatacatcaccggaagaccccaacctgcttggtctagtgtggcccgaacatgtacaagcatggccaaggtctagcactcatggcatcacagactgatttaccctttcctgca

SEQ ID NO: 133111 - DNA, 807 bp, Cannabis sativa
taatggaaggaaagggtcaaatgggtctaaaaagagtgtttcagaggaaaaacaagggggcagggagtaagtagtgtagctggaagaaaagacatgattggcctactccaaagaaatccttaaaagctactcaacaggatggggggaaaaaggtagtagttcaagaacataacttgtttgaagtgttgcaaggcaaggagggggtctcaaatgctggtaatcaacccgattgcttgcatgaattgcagtaatattttgtgttggaatgtgaggggcctcaataaaagtcataaataagaggcggtgatggagatttgtcaaattaaggaagtgggaattggtgctcttttggaaacaaaaatgaaatggaataaagttcaaaagatggtggagaataactttaggggttgggatgcctataccagccctacaataaaagggagattattagttatttggaaaaaagtgtttgctagggtcattgttatagctgaaacttctcaactagttcactgctatattaaacttgcaaaccaaacataagatttttgtgctacctttttttatggattgaataagcttgaagattgaaaaagagctttgaagagacctaggtaatttaaagttcccagctaaaccttggattatcctaggggacttcaatgctctttttcattttaaggataaggttggggggaagccggttgctagtatagagcttgaggactctaatgcttggttgatgacaggaaaagtagacatgttgaaaagagtggggtcagagtacacatggactaacaatcaaga

SEQ ID NO: 133112 - DNA, 531 bp, Cannabis sativa
  modified_base (27)..(31): a, c, t, g, unknown or other
actaatcagattgtaaagagttttatnnnnngcataaaacccaacagtttccaccttaaattgcctcttcgtagctttcgggctcttcaatttcagttggctgtactactgccagtgtaaacaaaatcaggcctgcctcaacaaacctcttcggagggtgaatttgtcttctggttctatcacatgccaattgataatcttctagacctgtctgtctgacttctcccaaaatatctacttggtcttcattatcttttggctgattatcaacttccgtctacacactatcttttggttccacagtagcttccaactacaaaccctcttccagatgttttgttacgtactctatttccatgcatgtagtgttcttgtttcctaattttcctgcattatatggagacacactacctttcccagctgtcaagtggggatattacaattcattaaaaaccaaaattctagcaattactgcctttggtctacccttttaggaaatgcatattttataacccttggtacctaaggcat

SEQ ID NO: 133113 - DNA, 609 bp, Cannabis sativa
gagagagagagagagagttttaatacaaaatatgaagatgacattattaagtgtttaatgaagttactttgaagacaataaagatattaaaatggtataataagctattattaaaattaagagcatcttaataaagatgcatttaagtcacctttgttattaaaaattaattaacaattataataattcatacacattttttattttttttaatttacaacaatgatatttattattttttaagaataataatagaaatacactcaaattatacacatttttttctaagcagtgatttataattaatttcaaccacataattaaaactgatataattttgaatttgaataagatatatataatatattaaaataatattaatgaaattaattattttgtatattttaaatgagtagtaatattaatttttatagttaatttgtaccttgtgcattagaacaaaaataaaaataaaaaaaaataaaaaataaaaaaaaggccaaatataatggttgcatacttttggcaacttctaggattgtctatcttcggaacaatttttgtagaaaaataatattatgaacatgagatttttttttttttttattt

SEQ ID NO: 133114 - DNA, 1110 bp, Cannabis sativa
  modified_base (1078)..(1085): a, c, t, g, unknown or other
cccgcaccgcgaacacccctaacgtcgaccattatttttcttgaacaacgaatggagaatttcgaagccaacaatcacattatcatttatcgctcgcccgacacaagcacactctaaaaggagaagataagagggaaaatagtgccttttatccttagtgccaaagccttccataattgtatacatatcagaacacaaactaatgggtcgatactccttaaccagttttgatttttgagttttcagtatcaacaccacatttgatctgttgacttgttgcggggactttccatcattaagaatggacaagcacgcctgggacactctctcacccaccacatcccaaaatttatggaagaaaattacatgaaaaccactcggacttggagcattggttgccccaatggccttaaccacgtatataatatcatctttggtaaatggagaaattaacatcatattatcaacttcaatcacacgggcttccacattctcaatcccatgttgtatctagtcatgggtcgggttagtagtttggaaaatttccttgaaataatgctcaatttcctccacagtattcacctcggtagaaattcttcgtctcgctttagttttaagttcactgatagtgttcttctttctcctacctaaagatttattgtggaaatatttgtgtaaagaccgctcaattttaatatgaataattatatgataattagggtttaattatgaaattagagtaataaccataatttatacatttatggagatttatatgaattcagattatgctatttataatgtacatgcgaatttcttgttttacatatttatgtatgctagcattggaccgcgacgttgggccattagagactcacgttttcatatggtttagaattttagtagtagcatgggcaacatggttagacattggaagtgtcgagaaattatcaaggtttggaaatgatcaaactacccttgggtatcattaaactattggattatgttaaggggcaaaatagtattttcccttagattctttgtccttttgtgatttttgttgggttttataccctannnnnnnntccatttcaatgtaatccattttat

SEQ ID NO: 133115 - DNA, 1624 bp, Cannabis sativa
cccaaatgttacaaaaagatgacaattaatatacattgtcatatgttacatattattagtttattacacatatttaatctatatattatattactataaataatataacagttagttagttgctgttaatgggacaaccaacaaaacaatgtttaaaaagacttgaaaattggaattcccaaaaaatcaaattatagctaaattactggacaaagcgtactttgcaatggaatgagctcttaaatttagacctcctgctgcaataatggctgaagtagattgcgctgaacgagctcttcaaatgcataatctctttgactgcactgtctaattaataagaacaacaatctagtagtagtagatcacaccatcataacagtttgaaaacaaagtagtctccttgtacccaaccgtaaaattagcagcagtccatatttaaaagcctttgcttctaccacaatgggatcaagagtttctgaggctatatacaccgtgctatattgttgtaaataacaacacccattcttaatttgaaattatttgaattttaaagcgctacatcttcctgaattttaacaaagtgagctaggaatgcgaacacgcctaccgaagaagatatttgaattagggccaaccttcgataccgaagatctctaaggcttcccattgccttttgatacatgtccaaataatctagaggccaatgaacagtcctggccatgtctccagctcctagatattatatatggacgtagttattttttctttgccactctttccacaatattgtgattatcatttccaattaatttttagagagtcggatataaaggttttaaagatctatgaattacttttttcattgtcaatttgttttgagatgaaattttatacatcttaactacacacttttaaattctaacatggtatcaaagcaattaaaagctttcgtctctgcctttgacttcattagggacattcagtcaatgtgtgccaatttctagtgtaagtctttgacctgttttgaaaaattcgtaaatttcttgacgcgtacacttacaaattttccaatttaactttattgtgggattctttcgaatgtcatgtttgacattatgaaagttgttcattgtggaaaaaaatcacctgtcccatttttcctgttccactcctgtccccactaattatcttttgccacatcatttaaaatgtcaaatacacattaaacaaaccaaaatgctattaactctgtttgttttcttttgtatattaaaataattattaattgtcaaaacttcaattctctttcttaattaatgttaattctttctctaaaaccgaaccttataataattactaattcaaaaaaattactgtgtattcattttttactgtgtatttagtaatgtcaaaacttttactgtgtattcattttttttttaaaaattactaattcaaaacatcaattagattcaatagctagtatttttggtaaatatgtatatctttttttcaatagctattgggtcttttcttttttaacaaagttatttgaatttattgatattttgaataacaaaaagtgttaatttcttcttttttttgttttatcattattttattc

SEQ ID NO: 133116 - DNA, 1097 bp, Cannabis sativa
ttggacactatgctaaggattgtaagcatagaaaagactttaagggacccaaagtaaatgctatcgaggaggatatcattgctactcttagtgaggtgaattttgtgcaagggaaatggatggtggtatgatacaggtgccaccattcatgtcatatatgacaaatcattgttcaagacctttgaagagtcaaagggtaaccatgagatccaaatgggcaataatttcaattgaaaggtactaggcaaaggtaccattgatgtgttttttacctacgataagaaagtcacattggtgaatgtgctttatgtgcccaacatgaatagaaacttgatcagtggtagcttacttggaaaacttagcattaaggctgtttatgaatctagtaagctcatactcaccaagtctaatgtatttttgggcaagggatactcttgtgagggaatggtgaaattatgcaccaatgatgtaactttcaatgttagcaataataaagtatctagttctacttatatgattgagcataattctttatttttgtggcatcttagattagctcatattgatttttctactatgaaaagagttaaaaaatgtagtatgattgattgtgatataagaaattatggtaaatgtgaaacttatgtaaaagcaaagatgattaaaaaatattttctaaatgttgttagaaatgatcaaaattgtaagatttaattcatagtattttatgtgaattaaatagaattctaactagaggtggtaaaaggtattttattacttttattaatgattatagtagatatacttatgtatatttattaaagcaaaaggatgaggcctttagtgcttttaagattttcaaagtggagattgaaaatcaacttaacaagaaaataaaagtgttgagaggtaatagaggaggtgaatagttctctaatgaatttactcatttttgtgaggaaaatggtataattcatgagagttcggcaccacatacaccacaacaaaatggtgtaaccaaaagaaagaatagaacatttcttgaaatggtcaattctatgatagtgtactccaagttgaacaacaacttatggggg

SEQ ID NO: 133117 - DNA, 707 bp, Cannabis sativa
ctgccacaaatgtgacaatacacaatcacatcaaactttttaacatttaaaatacaaaaaataaataaacacatacaaaactctaggctcacacgtgtaaaagaaaaaaggaataaaaaaaattttatcagcaaaatagtattaaattacacaaagtaagaaggcagtataaaaatcgacagtaagaaagaaattacagtcgtatcacagtataattaaaacaaatagtgaaaatagagtatggggtgtaaatctccctataattttatcattatatttctttggtcatttccactctttttttgggcctatggtcctgttcaattttcataggccattttactatatctagcctgttgggcctttttattgggctttacaatatttggttaggctttaactattttattggaaaatttatataatatattgacttttgttattttttaacaaaattactgccacatgatagaatttacttttttactgtgtatttttataagttttatactgcagtatactctgtatttattttttgttttttttttatttgttttagtgttattttacggttattttccataatttattttttttaaggtgtgtggttcttttatattttctaagtgagaataatatatatacctattgttgcccctaatttttcccaatatacgtggaccaaccaaacaaggacacgtggatca

SEQ ID NO: 133118 - DNA, 719 bp, Cannabis sativa
tttattttaagaactctagtttttttatttggatttaaagggagtagacaattactcatatggtacttaatttgttgtttccatttttatttctaaagatttggtttggatttatatattatgcattttggtactactaactagctagtttaattagatatttcaagaggatgttttgggatttgatcacgataatgatgaaaccctcacaaaacccctcttgggatcaacatttgatgctcaaaaaggtttggaggtgagctcccttcttttgattctgttttaatatttttcatcgtgagttctcacctataatccttattttttttcagtttacaacatttgttaagcttgaaacatttgagttattactaattagtatcatttgcacatgtttgtttatgggtgtgcgtgttttgttgtctcttctttcattcttaatttcttctatatatatatactagtaaaaagttacgtgcgaagcacgtatactaaattttaggttagtgtttttctacgttattaaaaagtgatacaattaaaaattaaaaaaatattattagttattaggttcaacatcattactctgtgttcatttttaaggaaaaaaaagtatttatgaaacaataatttgttgcaacgcaagtacaggcaaaattcagaaaatatagtatttataagtagagtattgacaatttcaatagtaaattaactgattg

SEQ ID NO: 133119 - DNA, 955 bp, Cannabis sativa
tttctctcatttccgatttgtaaccatctttgtaatttccaataactttttggtaaaatatgtcggtgaaaaactatctgttgcatctcattaaatgccttttgatattcaagtttcgaggatttaaatgaataagaagtcaaatctaacccgaaaatgaatagaatagcattgtcgaatgtgattaacccttgtaatgtttcttgtagatcaacctgatcatataaaataattattcaaaattacaataaatatcaaacaataatagaagagaattctctacaaatgttaatgactatttgttaacatgctagaattagaatatttttgttaaacactttatctatcctttcttaattgattcaatattgacttaattaataatatatatttagtgtagttattatattttcatatactaatatatagctcaacatgtattaatttgttagggatgggcttgtgctaaggtaggttagactcacacttagagcccatttagtttaggggctaaaaaaatgttttctatttaaaattacacatatattttaatagtttttgaaaataccacatattttttaaataaaggcttagtaattttttttctcttaagacctatccaatctcaaggttggccctatttgttatgatatacaatttactttaaagtaaaattgcaacgtccccgctttaagtctttattgggctcttacacccacggaatgatatgtagttcttatacacgagtacgccactctggttgctttatggaatgacgactgaccttacagacaacacgagtattttcagcgtgctttgtcctcactcgcacacttcttggaaaaatttcctaggaggtctcccatcttgaaattatcccaagtcaagcacgcttaactgtggagtttttgagattgtgtaggtatgagactacacagttgaagaggacttaaat

SEQ ID NO: 133120 - DNA, 926 bp, Cannabis sativa
aagaataatgtaaaaaaaactgaacaatgagcatcttagaaaaaacatcacaatttcaggtagcataatttcgagtgtaggtaatccgaacaaatcacaaaaaatttatcatcaaggctcagactagcatgatgcttaagtcaacacaaaaagttagacaaaatattgcaaggtaaataagcaaatactcaatgaactatgcaaaacatgtacttagaatatgttatgcttttaatctacaacatcaagttgttgaaccaaatcagaatatgcaaaacaaaatatcagtgattgtttaatcaataaagttcataatcgaccgatgagaaatttgttgacagtagcgattggtgagaaatttgttgacgaactcctctgttgaaaaatcaaaagaaataagttagggttaagaatccaaatgaatgaaaatgaaaatgaatttcttgtttgcgtttttttatactgagatggggatttagggttaagatttgggtttcagttttagaaaacttgtgatttggattgctaatgtgggttccgattccaaatttgacgaaggttaaaaagagagacagagagagagagagatagaagaggtcaagaagctttgtaatggtggtcattggtggtctccggtgatctccagtggtttctaacgatcacaaggtttgaagtttagaaaaaaaaaaaatgggaaaagaaaagggttactgtaaaacagatgaaaagactgattataagtataataaaattaaatatttattttaattttaattttaaataaatatttttccctttttaatataatcttcaatgaacttatttttttacttttctcaaaaaaaaaaaataatttattttcactttttaaatatttaaataaaataaaattaaataattatgtgtaataattttaaattaaaatt

SEQ ID NO: 133121 - DNA, 833 bp, Cannabis sativa
  modified_base (752)..(783): a, c, t, g, unknown or other
tgaatttgagaattaaacattccacatgatcaagtttgagattcattcaaaggcatacaaattagggtaagttgtgtgtttaccttaaaaaaaagagagtgacagaagatcggagagattcagcgtagtccttaggtcggagctttataattgtggagttctgatcgtttattcaatttccctatgaaatgtgaaagaagagataaagagaaaatgaatcgatgtagaacaattttttttttcaaaaaaataatttaggaaagaaaattggggcaaaaagacagaaaatcatactcatttcttacataagtaaatttatatatatatatatatgatcaatctatagctccaaaactaaactgaacagaatctctcaagtcctaacctaagcaaatttatcaaattacaatagaaaagtgttgattgattaatgaatcctttagcctaaaatagattaaaacttcaatcttgaaactcagtgataccttatggaagatgatacgaaacaccagtgaggaagggagatctgaacagccacaccgccaagcacagtgagaagaagaagaagaatggtggagaagacaagtttcgatttttgggaaattagttacagaacagtaaaggaaaatagaaaacgacaatgcgttgggtaggaacgacaccattccgttaaaacgacatagtttcaaaaacaacgacaatttaagaataaaacgacactgtttcgtaaaaataaggctaattaggatttnnnnnnnnnnnnnnnnnnnnnnnnnnnnnnnntgccccctgaacttttaaggttattgaaaatgccactgaactattgagat

SEQ ID NO: 133122 - DNA, 503 bp, Cannabis sativa
  modified_base (465)..(477): a, c, t, g, unknown or other
tgtgactaatactttttgtcacggcataggaataataatttataattagtcataactttttcacttttagttacaagttttgttgtgactaaaagtaagattttttataatgaaaaacattatagccacagttataaattgaagtcttttttttagggaactaaggataagtcaaattaatagcttactagtagactagtaagatcaacaacaaacatctcgggaacaacaaagtacaggaaaaacaagacaagagactttgttagtggaacaaaaaagtataaaggagttcgacttaaggcacataaatagtacaatttgaagagcttacttagtttatgcaaaaataatccaaaaccttattatagatgaccataaacgagacgaatgtccaagcaccactacaaaaaactacaacttttagtgataactttttagttgcaacataatttttttgtgactaannnnnnnnnnnnntcacaacaaaatattacttgtgacta

SEQ ID NO: 133123 - DNA, 1910 bp, Cannabis sativa
tacacatacccatctacatcaaccatcaaccgtacacttcattttcagcccacaaatccaacaacaaagcattctcacttttttgtaattcctattgaacaaaatgataaggatatagatgaagattataggaggctattggaatattgctaatgtataatcctatctcaaatattattaatacagtataaatcatattaaatttaaataatatttcatcacagtaaactttagcacttaattagaccttattggacattaacttattcagcaagaagtccatttattttacagcatataaatatatgggtataggatatatgtatatgactaggtgttcaaattataacttttcatgaatgagatttaccagttcactctaatttcctctgggctttcgtttctaccggtcactaacatactttgtatatttattagaacaagaatcaaggataatggtacaaggtcaaaacggaagaaagggaagaagcctaattctcgacgaggcaacaaatacaatacttttctacagctctattgttcacgatctggcctacaaggctgcaacaatagcactggacaaggaaagttcactgtaccacttttaaatcagtggtcaagtgacatatttgctggaccctcttcaagaaatggtaatttttgtgaagaaatttcagtaaaagtgtgaggatcacaaatggataaatatggagaacttacagtgttgtcctggaggaaaactaggcgaggtagaggtggatgatggtggaagtgaagatcgataaaataaggagtctgtagaagagagagccaagctttagagacgcactcgcaccgtttgagagatttgtcattgagtcttgaaagaatctctacaagaatatcactaaaatgtagaacccaattcagagtaaaatactaaaatctcatttcagagatgaaaccctaaatctcattaaaccaaaaatctttcagagagagagacagtgagtgagtgagagcaatatacataaaggaagagcttacctgaacggaagccattgaagatggtagagcttgaaatcgcagaggacgaagagctagagagaagctaaaaaaggggaaaaagtgtttttaaaattttttaaaatcgtttaaaattagtttttaaaattcacataaatttgattttaaattaaaaaaacaaaaaagaaaaagttttaccgaacgtacgctttatttaaaattgttgaatttttgattaaaaaacaaaaaactacttttaaaattattaccgaacataaatctgtgtgtatggttgatagtgtaaatataagtgtatgcttttttcttatatatataatatgtatggatatgtgttgtatgttgatatataatatatgtaatatatacaatatttataccgtatattatattttgaaatatgtgttagttttgattttaaatttttacttactatatattatatgtatatacagtatattatatattttgtatattgtatattgtatattgtattttgtatattgtatattgtattttttatattgtatatacagtgtatatacagtttatatactgtatatagtatatatactgtatatacagtatatataaacaacttgtaaatatgtacagaattataaaattgatatataattgattatttttaaaaaatgtagtaaataaattagaataaatctttattattggaaaaaatacttagaagtaaatatttttgaacattaattatataaatgtaaataaatataattaatttttatgtatgtaaaacataaaaaaaataaaaaatttcatgtaaattattaaataagattttaaaatctaaattataattttttaataataaaaatttaagttacaataaaaattttatgaaataaatactt

SEQ ID NO: 133124 - DNA, 1631 bp, Cannabis sativa
gggcataaaacccaacaagaaacaaatagccacattgggatcttcttgtgtcaaggtcaccagcatagtcggaatccacatatcttactacatttgaggtagtaggacatgttccatatatgagaacaacctctggtgtcttctttagatacttgagtatccatttggctgccttccagtgctctgcaccaagttgtcccatgaatttggtcaccctactcactgcataactgagatctggtcttgtacagatcataaggtacaatatactgcctacaatgttagtataggggtacctttttcatgtagctaatatcttcttcattagatggagcttgtgaagtagatagcttgaagagttgagtaaagggtgtgctaaccagttttacatcagtgaaaccaaactttgatagaattttagagatgtaaccactttgagaaagctttaagcttctaaattttttgttccttgtaatctcaatccctaaattttttttggctgagctaaggtctttcatttcaatttccttgctcaaaagcttcttgactttgtctatttctcccatatgttttccaccaattagcatattatctacatataggagaagatagataatggagcttgagtacatgacataaacccaacgatcataggcacttctcttgaaaccaattttcagtacacattcatcaaatcttttagaccactacctaggggactattttaggccatatatggatcttttcaataggcatacatggtcttcctttcctttttcttcaacgctttttcgttgcctcatacagatttcttcttccaaatctccatggagaaaagctattttaacatctagttgttccaatttaagatctttaataataacaatgcttaaaagtaatctgaatgaggtgtgtttcacaataggagagaaaacttcattgtaatcaattccctctctatgtgaagcctctagctactaatctagccttgactcttgcttcttcaattccaggaataccttctttgtacttgtacacccatttgcaacttatcaccttacaccctacgggttttttcactattatctatgtgccattcttcctcaaggataccatgccttaagttcccaacaaagaatggggtggggtgccaaagaggaaaccatcaagttgcgcgggaatgttttaaccttaccataacgaaggctaaaaaggaagtatcctctagctagagttcggacaagggaaaaaacattgctaaatagggaacctcgtaaggcggggatgaagatgtggatcctcgacttggggacccaagcaacaatgttggaacaggggaagaactagaagagattggaatcgacccaaatatcccgaccaggaagcttaaaattggaaaaggtttgttgctcgaagtaaaattagcattgataaaatttctgagagcaaacctagacatttttgcctggtcgcatgaggatatggttgggattggtccttctagaattttacatgtcctaaatattgatccaaacttcgggccagttgaacaaaagcgaagactgttggacaaggagcgagctctagctctgaaagaagaggtagagaagctacggaacaacaatttcata

SEQ ID NO: 133125 - DNA, 1435 bp, Cannabis sativa
tggtgggtgaatttatgtctgatggtggtattgtgtctggagatatagtgttggtagagggggcatctggtgtatgtgtatggggctcagttagctcacagttgggtgcatctggtgtaggtataataggctgaggatgagtagggagagatgttgaacttgcagatgtagcaccaacagtaggtgtgtcaacaacaataggatttgagttagataaggcattttccataggaatagtaaagaatgaagtagttggaaataatgtggagggtgaggattgtacctgttgttgttgtgggatagattttgctggaaattcttgctcattaaagattacatttcgagcaatatatgttctccctgtttggcttctgcacaagtagcctttgtgctgcatagagtaccccacaaagatgcattttgctgatcgaatctctagtttatgagactggtatggccgtaagtgaggatagcaagagcacccaaatggcttaagaaagctgtagtcaggttgctgttggaagagacattcataaggtgaaatatcactaataacagatgtagggaacctgttaataacaaatacagtatgttggaatgctagccaccagtatgctaagtcaagaccagattcagcaagtaaagtgagcccagtttctgtgatatgtcgatgctttctctcgacccgaccattttgctcataattctttactcacctccccagtcagattggactgtctttatgggaagatcaaactgtttctcaacaagctttttaaactctagaaatatggaaaaggcttgggattttactgttaaaggaaaaatccatgtaaacctactaaaatcatcaacaaacacaatgtaatacttgtatccttctagagaagtaatatgggagggaccccaaagatcagtgtggagcaactcaagtggttgagaagctcgagaagttgacagagaatagggtaatttgtggctttttcccattttacatgcttcatagaatctaagtgtctttaggttatatgaaatatttatattttgtaagattttggccaaaattttaggtgctgggtgacataattttgagtgccatatattaacatcagaattcacaccagaactggtgtataggcaaacaggagactcacttttattaatgtcagtagtattacaagaagttgcaactggtgaaacagctgaaatacaattggaaagacaattcttagactttaaaccagaaacatgtgactcaatattgtctgaggtaaaagccatagtggtggccatgtgacattgaaggtccagatcaggttctgaagtgggttggtggggaagcatgtagaggccatttttaactctccctttgagtaggacatttgttaggttatttttagtattaattttagattaagtttagtatatttttaat

SEQ ID NO: 133126 - DNA, 1092 bp, Cannabis sativa
taaaagaattattagtttgaccaacactatatttacatgtggcactttattgatcaactaacataacgttaaattgagtgttaagtttagaaattttgaggatatcaataagaaatacaatgatgacatcaactttatatgatcgggatataaaaatagtgcattatgaaaaaatttgattcataatctcacatctgtttcttcttctacataatctcacccctgcttttttgttgttcaattcataataaattctttctataaaaaaaagcacttcttctatattctgcaaagtaaaaaaaaaaatacttcacacacatatatagttataaatacatatatataaataattgaataattatttaatttaatattatcaatttaatttatatttattattatatgttttttaaaaaataattaatttaagatagatatttttatagaaaacttatcaaaataataataaaatattaatttggacagattttagactgtcacgtcagcatctcatacttctcctttatatatatatagattatttaaaatatcttataaaattttcagacatttaaagtagtttataatatagaaagcaatatttaaatagtatatttcatacacgtgtaaaataaaataatcatgagtgcgacacaatatttgaactctgtttttgacgtgttaacttttttcaaattttttaaaattttgcaggtacgggttcgggttcgggttcaggtgggggtctcgggtctcggtccatgtccaagtctgggtcctagatccagattcgggtcttgggtccgggtttgggtttgagtcccgattctaggcccgagtccaggtccgggtccaggtcggggtcggagtcaagttcctgtgtccgggatctgcggtgcaggtcccatcataccggcagaactattaggggcgaactaaatccgtcggtaatagtatgatttttttaaaaacaaaagtaataatattaaaggaattgttttgtgcgagaatttttccggtattaaattttaaatttattagcagcggactattactggcggaagtccgccgctaataacattaaataatatt

SEQ ID NO: 133127 - DNA, 738 bp, Cannabis sativa
agtgtttataatttcagcaacaataatttattaatttcttaaatatcaattaacatgaaaaatttgttaaataaagtatcgtaaacatattttaaataagtaatcgaatttgtgagttactaaattttttttttttttaatctttcacttttagacttagacgttaccttatattattctaaataagctattttcatggagccattttgataaatatgtaatttctaaaaataaaatgttatcttaaacatcataaaataagttgcattaaaaaatataaagagaatactacttttattagtaaattatttagtaattttttatattaactcattatatattcttaattaaattagaataaaaatgcttaaaaaaaataacatatatgtatcttaaattataagataatatactagaacttaaaattattgaaataattattttaagagtaactaataaaaataagtaaccaaaaattagtttatgaatttttgttaaattaaaagtttgattacttatctataaaagaaattaaaatgttgcttttaatttcagttatcttttttagtgatgatggaaaaaaaatatatataattatcttgaaaaaaaatattataatgataccattttcaacccaacataattaatagtgtaatctgattttatttaagaaaataatatatatatcgagagtggaagttaataaaaaaattataaaaatataaattttttgaaaat

SEQ ID NO: 133128 - DNA, 991 bp, Cannabis sativa
ttttttaggttttaaatttttggtttagggaaaaaaaattttgattttctaagtatagaaaatcaaatttcccattatttatgtgtagttgaaatttcatgattcttgtaaggacaagtctcgactatatgatgatttggtgttaaagcactcccaataatttttctctaaaatctatttttttaaaatgcattaccaaaatatattttacttcaaatttttcaatattctctatatatcttaacatcatttaaatactatttatttaaatgataaaatcaataattaattaataatattttcattaaaaaatctttattatagaaaaaatattaagttgaggtggatgacctattaatctaatgattacggtagatttcagtcaacttaaaaactattccagctttaatttttctaatcactcttgatctcatgggttgagtatattaagagttctaaaatcaaatctatgaatttgttcatggccacacacgttcttgtgtgtaatatcttgaaaataaaatatggatttgtaaccctaattaattcaattaaatattaatgtgaatatttgagttatatatcgagatcgctcttggagtattcttagattatcacaaaagagttctatcgataaagtacttaaacagtttggtatgtaagattgtagaccaggtgatatccatatcgttaaaggagacaaattttgtcttaaacaatgccctaaaggaagccttaaaattaaaaaaatgcaaaaaattccctacgcttcagctgttgggagtctaatgtatgctcaagtttgtatgcgtccagatttagcatacattgttggagtgttaggctaatacttaagcaatctaggaattaatcactagaaaagcagccaaaaagattataagatatttgaagagaacaagagattacatgctcacatataggaggtcagatcactttgagatcattggatattctgactccgactttgcgg

SEQ ID NO: 133129 - DNA, 819 bp, Cannabis sativa
tgcacaacgtaataccctatgttagttagcgtgttacaggctgtgtcccaagacttctgccaatccttttttggttttgatgttgccccattcattgggagccttgacttttaagtttagtttgttccagttttgaatgaagtttggttttttatagaaaaaagggaaaaaaaaaaacttttgaagttatcagttagtggtgtattttttttaagaaaatgagaaaaatcttttgtcaatcagagaaaaaataagagtaatttacagcataaatatctaagtttaacgcatagttgcaaataaatatctaagtttaatttttggcggtaataatacttaagttaaatttatagatttttgtaagtacctgaccgttaaatgtcaagtcatcatccacctataattttcttattggtatatataaattatttaaaaaaaaacaaattaaaaattcataacgtcgaccaattaaagattatggtggcaatggcaatttacttaggggcattatatttacaccccacaaaattatataagcaccccaaaattataattacatatttaccctcttgtgaaatgactaaaatagatatcttcacatctttattaggttattaatttaatttttaataagtacaccccactattttttcttataaacactatactatttaaatttctatataatttttcactccaaaatttttaatggaaaacacagagatttatttttgtaattcatcgaaggaatcattcgatacaaaacaaatttctgtgtatatgtatgtgttttcttttctcatgaaaaacaactaaata

SEQ ID NO: 133130 - DNA, 739 bp, Cannabis sativa
tgagtgctctaactactttgctaatatacataaatagtcagccaattagctgttctacagctttagaagagtcattcctaaattagtttaaattttcctacatcatcccttaagaaaaatgtgtcattcgcaaattgcatgtcggaattttcaaggaacaactgaccttggaccaatgggttacttctttatccatttgttaaccatttaacttagtttatgcttcaatctgttttatagtctgggaaatcaaattcactttgctttctttttttaatatttgtaatgcaatgtttttactgagcagtactaaatatttgtttgcacatttttaactataacagaatgaagtcctgtgtaagttatcatcttcagagatacagagtatgaagaggcatacatgtgcactgcctagtagtggggaagcaggtaaaattttttaggattctattttgagatttggtttcattttctcgtggataaaaaggtagaaatatacagctgttttaatttgatatcaggttctagctccggtgaattgaatttggcatgtggaagaaaaggtttcaaaggaagagagctggagcagaaaactaagttgaatgatctggaatcacatgccattcaggctcttcacgagcttgtttctttagttcatgatcgcattagcgctgcagattgtggtgaacttgtgcaatctgaaccaataagaagttctgctgttagtgctgaagttgaa

SEQ ID NO: 133131 - DNA, 704 bp, Cannabis sativa
aggatgttaaataacatacatggttgtaaatctacatcctggtaaataatccccaacacgggctgcatctaaaaaggtctacagaccttgatattgttgttttttgtgatgccgactgggcaatagatcctgatgatcgtcgatccacctctagctttaccatcttctttggaaacaatcttgtggcttgacaatgtaaaaagcagcatacgatttcaagttccagcactgaagctgaatttcaaagcctagcaagcactgttgctgaactcacttggattcattcttttttccaagaccacccgttgtgtagtgtgataatctcagcaccatattacgtacggctaatcatgtccttcatgcacgcacgcaccaaacacatagagcttgattatattttgtgcgtgaaaaggtgctgcagaaactggttcatgtcaaacatgttctagctattgaccaacttgcagatggtcttaccaaagcaatctccagtgaacgatttcccctctttcgatccaagctcacaatttaagatctctctgctttcacagacgacttgaattgtaaccttgaggggtcgtgttaagggtatatggttgttaacatagtgaaaatcaggggcggcccaagcattgagcagcttgggccattgcacaaggccccaaaattaaaaggccccattttttttttaaatccctttatat

SEQ ID NO: 133132 - DNA, 663 bp, Cannabis sativa
gctcaacgaggtttgagtgcaatccaacgtaacttgaagcctgatttttatggccaatgtatccatatgggttcaccaaaaaaaacacaataaacgatacgaaatcccccaatttcattcataaaacaaacatgtaaataaaaaattaaaaaaaaaaaattgaatcactgaacatttacacatttgacgaaaaaatcatacagaaagaaaacttcgaaggcaaacctgggggtccatatccgggaaaagcccctttagacaatcaatgaaatgaagggattgcgaagaagttccgaaggggtattggttggaggctgagactgagacagagaaagatttcggaggagaaaaacgggcaggtgaagacgaaggagaggttgaagaagaagaaaatctgattctcttagaaactgaaggcgtagtgggcaactcttcaaaaatggatctcttcccacacactatggcagacatgtttcgcctccgtcgatcggtggcttcttctccccccaaccctctctactccttgcagcgcgattgatccctatcctaaaattttgacgtgctgttcatacagcgcgccaacgaaatttcaaaatcaaaccctagaatagctaaatagaatacgaagttccagttcagatccaacaattgaaaattctcacc

SEQ ID NO: 133133 - DNA, 593 bp, Cannabis sativa
ggccccgtggactaggactgttcgaaagaacactaataccacgtacaaatctcttgtgtcaagtgatttaattttctgcaattatttttatattttgttggtgctggtttatttttgcaaaactgttttctgcagtaacagaaatcacattctattgatgcagacgtttacagtttatatttattatatttttgttaattttattactatttgcaaaaaatcagtttttcaagtttcatcccatacctctgagctacctcaaagcattctgtgaggtcgtctgcatggcccatgcacgttttggatttgaccagcatgtcatcgacgtatacttccatgttctgtcccaagaggccttttaacatccggttgaccatgcgctataaagttgctctgacatttttcaatctaaagggatacaccaggtagcagtataccccctcgtcggtcctgaagcatgaacactgttgatcagtgacatgcattttatttgattgtaccctgaataggcatccataaaggataataacttgaaacctgaggtggcgtctaccatttgatcgatcctcggcaacgggaaacaatcctttgga

SEQ ID NO: 133134 - DNA, 1773 bp, Cannabis sativa
  modified_base (29)..(34): a, c, t, g, unknown or other
  modified_base (1125)..(1126): a, c, t, g, unknown or other
aataaccgacgccatagggtccctatggnnnnnnttatttcatacccctttagcgtcaccccgatcagtgtcggtagcgaatttcgccaaaaccaacgttgaaaggcgttaaaaaccgcctctaaagtccaattttgtagtagtgcacgcttcgtgcggccattatactaattaataaataatttttttggttaatttataattttttttgtttttataatttacaatcactatactaagttatacatcaaatatctttttattgtattataaaaaaatgtattatcttttgtgttaattttaaagtagtaacaaattgttagtttggcaggatttaataattttattaacaattataagtttaatatttttttcataaatttattgaatgaaaatacaaaaaactaatctctaaagtacaacaaatgcttaattcattccccgattttaattatttaaaaactgagactaaatttatgaaaaactaaaatttataataataaaaacatttaaatagataaataaatttgtaaaaatagtaaaattatattttttaaaaaattcaaataatgaaaaaaaaaacaagattaaaacattaaaaaatatttatacactgctcaaatattagtatgacatatgacaacatataagcttataccttcacacatatacatatatttttttttatttaattacttttaattaataaaataaaaaattatttttaacttttggacaaataaaatttaaagataaatacttataggcaaattatgtaaaaccccatatactttttgagaaattgcataccacagcaccttagccattggattctaaaaaataaatttttgctaagatctaagggatatgtgatgttaaccaaaaggtaagggcaatataacaatagaaattggtgatttattctcttttgtgccattgtactttatttttatttgtaaacccatgttttttttctcttcaataaatacattgaggcaattagacacgtattttactctacttatatgtatatgtatgtagaaatttaatatgttataataattttagaaaatttattaatatcaacaatttgtctttaaaaaattaaatttattattttgaacnncattaatataattttacatagttccatattaattagaaacaattgtagcaaaagtccttaaaaaatttactttgatgcagataatttcccaatttcaaaaaatagcaataatagtcctcaagctcgagaatcttataacttcgttagacctcattttaatagatttgttagttgctccaaaaatatcacatgttgatatcaaattacgaaataagccccaaaaaagttcattttgatgcagataagtctctaatctcaaaaaattatagtaaaagccctcaacctcaagatttccgttagtccatagatacacaatttaacagctttgtttgtagttcttaaaagtgtgacgtgtcaaaattttattggtcgacatcataaaaatttatttaaacaataaaaaaatatttaaaatttaattacctatttttttcactttcttttattgaagattaaaaaactttatataaataaaaaattttacaaacttctacgatttgccacctaccattcatgttctcggtggtgcaggcttactgtcgagtgtcgaccagtaacattccttcatctcattccttgtccatcccactatctcagaaaaccaattaagcaaaagaaaaaagaagagatgtgatcaggataaggat

SEQ ID NO: 133135 - DNA, 819 bp, Cannabis sativa
gaagagggtactccagaatacgagcaacttaaatctgacccagaaaaaggtttcttgttgacaattactccagagtttcagagccttattgggatttcccttgttgagattttgtcaaggcatgcttcagatgagctctatcttggtcagagagaaaatcctgactggactgcagaagctgaacctttaaatgcttttgaaagatttggaacaaaacttgctcaaattgaagacagaattgcgagcagaaataaggatacaaacatgaagaaccgagctgggccagtcaatttcgaatatggtttgctcatgccttcgagcgaacaaggtctcactgccaggggaatccccaacagcatctcaatctaagacttgtctcgttgcattattggtgttgtttttgttgtcattttatcttttcatttccttcctttcctgtaattgtgtgacaaagtgtcttgaatttgtgttgtagtatgtatttattctcatcttttcttggatagagtaagtaattgttggtatcaacaataataaggcttgtgctattgcagcactaaattccttgcatcatatatggtgcttatttgtacgaacaatattactacaatactgattaataaagtttattttttacactatagaaggtatagtgcttgtgtccctcgaaatataacttttacggtaacgtggtttttttattatattttattcaattttatcatacctttctttttgaaaaaatgatgatgatgcaagttgaataataattaataaaatttcgggttgggctgacctttctttctttttttttttttt

SEQ ID NO: 133136 - DNA, 531 bp, Cannabis sativa
attagcaaagattgtacaataattgaaaaagtattgtagcgtgccttagcattagggcgttacatgcagtaacccaccttgcacaccattatagccggccgggagccaatacttaattagatcaaaaccgatattgacatataggaggatactggacaccactgatgccctttaatatttctcttataattatgatcacttactagattatttatcgagttaattaatagaatatctctcaaactatatattatatattttgaacaattcagtcttgatttgggattatctagataagtttataaacattacgatctttgttggatgatcactaacattgagctacatttatttgctccataattacgtatgtataattatcagaaaaatgctaaaagacactagtggtaccaagcatcctcttacgtacgtcaaaatcgctattggtctaactaaatatcgggtctcatataatttaatataataatttttagagagtatattgctagccaatcgcaaggtgacacgtct

SEQ ID NO: 133137 - DNA, 1355 bp, Cannabis sativa
tatatgaaatacatccaatggatggaaccgatccaatccaacatccaatggatgttggatcgatttgatgactgaaattgattggatatagttggatcgaatctggataggcctaaaaatattggatgtgatccaatgaacacccctagatgtatgcatgatacctcgacagtaacatcaacaaatagcattaagatctcaatttttaatattttttcataatttggagatatactttttctctttatgtcgacaacttcaccgtcgtcgatatttttaatttactcattagcatgaattatttaatgtaaaaaaagtaattttttttaatgataagctcttgaaattcatgaaaattgatgaaaaggctattgaaactttttctttctcattctcatgtgatactctccattcttcattttatttttatctgatactctccattctacattttatttttatcgctttttatataattatttttagtactttttttctcaaaaaagtattttaaatcaaactttataaatatatatatatatatatataaatacatataaatgtagggcaagactatggtaggacctaacaaaagtttcctgccggtagggaactttttttgaccattgatttaagatcatgtggttattatgatgtaaggtgtatactcttacgataagactgcttgtatacaattaaaactttatacatattataataatatataattataaatttattttaaaaataaaataatattaataattaaaattttattaattttaattttaattatttttattatttttaaaaagttaatttaaattatttttatatagatatttatttttaaaaaataatttcacttacaaattttactaatttttttacacaaatagttaactataacataattaattatttaaatacttttgccacatatttatatagatacataattctaccataattatattttaaattaatttgctttattaattttttatcaagaaagataatttctattattcaaattgagccaattacatctataagaggattcctctttaaaagagaaacttacacctcaattttattcatactagacaacttcctttcttgtacaaaattaagtctattttttgaagttctctttaaatctattatctatataactcagattcatacactttttcttatttatacataaattttagtttaatcaaatgccataaattacacctcttaacacattcttattgttgattttcggcaaccaataaaataataagagtttagagagctgtaagaaattaagagagagatttttaagtggttggggcgttaatgagcct

SEQ ID NO: 133138 - DNA, 1060 bp, Cannabis sativa
taaaaaaaaaaaaaaaaaagatgcgagacagagagagaaagagagaaagagaggggacggtggggggcggtcggctatgggtgacgtggggcggtcgactgcgtggacggtgggggcggtcgggtgtgggtggtctgcgtacggcgaagagatgcgagacagagagagaaagcgagaaagagagaggtcagatttgaatgaggggggtaatgtgggaatatagtaaatgttgtcccatcttaccaatataatgtattataggtttagggaaaaaaattctccctaatgtaaggataaaaaatcaaatttccctatattaattcaaatgagtcatactttctaaatattacaaaaggtggtaagttctccatccataaacatttttaatccaccaaaagagtatattttgtgaaaggtaaatagcagcataagtacttgttatttgtgttttcgaacgtatgacacgtagcatttaaagaaagggattagcttaataattccctaattaaaattctccaatacaaccatgtcacagagaagcctcacggaaccaaaaacatgtcaagactgggaaggcacaacaaagtctgattggccttgcctcagcttctcggatgcggaaggagtgttgtctcccttagacccgaaagggtccaaatacggaagcctggccagttgatacctggatgggtactcaacgggcctaatgcggatgtcgaccgcctaggagtgtcgcggatgtctacctttgatataagccaggtcactaagtgacaattatactttttctgacacaggatcagatcctatctcctacgtccaagcatggtagtgtgcacaccaccaccacctttttggtcaggcgggtattacagactcctgcttttaaataggggtgagcataatatccagaaaactgaaaaaaccgttcaaaccgacctaccgaacaccgttggaaccgaaactgacgaaacctaaaagcgaaaaaaccgctaacggtttaaactgccattgaacggtcggtttttttaggtaataaaccgaccgaaaaaattgaaac

SEQ ID NO: 133139 - DNA, 586 bp, Cannabis sativa
  modified_base (533)..(540): a, c, t, g, unknown or other
actgtctcagaatcatcccacttgaacttccccaggcagtgtgggattgcacaacttacccggtattttcccttacagatcacgggactactgactatcacaggaacaacatcagccccctcaacaagttgattaatgacataaatgggaagtttactctaaatgacttggttctctccactactttctttgcatagaagcctaccaatattctataggcctttttctatcccaaaccaagtatatcaaagacttgctcaatcgtgttcatatggagggtgtagagggctgttccactcctgcaaaatcgagacatacattgtctacgagtgagggggaaccattgcctgatgtcttcacttacaaaagcacagttagagccctgcaatacttaactatcacaaggctcaacattacatacatcatatccaagcttagtcaatttctttaagcaccaacatctaaactttcgaaatcttgtaaacgagtgttgagatacctcaaggaaaccattgttggaaatattttaccannnnnnnnatttactaacaagtatgtttcattcacatcctaatatgaattctaa

SEQ ID NO: 133140 - DNA, 923 bp, Cannabis sativa
  modified_base (870)..(874): a, c, t, g, unknown or other
ccgcttccatattgttcttgtattattttttattttattttttcatctttgatagtgcataattttcttcaatatctttttcttggtttgacagagttaagtctaaattttcttgaactatgaaatttgattgattcggtagattttgattcctatatatccactcatgtggtacttcattatatcgtatatataagaattatacgatagatagaagatctatctgtatagatatatcaccatctacatctaaaatgtcgtatgctttagaagaagcttgtacagtttgggaaaaggtttcgattgatcaaaaagaagaatctactttaaccgatatgcctttagacacaaccatacataacataaaaattatacttgaaaagggtggactagaagtagtaggattattctcataaaaagagaaaaatatgtcaaaattctctctcaacaaattacgttacaagaagtaaacatatgaatgacaattataagaacacaatttattgaaaaaaaaattagacttgtatagaggtcattgtgttattactcggtagtaattacataattagtagtaatgtgtggttagatatcacgtgatagttacatataggtggcgtttggttgggaggaataaaaatataggaatgagaatggaaatagaaatagaaatggaatggaataaatttttaaaatatataaaaaaaaattaataaatcaaaaagtatctttactataatgaaatttttcttcgcatatgaatgccttccttttacattacttaagttcgaatctaaatctattaagaattgaactcgtgacctcatgtaaaatacaaagatcattttgctagggaaatttacatggtatacnnnnntttgctattttttttacaaaaatattgccaggcggtattttttactttt

SEQ ID NO: 133141 - DNA, 600 bp, Cannabis sativa
ttttctttttcgggatattaaatagaaactaatttttattttatttttaaaggaaatagaaactaatttaatgtgataattgaggattaaaaatttcttagaaaaaaagggataattatccaaaaacacgatttttttttgtaaaattttaatattttaatattttataaaaacaacagacaacaagataacaacaataacaaataaaatacaattaaaaaattaacaataaattaacaagagtttaaatataaaaatacattaaaaaaactttttttcatagtaaataaaattataaaaattgtaaaaatatttaaaattttatacaatcatatttttgtaatttttttgttgcttttatgtatttttgaaataatctcaaaaaagaaaaaactaaatttatctaaatttttctttttagtttttttttatataatatagtgagtgaaaatataattctttttattgatccatataaattataactaatgacactagctcagtagtgagggaatggtggaaaaaaaaagagctcgggttcaaatctaagacctttggtcaaaagataatacttagtcttacaataaaaaaaaaaaaaaa

SEQ ID NO: 133142 - DNA, 1089 bp, Cannabis sativa
  modified_base (381)..(383): a, c, t, g, unknown or other
ttttagtttcctttttttttggttgtaagttggctatataaagccttgtgaacacttcgaaaaattagaatattttgggaataagattttgaaatgttttcttctttagttcttgagagaactattcgaacttatcaaggagtattccttgtggcattcaacctgacttatcaaatggatttccaccacagattgtggtgtcttccttcataccaaggttcatgcttaactaagcattgggtcgcagttccacattaaaatttcgagaattcttagaggctgccataattggcatcgggtttcatcacaattgttgtgtggttcatatcgaaaatgaaactactctgataccatgttaggaaaagagagagagagagagannnagagagagagagagagaacaattgaagaaagaatgagtatgtacattgatgaatgagcagtagctctgcatatatacaagttacaataagagaagtaatagaataacaaaactattatcatcttagcttataataattgagataaatcttagcttataataattgagataaataactacctgtaacaaagctaactaacatccataatagtcctaacacaattctctttcaagttttatcacttatactctgaaagtagattatgtaccagttatcccaattcagtttcaagttgtaccatttagttcatagccagaaataggaaatgacactcccctcaattttaaaaaggtaaaaaaatggaatgtataattttattttacatattgtttctctaaaaacaaattgcctcattaaaacatcgagattgacattcaagagggaaacgtattaaggatgaagatgccattgataattgttatctattatcacaaaagttgtattagactacacaaaactaccatgctttatgatcatcttctagcaaagttaacttagctaactctaggataatgatgataggatacatcaaaatatcgttactgttaggtttatttttatgcatttttagagtctatattagtgtgtgttttagtatttttattactttattattcagatttatgcttgattgttgttgttgttg

SEQ ID NO: 133143 - DNA, 922 bp, Cannabis sativa
aaaaatcaaaacataagggggtttcgccgcaaattgctctttttttaaacagtttttattcttagttaatattttggactaggaccagatccagactcaaatctccctacgaccttagtgctaaaaccaacatctgactcgaatccaaatcttacctcagacctagacccgacttaattaaaaataaaaataaacattacagaacacacttttatttacagttttaaaattaaaaaactaaaaataattacagaacatatttttatttttcaaaaacaaaattaaaaaataaaaatattaccaattctcaaccaaattgacgattgatccgctgttgaaaataatagcttagtacacacgcgagctagattatttaattttaaataaagaaaataaataaagatttttaaaagctattaattaagtaatttcatacagctttcgttttcgtttctttatgagtgagctgcttacagtgaagaagagtatcaacacagatctgtcggttctcttaacacaatactttctcctcctccttcttcaaacctttccattttttcaggtaattcttcctcaatttttcattcctggcgtttcttttttccttttcgaatctggatccatttcttgttctttcttttttaattgtttatcgtacccatttttacttgggttgtagcaacgatgtgtggattctttcattgaatctatatatattctgttattgatattcttgaagaaattcacccaactttgagaattttcttaatgttgttctgtagaacgaacatatgagaccacatttggcttgatgactgttgttttttcttccctttatttggaaattagatcattgtgtttctcaataagatttatctgtttgttttatgtacttggatgatttgtgtggtgaagaatgtat

SEQ ID NO: 133144 - DNA, 860 bp, Cannabis sativa
agagtacaaaatattcaagttattatttaatcataaaataatcaatacaattaataatataatcatggtataagtggtaaaattctcttacatcaactacgatatcataagttcaatttgtaaagaattttttttttaattaaacttttaaattaatttattttttctaaataataatttaaaatttttcaatgttttttattataaagagagaacaattcttatattataataatttacagtttctagttattgtagtgggaagtcttcaattttttctttgttaatatatattgataaactttattacatatattataatagtgaacaataaaataaaacatgcaataataaaaaaaataaaaaattatgattatataaaattaaataataaaatttgtcaaaggaaataaaatacatattaaaaagatgaaaaattttacactagaaaaatatctaaatagtctcgtctaaatttgatagtggatgccaattttagataattatgaggtgcttcaagcgtactaaacggttaaattgctactcttgtaaagacatgatttattttattttattttatttatttttactttaactttttaaaattaatttaataatttgatttttttttaaaaaaacaataatatatggaacaactcttacactataaaaatttaaagttttaaattatcttggtgggaagtcttatagttttcattgttaatatgtattgatggttgtattacatgaagtataatagtgaacaataaaataacacatgcattaataaataatatccaaataaaaaattattgcactttgtcaaagaaaaatatgcataataaatagatgaaaagttt

SEQ ID NO: 133145 - DNA, 1360 bp, Cannabis sativa
  modified_base (1236)..(1247): a, c, t, g, unknown or other
  modified_base (1293)..(1303): a, c, t, g, unknown or other
aatcacgtttttcgttaatctcgtcgattagcaacgtgctgcacagtacgttgaaaatcacgctaatatgcctaaattagttagggtgttacaaatagaaccagggctacgtggcagtatagctaattaaaaggaaggccatgtaagcacctgagcaaacgaagaccctaacacttgaacggggatcaagtgacagaccagctccctctcaggagctgaccgaccacccctagggtcggccagcctagggacaccaccatggtcagcctgcctggccaccacagggacctagcgagccaaggagtgcactataggccttgatgtactcttctacacatggactaccgtgatgggctgcgaattgtgccctaaaagtacaacaaaatgactaaataatatttagaattaagggcacttttgtcttttgtaaatatctaacaaactatacgaatgctaagggatttgaattgtaaacctagtttcctcctatataaaggccttaatctctgactaaaaacctaggtttcctctaagctggaaacctcattttaaacactaagtgtttgataaactctctctcttactcattctctctctcacacacacctaccctagtgctcctcaatacttgagtttcgccaatattgattcataccttgcaatccttagggtactatagaaaattccacctatagcgatctagatagtaattccctcggtataatacaactaaaaggggagtagatcattactcgctatcacaagggggccaaacctctataacaaatcttattgtctgttgcttttcattcttttttgtgcacacatgtggcaagaatcagatatgcacgacccgctattggttgatcatttttatggtcaatagtttagtgctttcattgagggcgtggatatcgtgatctgatcaaatgccacggtgaacacaagaagaactcctatcgcaccattttcatctttgggtctcccacaagacccacagatcacagatctaggcattcaagttccagtcacaactagaatccccatgaatactacaaatatggtgaatcttctcaccacaacaggcgctgcaagtttggccactacaactggccaaattgacatgagcaccccattgtatccaagtggcagcccacgcctccaagagtagacccaccattggggcatcccactgaatgaaggacccaggggctattgggaatattttaccaggannnnnnnnnnnnaacaagtatgttggattaacatccgaaatatgaatatctctaaaannnnnnnnnnnacacataagggtttaagaaaatctaacattgattgcagcagaatagaatgactcctt

SEQ ID NO: 133146 - DNA, 635 bp, Cannabis sativa
  modified_base (596)..(596): a, c, t, g, unknown or other
aatttgaggctcctaagaggggcatatgaacttttagattcagaaggtcggggcatttatccgtgtgttaatgggaagttcatcaaaaagttctacacttaaacaaaaaggtatttacccatggtgtagacaccgcacttaaaaagacgagtgtataatgaaatacgtaaggcttgatcccgtttcgagtatgtaggcaatctagtttataactaggtccagccacataaaataagaaaaaaattgatctcctaaacaaattgtgtaaaaaaaatgcaaagaattatgaacgacttgatcccttaaaagcaatatgtctgcagtctaaacaaaattggatgcagccacaaaataaaaaaaaaaaagtatattatttattccttctaataaaggagtcaaaattttaaaaggtctaaataactaaatactattagtcctcaaggctaataaacaaaaaaagctaacaaaaactaaatttaaaataaaaatattttagaagcaaattcataagatcttcagtccatctgaagaagtaaactcaaagcgccgagccttctctggattttttcttcttgaatcttgagtgttgctttcgntctctcagcttcatggaatttttctacactagcttggtc

SEQ ID NO: 133147 - DNA, 1500 bp, Cannabis sativa
  modified_base (1410)..(1427): a, c, t, g, unknown or other
atttagaattgtttgagtgattgaacattgactttttggggacttatgtcgcaattatccctattattattgataatatttattaattattaatctaatatatttattccgataatgtttgtgatgataggttgaaatagtgtgtttattaaaatttaaatacaaatttataaataaaatatctatgtttattatttattgtatatatattatatttattatttatttttaccatatataatttgtagattaaattaagtatatgtttctcatagttaataaaatgtataataaattgtaaataattttttatgcacatataatgtaattaagtactataaagtatatcaaattgtaaattttccttaatgatatttgcttcaaaaagtgggtaaactaaaatttatttgcttaaaaaatgtgcaaggaaacattattaagatattataatcaataaaatgtaagttcaagaatatttatgagtatttcttgatgagtgcacatttaacaccattaatgacggtacaccagggttggagaaaaaagttgtaattcgacactttggggctatgtttttgggttgttttggattgtgttgaggtgttggacaccatggagagcttccccaatctaaaagatgcatcgaaagcaaccgaaaaagactttttcattttattggtgtaactctgttgaaacttccaatgaggcaccaccatttggtttctattttcattttattagtgtaactcagttagtcgtaaatcaagtccttggtgaatacacaactcgaagagaaagaatgatagactatttgagtaagatccaagacttgataagttagctcaaaggttatacaataaggtagatccctagagaaaataatgcaacagttgatgcacttgccgtttagcaagcaacaccatttttgactaggcaaacttggtgccaatacagttcttgaaagaacaaagtattaccatcccagaagaggttgacatgctggataacagtccaacctggatgacacctatggtagtttacctccaaattagagccttgtctgagaacaaaaatgaggcaaaaaagatgagaagaaaatctgctaggtatctattcctagatggagtaatgtacaaatgaggcttctcaatgccgctcttaaggtgtgttactaagatagaagccgagcagttattgatagaggtgcatgaaggcttctgcggcaaacatgccaggggcaaagcctatccaaaaagatactccgacaagggtacttttggccaaccatgattgaggattcgatggactatgtcagaaaatgtgacaagtaccaaagattctcaaagatcccgatagctccatccaacaagctcacattgatgcagcctatgttgggttttgtgccctaannnnnnnnnnnnnnnnnntaatcagatttactaattaatattagatcaaaaattacattttatgttacatgattcacatgatttatttcat

SEQ ID NO: 133148 - DNA, 1238 bp, Cannabis sativa
tacaggcaaaactcgaaaaaccgaattttttttaaatcctcgaggtcgcgactagagtcgcgaccacagaaaaggttgtgacctggctcaatggtggtcgcgactactgacacctcttgagcagatttttccgatttttcgttagtttgtcccgtcttttcaccaattgactgaatttgaactttgataccccgggaacctgaaataatgaaaataaagcgtaaaaccgctccaaaagacaccaacagatgagaaaatgcttacttttcaaacctgaaacataggctaaatataacctaacatctgtaccgctaccatacaagtgttggtagtgcataaatcacaacaagcatgcatatacattaacacatacatacattcgcatattcatattacacattatatacaattcttacctcctttcccgattcaagtgaattggccgacctgaacagaaagctcatgcggatggatgccctaatcacatattaaaactgggtaaatcatatgtccaaaatctgaatccgggatacccaagtctacactcaaggctctgttatactctctagggacaacactatctcaagaaatagggaaacactcaactaaggcactgaaatggatgagaattgagaaaacgggttatcccggataactggtttttactagtcctccccaaaaaacttccaattttttcaaaacttgtccaattgcctccaaactttccagagtacctaaatagtgtatacacaatatattccaaccagaaaaacccaaaaaaaactcactgaaaccaaacatgccactaaagacttaaacttcagtttcaaagttcaaacttgtgcaaatccaacacaaagcaataaaaccagctaccaaaacctagaatcaactcaaattgaacataacaacttaaccaaaacctaatcaaaccctaacagcccctattctctaaaatcactagctgaaaccaattcaagccttgagaatgacattgataaagagtgtctagggtttaccgtgattaaatcctcctccaatccttgttgaaaacacaaaattcatcaattaaacccttgttccctagctggttcgaaagagagagaagggaagaagagggttcttcacttttggcttttcttctaatttttctttatttttcctaaattgaaattaaggttaatttcattaaccttgactgaatgtagtggctaggtgtcaaaacctaaggcagccac

SEQ ID NO: 133149 - DNA, 1276 bp, Cannabis sativa
tttagttaatgtccaccgaattctagttgacaatgggagtttagttaaccttctcaacttccaagctttaaagcaaacggggttgcaggagaaggatttttaacctgtaaccttgagtatctatgggttcactggagatacaatcccactgaaggaaatgatcaagctgtcaatcgcactaggaactgccctcgttattgccaagtcaatggccaattttgcagtaatcgaccagtattccacatacaatgcagtgataggtcgccccattttgaaagagatgaagatagtaacctcaatctatcatcttatgatgaaattccctaccctcgcgggtgtgggatccgtgcgaggagtccaatcagattaaagagagtgctataacacaacactaaagctcacagaaaagaagaagtcggtaaacgtgatatatttactggaatcacctcctcctcgacaagaaatttttagaattgaggagatacagcatgttgaaaagcccgatttggatccgaggatccttgattacaccaatatgcacaagctgcagaagaaacaattgatgtaccaatcgatccttctgatcatagtaaagttttaaaaattggttctaaactaacctttcaacaacgagaaaagcttgtcactattctcaagaaaaatctaaaaaatttcacgtggaaacattcagacatggtcggaatatcaccgcaggtcatgtgtcatcgattgaacattgacccaaaagtgcgaggtgtacattgacccagaagtgcgaggtgtctgacaaaagcaccgcaaaatggaccctacgaggtaccaagtgctcaaagaagaagttgattgccttttggcatgtggcttcataagggagtcattctacccaaactggttagcaaatcctgtacttgtgcccaagctgaatggctcatggcgcacatgcatcgatttcactgatttaaataaagcatgtcctaaggacaattttcctttaccaagtattgatcaacttgttgatgctaccgcaggtcatgagctccttagtttcatggatgcatactcgggatacaatcagattccaatgtattagccagaccaggagcatacttccttcattacggatcgaggtttgtcctattataaggtaatgccctttggtttgataaacgcaggggaaacgtatcagaggctggttaacatgatgttcgcatatttgataggcgagacgatggatgtgtatgttgacgatatgctcgtaaaatctcaacatgcgaag

SEQ ID NO: 133150 - DNA, 574 bp, Cannabis sativa
tctctgggatttcctccccagtttctttaaattctctaccatttcttccagaatggaaagttttagtggtatttttcctatgataagtttgatgctctttttcaggacgttgagttgtctctcctggctaattcacttcatttcaaggaatatcatctgccatgaatggacaatttgaatttgttttcaaggagtgtgttctttgagtttttattacaagactctcaataaaagtaccaaactgttaaagtagatttttattaactaataaataagctttttttaataaatgaactccagaattaattaagcaataattgataataatagtaataataaatgataagaggatttttacgtagttttaaagttaattcttcatagtccacgggtccatcttattcaaggattgatgaattatatactgaatacaatttattgttttataggatgaataatagatataattctctctttttctccaaaatggtcatctcttgtatcttgtattctgagcctatttataggagtctaggatgataattattcttttgggatcttatcacttgtaacc

SEQ ID NO: 133151 - DNA, 1025 bp, Cannabis sativa
  modified_base (27)..(46): a, c, t, g, unknown or other
  modified_base (725)..(728): a, c, t, g, unknown or other
gcacttagtgcggattggatgttgttnnnnnnnnnnnnnnnnnnnnggatcggatgaacacccctagatacgattacatgttacatatgtatcatattgtatgaggattctaagtattattattattatttttttccctcaaaaaaaaaaattatttattttttttttttttttgagtaatcttaacaacttaattttggtgttagtttatgtttaatatttgagtaaattaattgaaataatatatcgctaaagtgacctcttttgtataaattaatttatttaaatattatgatggttgtgtgtttgtaattgatgcatatattgactaactcaaaggtaaatgaatattttgctaaatttcaaacatacctctggcaataaatgtgtgacaattataacgtattttgtgtgaacaatacgttagttcaaagattaatctattgtttgacacaattttattgtcaatgtttgactgctacaccaagagtaccactattattgtccaaaaacttgatattaatgtgtgtttggtatcttgagatgggattaactaatttttgaatttattatgcatattatgcatattaatgtgagctaattttatttgttcaatactcaaccagttcatcttctgttgtctcaatatctgctaatattaattctattcctatgcttaatagaccaatttcaaggattagaaaatgaacttacttatagttctnnnntgtatagatttagaccatgcactaaggaatgaacaacatgcacctctcactaaggaaagttcccatgatgataaaatagaatttgagaggtgggatcgttcaaattgcatgagtctaatgattatgaaacacggaattccagaagccttttacagaatttcaaggggttactatggccaggaattttcattaggatctagatagatattgtttgacattgttttatggttttaatatgatttattttctctcagtttctatgtattttatttcattcgcacttaattacttttaatt

SEQ ID NO: 133152 - DNA, 1506 bp, Cannabis sativa
atttatataaaatataattttttaatgtattttttatgttggtgtacttttatcattttgttgttatttgtgtattttttttttatgttattttttaatgtattattttatttttttatgttattttattattattatttttctgttacttttatttaatttttttattatttacttgtgtctaaataaaatattataaaaatgtaaaaaaaaacacaaaatataaaaaaaatcattaatttttttacaaaaataacaattttttaatttttcctttcaacttttttttctttcaaaggaggaaaaattaaaaatattgattttaccggctactttttgttgtttaagcttagtaaatataaatatatcattgcattttccttttccaaatatttaaccgtcatcaaatgtaataattgttatgggataccattaccatcctcaagtttggtttatacttctacggtaataaatttgatccccactccttgtccttgtttatgaataataataataactttacttcttccaactttgtcctcttaaaaataataattaaaatatataaatcacatagttgagtgcttaaaaccattagaaatactaaattgtcgaaaatactcaactattataatctatggtttcaaacaatcactactacaaacaccactattctcgtcggtcctgaaaactttttttggggaccgtaagtcagtggatcagtgatcttcaattggaggtgcagtgatggcagtcatgggttgttatggtctttgtgtgcgttagaagaagagaacaaagagacagagaatagaagaagagagagaggagggttgagttatgagatgagtatttttaggtttaataaaaaaaaatagtctaagtttagtgtatcaattttgcccaagtatatgaatattaattcaaattttcctagggaagaaaacgagttttcttcatctcaactatcgtttcacttatatttagccttctaagttaaaattttgacagtaaaaccctcaaaactgctgaactagtagcaaatttaaagtgtcatttgggtaactgttattatgaattgttcatgtgtacactcttgtacacatgacacttttatattggtacacctaatattattatttcaaaattatttttaaaattaaacaaaatgataaaaataaaaataaaatattttaaaaaaataaaaaacattataaattttgaaataatttttatatttttaggtgtaccaatataaatttgacacatataaaagtgtacacataaaccttttatattggctattaactataaaaatagatagataactacttgagctaagtggccatagtgtgtgttggaggttctaagttcgagtttcaaattatgtattgtgtaatatataaacgcttaactaaaaaaaaattataaaaaatagatgacatagaataataattgagagagtttaacggttttttcatttttatacttcaaaacaattttttt

SEQ ID NO: 133153 - DNA, 1147 bp, Cannabis sativa
  modified_base (33)..(37): a, c, t, g, unknown or other
  modified_base (196)..(199): a, c, t, g, unknown or other
tttctagtctcaattaattggttttaattaatnnnnnagaattctaaataagactatgtcttgtttgtgaattttcaccaaggaagggcttaattgagaaaaaaaagagaactcaaggtttaattattaattaagagaccttggagggtataattaataaatatatttaaatagtaattttatttgataattattnnnnattattaaatagatagaattagtatttaaataactagagcaaaaaaatgacattattgaagaaagacaagtttgtttcattaagaaaataaaataatggtaaaattctaactcatgggcttcactaaggggttcgaccatgagatgaattataagccattggatctttctaatcagcccattaagctctacctctttcttaagcttctaataaagcaccaacatatttaccgagatttttagaaactaaatatttaagagctaaagaaatactaaatttgagaaataaggagatgaatgttttttatgtggttcatgtattaataaactgtaatatcctaaaaacctaattgtgaataattacagtttattatatattatgtacaggtagtaatgagcaggattatgatcctactaatttgattcaacataaattataaattttgatataagtggatgtataaatgtaattgattaattacagagatttatttagaatatgtggatattatgtgagttattggtgaaataataatattttcatgttcgacaaccctagagacccgatcggaggccgaaaatgtcacaacaattttagttaataagtttgatgaaattattgagataagttgattatagaattaccagagtattttaagtactcggggttgaccaaataccttagggttagaaatttctttgtggctaagaaaagataaaataatcttgtattattattattattatcttctttttatatatatctgttgaatatatatacatattattgggacttattttaccaggatttcaatttactaccatgtatcttgtttgatatcctaaatcctaaacatgaatttctaaaataatggaatttaaacacatataaagttcaagaaatcttacattgattgcagtagagttaaatgactcattccactcagat

SEQ ID NO: 133154 - DNA, 530 bp, Cannabis sativa
tagtataattacatcttatataattattggtattttaaataaagtgcacacacgtggcgtccctgttggacagggcgttacagtcttacacaccgatctctatcttgtatcatcgtaatcatgaacggaacacaccttgaccatcaactttgtcaataagattttttacacaggtcctaacatcgatctccatcttctgccataatcatcaatgggacacgccacttgactacctcaatactaggtagactttcgatacaagaaatcacatagatcttcaatcgcaaggtcatcacattgagggcttttcccataaatcgcacatgcaacccagttcttccatcttgtcgccccactacatcaccatgactcctacattagtatgatattgtctactttgggtctaaatcctcacggttttgttttgggaaatttacaaaaatactggaattttggttaacttttacaaaaatactgtcacacggaaatattttcaaaaatactgtgtttttataaaacaccagtaaaac

SEQ ID NO: 133155 - DNA, 1069 bp, Cannabis sativa
  modified_base (145)..(147): a, c, t, g, unknown or other
  modified_base (1013)..(1020): a, c, t, g, unknown or other
tttatattttacattatttaaataattttataaaatgaccttatttgaaatttaaaataagatatattttaataaaataatctagataatttgaaaaatctaaccagatattttatcaacttttaaaattttgttattttatttnnnttaaattataaaattagataaataatatttatttatctttttattttattagacatttaattttttttcttttgaaaataatataaattttgaaaagctagttgatatttttgaatagatatttaggtttgttataaacttaatttttcaaatttataggtttaattttaaattaattatataatttaatttaattagttttttaaaataatattttattatttagattttttgaaatttaatttaattaattaatttaaattaaataaatcctatgaccaatcatccaatttgttggatgtatattttatttattgtttattattcaaacttatttttaaaaacctattattgtttgatctaaattgttatggttaacttgttgacagatccaatgatataattttaactataatccaattgtcaataggtcaaataaataatttgtaacacgtaaattttgtaatcttcttttatcaatgtataaacctagtaacatgatggtatccagcgaaattagtgtgtgtatgtgcctatatgttcgctttgagcctagatgtatatagggagcctatttaattttgataattagaatggagtaggttgctaaaataaaaatatcacatttgatagtttttatttaggtctaattagtatttggcttatttaatgaataataattgtttaattaaggttaaattcctctccttttgggccttgtgtgagcgttagggggccattagtagtgggtaagacatactaaactcaacccttcttcacatgaaaaacaccaattgtgaaggctcatctaccttcgttgaataattgtaatacattaattacattagtttaacctaataaaattnnnnnnnnacataattaatttttaaaatatataaaatttatttttcatcaaattatt

SEQ ID NO: 133156 - DNA, 1198 bp, Cannabis sativa
  modified_base (593)..(602): a, c, t, g, unknown or other
  modified_base (1142)..(1157): a, c, t, g, unknown or other
tgttgttttcgtgttatttttttagaaaatcataaaaatataaaaaattaaacgtaaaaatattttacaaaaaattgtaccttatataattattcctaaaaaaattatatacatgccgcctactctttacgacttggctatgtacgctgtgttagaaatagatctaaacaaaatacacatagatattaaacattatcaaagttactctgtataaattaataaaatgaaagacataatattagatatagtttttcatatactaatattctctttataagttcatacggaatggaagaaaggagtaattgagattagtcttagagaccaatccttaatattagagccccataaaccctataattaagtttactattgagtattacacgttacaacgcccataccaaataaaatgtttattgaactcatttaattagatcacttatttagcttaatttagaatattagcttaaagaaattgttttaatttgtaagccatattaaattatatattaaaaactagaaaaacatcccgcactttgcggcggatatataaaatattttaaattatatataaaaaaataaattgtgtattnnnnnnnnnnataattacttaataaaattatattgatagtttaattttattattaaaaaatttgtgacataaatacttaaaatattaaatttattgctaaaaaataacataaatactcatttatggtttaatttttattttgatgtgtgtgttaagttctgagtttaaattttattgtttgtgtttttaatatttgagttttagtgttttaaattaaagctacagtttaagcattataataatttaaattgatatacaatttaattatactgaatgaacttaagagtttttgtgagtagagataaattagagtctctcattcacaacgctattcgagtattttgatgatacttcctttctcatcccccatctccatctcgtctattttgttgcactctcttctcccattttaatgatacttcatttctcatcctccatctccatttcgtctattttgttgcactctcttctctcatcttttttacctgcattagatattttaattattcgagtattattattatcaattaattttatataaatatatatnnnnnnnnnnnnnnnntaaagtgtgcctatataactaaattcttggtttatgagaaa

SEQ ID NO: 133157 - DNA, 1430 bp, Cannabis sativa
aaaagcaaataatgaaattgattagatagacccccttagtgccaggtccacctcatcgcttacctgttatgtcagtttgatattcagtttgttttcttttggttttgtacggcgcaagtgggcatagcatttgttatatgtttatttttattttttttgttggagtgttttgaatgcatttactagaaaggactgttgttgtgttgatgatgacatcatgcggcacagaatgaaatcaaacaaacaatcagatgaagaatcacccccacgagtggtttatcttctgtcactctttaaatcccaaaatgaaagataaaaataactaaattcatttccattgttattaccaaaaatgcttcgccacgccttttatacataataataatagtaataatctagttaatgaatagataatcgcacctcaaaatattgtagtatatatatatatatatatatcaccttgtatataagttggagaaattatttttaaatgaaattaaggttcgtttagtaatatatttttttttttaataatttacggtataaatatttaagtttaacttcccgttgtaaataaatgtttaagtttaatttttaacgataataatacctaaattataattttagaacttctgtaggtacctaaattaaataaatttccacgtagtagtaatccatgattggtctaaatcgttaaatttttattatttaaaaaaaactagttcaaatataccaataagaaaatgacacgtggatataatggcttaacatttaacggttaggtacttctagaaatataacttagttattattactgacaaaaattaaacttaggtatttatttacaactgggagttaaatttaagtatttatgccgcagattagtctattttttaattatttttttttttttaatattggaaatgtaataatatttttcaaaaacatgttctataaaattgtttttactttttaactgagaattaaaattttgaaaataaaaaaaaaaatcacttttaatattttttttaaatgattttttttcttaatcaatattttggactccgatcagacgtggatccactacaagaaaaatgggtattaatgaggacaaatttcgttggtaaaaactcctattttcgtcagcattcctcatcaatgaggacatttcgttggtaaaatttgttgggaaaagttcgttggtaatgaaaactatcaacgacgacattgtcgttgggaataataatctatttttttttttaaatttcggtgcatcaacaacgacaatgtcgtcattgatattatatcaatgatgacattgtcgtcattgaagagtgtgtccaacaaaaaattcaataattatattaaaattatttctaattaattattattatattatattaaaattatttaattaaataattatttta

SEQ ID NO: 133158 - DNA, 1641 bp, Cannabis sativa
atattacgtaattaattttgtccacattcaatgaatataaaatattcatttatcacaaaatcaattctttattttattccctaattggaaatattttgatactagtgacttgctgtttttaaagtaaggttgatgctgaaaggtttaccttttgcaatctctttacatggacatgcttaaccattaaattaagcaatctatctttttcaaattgaacatcttctaaaggcacaaatataaacttgtttactataattttctttagctatttttctctctaaagttgcccaagctagatgctacttagtgaaaatagaaaatatgggacgaaatgtggcgctgtattcattgtatgctatttatttgtatatataaatatactagcagaattttacgtgcaatgcacgatgctaatttttatattagactgttaattatcagtggtaaataaattacggaaatggtgttagtttgtagattgttaatgggaatatatatttaaattaaaacggtgtcttcactactttgatctagaaattaaatgactattgttagtgaatgcacaagtgtccataagattgaaatttttgaatatcaagcagatctctaaataagaagaagcagtcactctgccttctccactgatatccgagtttgtataagttttacaagagcatgtgctcaagcatttagccctgcattcctcaagattcataatcttactcacccatgtatatttcgtattaaggcaatttcaagctagaaaatttagtgaacccatctttcttctatgcatcatctcaagagcgctcaaagaactctttctcacacactatttttaccaacaccttggattccaattttctttaatctttggctaaaaaataatggaaaactggattagttgttatgtcatattttgtattaactacacaggagctatagtttcacacacagctattgcaattgataaatgaaaaagagtcccaatttttcattgctattcaaagtatagtactcctatttataagtaaattaataatggagagaggttaggactgttcaagtgtcaacctcttagtgaagctatttcagcctctcacctgtggcacccttcccccaatcaagaagtgtagaggtatgagaatattttatgctgttttggttaattaacccattcactaattaaaaaaatttgactctttggactttcactgtaagaaaaactgaaaaaaaaaatagtaacgatggtgatatataatgcatttgtataacaaactgaatgaagtattagttttagtaccgtgtgaagggaatcagttccaagtacaacaaaatctaagagtagaatcattaaaaagagccagctacttcttatctcttcaaccatattaagaagagaatggaaaatactaaaattggagaaaagaaatattatcatccagagagggaaaaagaaagttagtagagtaccgataaggaatttttcaaagaggaatacccatcccaacaacaacctaagcatattaacttcaatattctattcggtaaccggatgctccacctgcaaaaaaataaagtatgaatgcctcacactcatattaactatgaataaaagttattagagggatttagattgtt

SEQ ID NO: 133159 - DNA, 800 bp, Cannabis sativa
taatatcttaaatatttgtactaaaattaatttgtataaataaggtaaatatataaattagtacaattaattatatgaaatgaattaaatgcaaaattaaagaatatacttaatgataactttttcaattaattcaatcaataaattacttaattgttaaataaataaaataattacacacttaattgtagaatattcaaatattcacattcttaaaacatcacaattattataattacatgtaaaataaaaacatgtaattatttttccataattatttcttactaaataacatatatgagaatatgtgttaaataaaaatagaaaatttaaacaaaattaatttaattgactaaattaacaaatataaggaaataaaataaaattccaaaatagataaattttcagaatttccttaaatttttcttatttttttttttttggaaagtctgccttgaaaaatgacacgtcgtatggagtcggactcaaaaacttcatgctggaaaacgacatgtcatttttcacataagacgaaaatgacacgtcgtacgaccttgagtccaaaaacttcatactgaaaaatgatatgtcgctttccacataaagaaaaaacgacatgtagtacggagtcgtctcctacctccagccgggtcacttttgacccgtttactgcacgtgggtccgttcgacctgactcaaaacccgaccataaatctattttctgacgtctaaaaatcatgaagtcaatttcaaaatgatctaaatgaaaaaaattaagagatccatattgatttcaagca

SEQ ID NO: 133160 - DNA, 683 bp, Cannabis sativa
  modified_base (61)..(69): a, c, t, g, unknown or other
agagggtctattttgtcatttaacaaaacagagagtcaaattgataacttttgcaaaacannnnnnnnnaaatggtatttaccctattttattatgatgacaggcacacgggtattaattaattaattgattttttttttgtttgtattttaaaaataatataaaaatacattctaaggtaatttttcgtggaaataaaacttaattgttaataatatatgtacacaaatttgacatgcatttatgtggcaagacatttttgataggtgtgacttaaataaatatgattgatttaatttttttgctaacataagtgtgtgtatcattacattttgaataatctaatcttaatatgaatgtgtgacgactaaataaattatattttttttttttgcatatgtttatactaaaaacttacagttgattatattaaaaaaaattgaaattgagcacaagattttattttgtgttattttagaaaatataaattctaatttgtcaaataatgaaacaaaaagtctaatcggtaatttttataaaatacatagtccaaaatagtctttactcattaattaggggtgttcatcaaattcaattcgtactattttgctcatagtgcgtccgatctacactaagtgcggatttcattttttgaatccaatccaatctgcacaatagctcaa

SEQ ID NO: 133161 - DNA, 883 bp, Cannabis sativa
  modified_base (823)..(825): a, c, t, g, unknown or other
ttcttctttcttcttctttttcggcagatgcccctcgtgcttctccaactcattccagccatgaatcttcctccactcctcaatctcattagttttcaatcccaatctcacactcacccaaaaccgctcagtgtagaacaaaagagacaacatccaggagagagcttcaaacgtcgataccgtcttctccgccttcttcatctttcttctgcttcctccgctcttctccgtctctcctctgcaaacgtcgacaccgtcaacaggagagagcttcaagctcagtcaaccccgatctgatttctggattttcccccttttgggggggtttgatttttgaaaaaaaaaatgaagaagaagaggaagaagaagagcggacagttggggttggacaatcaaggatggacgagttgggctggacagttggggttcgatttttgggggttttgctttctagaaaaaaacgcagaagaagaggaagcagaagaaagatgatgaagaagaagaagaagaaatattaattatttttttaattattcatggctagaatgagttggagaagcacgaggggcaatctgcagagaaagaagaagaaagaagaaagaagaagaaaaagaaaaaataataataaaaaataataatttttttaaattaaaaaaagtaaaaaaaaaattgattttttaattttttttaaatatttaaaattattttttaaaactaatattacgtggaccactaaaaatttgctacctgtacaagtgtgtacacatggacagtccactgtgacacttgttgagttttgtgccctaaataaaatctatttcannntaatcagatttacttactaataaatatcagaaatatcatttttatgttgcatggttca

SEQ ID NO: 133162 - DNA, 1172 bp, Cannabis sativa
aataatcatgagggatctttgaacccttttctcaatgtcattagtttagatatatatattattattattccaatggtccaatttgggatctaggaaggaagagatcggcgcatacccattagctataagctcaatttgacggcgccttgctgcccaaaactaccaactcatataatgggaacaaagcaaaaaacaaattgagcaatagctaaagaaagatgaacttaattggtcaacttcttaactactaagactaactagtgtctagctaatggatctaacacccaaaccaaaaaaaaaaaaaccatcaagaaacatgtgaattgaattgaagcatccataatttcttaatgtctcccactaaagaaaatcatgacgtggaagtgcacttctctttagactaaattgccatatatatccagccttggtaggaattctctgaaataaagcacctaaattattcttttggggtggggttgtgtggtgtggtgccttatagtttaattgtccatttcttcaacaaaccattactaattttctatggggtcttctccactagccacagtaatcagatagatatatataatatgtatgcatgttcgagacgccacgtctggggcaacctattataaatatttgtcaaacttatgcatattacttgattattttggacttaaaataaagtaatgataacaaagatcaacaaaggtatataaatatatatgtagcttgattagtacaccgcaattatttaatagtgttgtcataatccacatatgaggtatcaaacaccatataaatgcgagtcaacatattttatgtttacaaaattaattaaattataagatgagcccgtttgatttatagttgtatgttattcaaccatgaatattaattgagtagggaaacaaagtggatcaactacgaaattaattggtgtgcgtcggtaagtggtaattatgaactaaaaatattatgcgtttcaaattaattgggctccgggaggctttgagttggatcaaagatcattcgtggctcagtgtgattttagaaacggattgtctttctgtggtacaagctagctatgtggttatgcttttcttgtttgacaaagttgttagtgattgcaaaaatttattaagtactttgcgtaatgtttctttttattttgt

SEQ ID NO: 133163 - DNA, 759 bp, Cannabis sativa
aaaatggtatttaccctattttgtgtaacgaccgagaggtctaacttatttgaatctatgatataggcgcattttctaaaaaaaaaaaaaaaaaagaccatttcatttacttattatttggtaggatgagatttcttcaaataattaattattgttgttctgatctctaccacaaaaatataagttaaactcaagtaaatgaggttttccttcaactataacttctagtctccgggaagctctctttatatgaaaatgacaatagtaactagtagtaaaagtcaaatccattttcaattgggggcggaatagaatattaaactattaccattatacccaaccataccaagatgaattatttccttagcaccgaagtgagagaaaagacaaacaaaattgaactcaaaaagttgggaatcaggttcttcatgtatattcatcttttgctcatataataccaaccaaactcaagtacctaatacattttttcattatattacttttttttttctttcatgcttcaactactagttacaaacatcacttgcaaatttaccattgtataaactcctttctaaaaaaaaaaaaaatgaggatgaaagaagaggagaggtcacatcataaactatttgttttgtatcacacttgcattcaagttcaaactagttattcatgactgattaagtcattcatagtttctttcataaatttttataaagtgtgatatttgtgatgatgtcctcaaaaaaaaaaaaaaaa

SEQ ID NO: 133164 - DNA, 1052 bp, Cannabis sativa
cttcaggaattgctctgccaccagtagacggacatgtcataataattttaggtgggccccatctttctagaagtacccgtaatgcgcaaaagagataccttaaggaggtggaagagggagagatgagtgaattagtgtggtctcttgcatagcgtctaagaatgatgaatctcctaattacctttactaaagaagacactaagaatgtgaatttccctcacaatgatcctttagtaattgatgcagagatcgccaacaaatgagtctctagagtcttggtcgacaatggaagttctatcaacattttgttcaaattcgcattccaagcaatcagacttactgaagcgaatctaactccatgccctttccaactgtaaggtttcaacagtgatcctctaatgcccatgggaaaaatctagttgccaatcaccttcaagggagataatgaagcgagtgcagttaaacatttgaccttcgttgtagttgactgcttgacaacttataatgccatactaggtcgatcgactttagtggactttggtgtcgtgacttccatatggcatttgtgcatgaagttcccttgcaacaatagttgcatcggcaccgttaagcgtgatcagcgaagcgcaagaaactactattgttatctaagtttccttctatcagacacgtggcaagaccacagtgggaacacggtttctacgcaagggatccgagagaattaaaagaaatgactcctagacccgggaggcagtaagaggtaatggatttcagagacagtatcctccgctaaggaactaggaaagcggtacaggttttggaagacgtcgaacacgttagctccttacaaaatggcgctctatagacggtaatacctttttctgacacaagatcagatattgtccccctgtaccaatcatgataatgcaccgtacgcacccttgagcatgctttcttctcaatggactgggtagagactatttcgtaaaggatatacctttggacgacacatgtccaaggtcgtacaaaggtcctcatcagtcactctacac

SEQ ID NO: 133165 - DNA, 561 bp, Cannabis sativa
tttactaaaccaaattactaaagcggtcattacatattgagactgttaaagtcagaatcttctcttccttggtgtattattggcgacttaaacagtactactagtcttgcagataaaagaggaggtaagagatatccacagatactagtggatggtttcaatcaagctttgtctggctatgatcttgttgatatggagttaatcgggtatccttatactagggagcgttggagaggcactgaatgatgggctcttgtttgttccaactggttccaaaggttttgcatggctcagcttcataatttggaagtctctgtctcagattattgcctactgcttcttgaaccgacagtgcgttctgggacggtgccacttcgtcagtttcgctttgaaaatgcctggctgcgtgaactgctgtgtcgccaggtagttaaagatagttgggagtgctgtgaaggtcagcatgttatgaaaaaaatctcgtattgtggggaatctcttcaagcgtgggggcgagagtatacaggcaattttaaacaacgaattagccattgcaagcgg

SEQ ID NO: 133166 - DNA, 1292 bp, Cannabis sativa
ataatcaaaataattttgattatcaatgatatatatactatatatatgttaagaataaaaaataaattatatatacctatatcggggtcggatatgatgcagatagtattatccccgcctccgtcccatccccgcttcgggtattgaaattgtctcccactaccgctccattaaccaccaagacagggaatcccaaccccattaggggcaggtccccgtggtataaatttccatctctacttcccactattaatactttcacctttacatcaaataaataaataaaaaataaatactttcacctcattaaatttattctcattcgaataaatgaaaatgattgtactaaaaaaaaagttaaatgaaaatagcttacataaaactgtatgctatagttttctatattttcttgaataatataatccaacaataattaatttgccattatgttaattatttttttaaaaaaaatgtattactccattctcaaatcaaactttttatttttattattttgaataattcataagaaataattcattcactcttaaaaaagagatactttatttaaagagataattcaattaagtattataaaatttctcgtgtgaatgcatgttaattagttccttttcattatatttttaaacatataaatatatattgaatttatatcaattgttatatatattttttaaatttaaatataatttatttaaacaatatatattttgaagactaatcctaatctgtataataatatatatctataatgaattaattaagaaaacaaacgcataaaaatattagaaaaaaacaaatttagtaaatttattattcatattagagcaaaaaaattataagaaatataaaaatttagaatgtaatataattttataattcaattattattaaataaaatataaccacacgtgaagcgcggtatattttctagttacatattaaaataaaatcatacaatttcaagaaaatttcaaaaggaatttacttcagcaaaattgagattaaactactttaaaataataaaaaaaaacaaatttttgaaataatattgcatttgaaataacactatgtatgtttctttcaatttttttttttttttcattcttgttaatgtaagaaaaattataatagagattgttgcccctgattttgcccaatatacgtggaccaaccagacaaggacacgtggacacaaaggtcttaacactcaaattaatagctaagtctttataaagaaaggcattatccgggacctacctcccggagaa

SEQ ID NO: 133167 - DNA, 787 bp, Cannabis sativa
atcctaataaaatatttccaacagtaatcaacacacatagggtaaaattgtcttacaccataacccctaaaattcttgacattccaaatatctaactatattgtcacactaatacaaagatactaaaccttgtctaagtgactctataggcctaatgtcgcattccactattatcgggcataaaatatggaaatcataaaatttcacctgcttcataattaatacacctaaagttcaaatataactctataattgcataaataataatcaaaagtctgtttcagaatataagctctaattatctattaattctcataatagagttaagcagtcattataattatcccctataaaaaggatttcatcctcaaaatctaacctaaaatactcttgatattgagccctcatatcaaactctaattcccaggtggcttcctccaccttactatttatcctgagtaccttgaccaatgctctagtcttattctgaagatttacatcctttttgtcaaggatctaccctggttgctcttcatatgacaaatctggttggagctctaaaatttcattattcaagacaagagtgggatctgagacgtatttccgtatcataaaaacatggaatatattatgaattgctgacaatactagaggcaaggctacacaatatgcaactaatctaacattctcgatgtaaaaccctaactagcataggcgtgttaacgtgattttaaacatactgtgcagctcattgctaagcaacgaggttaatgaaaatcatgattaa

SEQ ID NO: 133168 - DNA, 883 bp, Cannabis sativa
aaaaaaattattttcctatgtaattactaactattttgccaaacaagatattaggaattcatatgtaattaccaccttatatccaaacacaccttgcattttaagatttctgtgctgtgaattacttatgcattattgtatcccttaaattttttagtcccttataaatggttctgtcaaattttgtcactcgtgacaaataaaataatgacatgactgtttagctaattggcacatattggcacatcagcgccagatgtgtaatttaacataaaaaaaaattgcatttttagaaaatcattaaactaaaaattaattaattattaggaaaattatgtaaaattaaattaaaaaattcaatttatttttttcaaattaattactagcattgacatgacactaacgtgacaactggcaaagcaatcatgtcatcattttgttgttccgtgtgacaaagcttgatagaaggaccaatttacaacactgtgaatagttcagggactttttttaacagactaaaaaaattcaacagtacaataatacatatgtcatagttttgaggacaaaaatcctaaatagcctataataaatggataagttgaaaaaatacctcttttcttatatctattaataaaaaataccctcatattgttttttaattaaaatatacccacttttttttgagtgaatttcctaatataccctcactctctacttaagtatagcatatgttgcccctgattttgcctaagatatgtggaccagccagacaaggacatgtggatcaagtaacttatcatccaaactatttgctaagtccatatgtaataaagcagcatccgggaccatcctcccggagaagacataaggagccccatacgct

SEQ ID NO: 133169 - DNA, 821 bp, Cannabis sativa
  modified_base (749)..(789): a, c, t, g, unknown or other
ccaagttggggtggggccaagctttaggctcctcaggctcttctcgatggttgaaacttctttggcagctaaatctaccacctaataaaaaattgtgtagaaggcatgtctgaatttcattccggcttatgccaatttatctcgccatggtatgaaggtttctacagtatgtctaatttgctcccacaataatgagactactattcatgctctttggctctgcccttttcttaagtctattcgctcgaattggatttttagtggtcttgactccttgaaggatgcttctttgctattatgatcatttgttactggggtgtatggatatcttgagacgacaggaacttgagcagtttataacccttggcaggcatatttagaataggcgaaatacctttgtgcacgatcacaagctcctctctgataacatggttagtgcttgggctatggattatttatggaagtatcaagatgctaataagtttgggccagcttctatgggtctgtctcctagcaacgtgagtaatcgattggtctcgtctgagactgatgtggttcttggtgagttcaatctttttgtgggtgatggaatttgtgttgagaaccgaaaaatagggatgggggccttggtttacaattttatggggcatgtcctcttctcgagtgcggctccttgtgcgggatctactattaaaaatagctacttttagtggcagtagttttatagtcacaacataattttttttgtnnnnnnnnnnnnnnnnnnnnnnnnnnnnnnnnnnnnnnnnnactaaaacataatatttagacacaagttgtca

SEQ ID NO: 133170 - DNA, 1451 bp, Cannabis sativa
  modified_base (845)..(845): a, c, t, g, unknown or other
tgtgggcggcttgggctatgggtgccgtgggggatttccaagtggcagtggccgagcttatggctctccgagcgggtcttgtttgggctaacaggttggggttcactttggtgcctgtggagacggattcttcagctgttagttcttggattaactgtccggataatattcttatgtttaaacctattgttgaggagattatttctcttttagcggttgttggtggtggttcttgctgtgccatttcgcgtgatgcgaatggtgtggcccatgcactagctaagtctgttactagtcttttaggagttcagttgtggacagatgcttgtcctagatttattggtcctcctgtaacagttgatttgctttaatttaatgacatactttctttcaaaaaaaaaaagattatgtaacccactaatttagccaataaatgccaataaaaatgtactcagggatagagagcaaaaataatgctcttagaccatctccaatgaaacggcataaccctatatatgctgttctttttttctcaaaatgctccaaccacactgcaaaagctaacctattttcatggagttctacagtgtcccactaataatggtgggcatagactacagtatatatctttttaataattaaataatatattttaatatttattaatataatttattaaatttgataaatatttaatattaaaatatttctattatattaataaaataatataataataaagaatatattttttagtgtctttgatttaacacaaaatatgagttttatctagcattggagatcaccttatataccaattttcctttatatatataaatatatanatatatatatatgtatactagaagagagttacgtgcgaagcacgtatattaattttatattaggtgctttataattaaactgaaatcataaaaattagaaaaaataattccctcaaaaatcaagtaagaataaatcacttcaataattattattagtatggtataaatatagcagtatttacaaaagtaataaaatatttattgtgtgataatctctaaagcaaagaaaaaaaaaatactaaagtcgattctttccagggatagatgtttgttggaaggattttcaactactaagatggtagcagaaagagagagttaagataattgtgagtggtacataattgatttagtattatcgattaatttttacatgtgtaacaaaattcaattctaaaatctaaaataaattaattgatagaatgaatataaaaaagcaagaaatataataacttccaaataatattatattttacaatgcaacttttgttgtcacgggaaaaaatcctaatcagcttaagttttttaacttttttcttccaaaattatatgatattttcttagaaaaaaaaatatctgttctatataaaatgtggctatataacataa

SEQ ID NO: 133171 - DNA, 533 bp, Cannabis sativa
ttgttgcacttagtatctttgaattatctacttctgctatagtgttggttgtagtataatggctgtcactgcatcccaattttggaattcctagatttgggtgcgactgaacgacgtgcgatcgattactgctgcaacaatgggtgcggctgaacggtcggaagtctatgaacggcaggtgatatctaaacgacgagtaggtgcaatggtggggacaaataaacaatctaattatatgcagacctagttagaatgaaaagtgcaaaataaaaaaattacactgtctctgtcgaaacaaacaaagaaagattaaaatccacccatgaggatcattattttgcatatctttagacagatgttatcttcaattatcaacaatttagagaatgatttatttttttatttttatcttacacacatttaagttgtgtttccttaagtatttgaaggtcaattattatttacttttaattgtcaaaattataaattatattatttagatatacataataataatctcacctaataactaa

SEQ ID NO: 133172 - DNA, 776 bp, Cannabis sativa
taattattacctattacactgtgggcatgttgggaacctcgaagaatggcagccaaacccaaatcaccaattttgacctgtccaagatgcccattcacaaagatgttgtcacactttagatctctatggatcacaggtggatcaagcccatgtaaatattcaagcccacgtaagatttgtccggcccaattctttacagcttctatatttactctctggtacttttgtctgtacctattaaatattaaatattaatgtaagaatttaatgttgttaatttccacaaattataataacttcattcatagcaattctgaaaaaaattagctaaacaattaagtaattttttttttttccttttttaataaataacattagcattttagacacacttactcaatatttgtgtgaaatatcattttgtaaagatgtaacataacaataataattaaaaaaaaatatatatgtatggtgacatagaaagatgtatgcaaaaatatgtagttgaaagaataaccttttctttttaattattacttggctatttgcacaataataattttgttttgataaatattatatagaataattttgtgtagatttcatgcaaagactgtattttgtaaaacaaattatagagaaagcaacattattttcctaagtgacaattagtaattttcccccccgaactttcacatgtactaaatcgtgctccctgaacattttttgccgttaaaaattccccccgaacaattgaaattgttaaatttaaggat

SEQ ID NO: 133173 - DNA, 751 bp, Cannabis sativa
agcacaccaatggagcctaatctaaagttgtctcaagatgagaaagacaagccagcagaccctacactttatagaatgatcattggcaagttgcaataccttgttatcactagacctgatatagcttattcagttaataagcttagtcagttcttgaccataccaagagcaaagcaccttgttgctgcccaaagaatccttcagtacataaaatcgagcccaggacaaggtatactccttgttgcaaactcagaaattcagctaagagctttcacggatgctgattgggctgcttgtattgacactaggagatctacaacaggtttttgcatctttcttggagattccattatctcttggaaaagcaaaaagcaacataccgtgtcaagatcttctgctgaagctgaatatcgagcaatggcaaatacaactagcgagctgatttggttattgtctttgctcaaggagcttaaaatagaacacaaagggcctgccttgatgtactgtgacaacaaagctgcacaacacattgcagccaatcccgtgtttcatgaaagaacgaaacacattgagattgactgccaccttgtgagagaaaaggttcaacaaggactaatcaagactatacatgtttctaccaaagaacaactagctgatatcatgactaaagccttatttcctaatcagtttaaggttcttaaagacaagattggattggtagacatataccatccatcttgagggggagtat

SEQ ID NO: 133174 - DNA, 700 bp, Cannabis sativa
ggtgagagaacatctccaactgaagctagaagatcgacagtctcttttactttgagaagataatcattcagtgacatggatcctttcttgaggttctgcaatttggtctgaaattcaaggatcttggctgaaacttgtaatgtgaagtacttttccagtgtgcaccagatctggctcgcagattcgcacccaaccatgcgagttaataggcttggagtcattgaagagagaagccaagacaccaatagctgatcttgagcttcccaatccaggtactcggggttgattttctttcttgctcgatcttcttcactgagatacttggagggaggatcttgatcttgaatgtagtgttgcagacgattgcctcgtattgctgccaagacttgttgcttccacagtaagaagttgtggtcatttagcttgatcgagagactgtgattgaagtagatgggagctaagtcgtcagtgtctcttcttcttgatcgatgaagactctgagtctgttgtgaaggatcatgttgatcttgactggaactatcaccgcctgtaacacccttcccgtgaccagtgacgacgttcgccattaatggagggaagtcccgctctgataccatgttaattctcttagccattgaaagaaaacaaaagagagaatgaaagagagaaacagagaaacagagagaaagatgaatttgag

SEQ ID NO: 133175 - DNA, 646 bp, Cannabis sativa
aatagattatgctaggttttcttattttgattttaatgaaaatctttaaccttaactatccatatccattaatattaatctaatgatatacctttatttcaacctagaaaaccatataggacaaaacaatataaaacctaataaaatgactattttatccctccaataatcacttaagttaatttataacctaagggtattttggtcattaccaactaccccgactaaactgacaattcaatattctaaactagtttggtataattccaatataactcattctttatcgtcatggcatctttaaccaatccatcgagtttctatggtttgcgaactcaaaaatattttatttcaaaaatagtatacaaatagccacatattctgataaaatttctataattaataaattatcttaattattcatttactcaacaataactaattaactcatattagcttaaggaagattataatcttactctcatatttatataattacatatttaataaaatatgttaaatttaacataatcataattttctggacattacacaagcaccagagccattaaggaagttcacaagagagaagaaatgctatttcagatgattattttgtatcttttcaagaacatgaggatgaaat

SEQ ID NO: 133176 - DNA, 1798 bp, Cannabis sativa
atttttgaaaaaaaaaaaaatcacgtgacagtatttttgtaaaagttaacccaaattctattatttttgtaagtttcccaaataatatcaactatttttttttttgaagaaaccaaataatatcaactactcaacatgtttttgtattacaatctttatttttacttataattttggcaatttaatttatctttttgtattactacattattttcttttatggaatttgttgttattacttatatactttcaatttcttcttttcacttttttttttttttttttgcgttaatggcggttaaaatgataatttttttttaaaaaaagttaaataaataattatattaataatagaaaaataaaatcttataattttgaaatagatgatataatataatgagtaatatataattaatatgtcaatatcaactactgcacattgtgtcaattaaaaaaaattaaaaatcttatcattgtattttaataaaatgtgtcaaaaaaataaattaaatatatgtatctaaactacgaagtaacacatataaacaaaaaaaaattcaggatgaaactaaaaatatacaccataagaaaatacatatgaataaaaaaataaataaaaaatgacttcaacaaaaaaatattctgaaaaccacttacaaattactaaaaaaataacataaaaataataaaattaatacacatatatacaacaaaaaatttgtgtggaataaactaaaaatatacaccataaaaaatgcacataaactaaataacaactgtacaaaaaaaaaatacataaaaactgttagggtttatgccctgagaagcctataaaaatagttttaattattaataacgaggtgaacattttaatatatgcttgaatgttatattattaatatttattattgaaaaatttatattaaatatcagaaaattcctttttcatatatgagactgtggcttgtagctgtacaaagaactaagaccacttagctatgaataaaacagtcagtaacatattaaagttatgaaatctttaatcaatggttgctaatacagttcactaatgcctattctacgatgcaagtaatcgtgattcgaattattgatgtaatgagacatctaagtgaaggtgcttgttgatctcaaaaagtgatcaaccgatagctgagtcgtatggatctgatgcttgccacgcgttacacaaatagaatgaaaaattataaaacacacagatttattatagaggttcggtccccttgtgatagcgggtaatgacctacttttcttttggttgtattgatacctagagataatactctttagatcgctataggtgggatccgatatagctctgtataaggattcaaacatagatcaagttggcagatctctgatgagagtgagaaatacccttagaagcgtgtgagcgatgaagagagagagagagagagagagagagagactagggtttctgacttagagtgatttggaggcttaatgacttaagttttctaggttagagttaaggcctttatataggaagcctaaaaccctaatttacaataaaacccttagatatttacatattgaattgattaaatacaaaaaactaaaccgcctctcaaaagtagataattttcatcagtttgttgggtcgttaagggcccaattcgtaggtagcttgttgtccacgttttgggctgtacatagagccctgccaggctaatcttagccgcccatagacctactgagaaggtgtaacacccttactaacataggcgtattacgtgat

SEQ ID NO: 133177 - DNA, 670 bp, Cannabis sativa
attatagcaaattttaattaatatgaattactctcaaatatattaatattgtaagtttcaattaaaatagggttcttaatcaaattactatatgatcactaaaggtctaatattatttatgtgttatatcgttattaaaatatttaaatatttaataatttaatttaggagttttttttttatttttacactttaaaatattttttttttatatttttacgaaattctaaatagaaatttctattgcaactaacgtttcaatctaaattgcaacaaaaaatgtatgaaaactcctattgcaactagcgttgcaaccactttaaaaactcaaaccgtaaattataaaaaaagttaaaaaaaataatatataaggtatatcactaaactatttaccatactctatatatcattgactcatctaaataaatgaaaatataacatactaaggatggtatatatatattttttttctataaaaataataaaaacaaaagataaacttataaataatcacttttacgaagactaaaaaaacaaattagtatttataataaagatatatatagaaatgctaaagggcaccatgcctagcatattagaatattttatatatggaagttattttctaattaaggaaataaataaataattgattttctgataaatgaat

SEQ ID NO: 133178 - DNA, 873 bp, Cannabis sativa
gatttgctaagaaaaggtaggcgatgagtttgcacccaaaattgcacagtttgcagatcattcttagtgacagtttgtagaacaggtggtgagtgcaagagaatcagattattgttaaagtgccatggttgaccatccaacatcctatgtttatcccctgcacaaccaagagttaacaaaaacatatcagagtgaaattcagtaacaataacaggaaaacgacatttagtggaccagaactctcccattctcttaataaaagtgtttggattaacaaatgggagaattgaacgggcaactaaaaaatgtttgggtgaggagtgtgggtcacgcagattagcctccgtaaaagcatgagcagtacgctccttctccgatagcataagactagaattcatattggtaatgatggactccataaacatcaagaaagcagaaaatgaagataaggatctcaggtacttagcaaataatcggatgttctgtatatatatagaaataggggataggagagagggccaagaaagatggataacatgggtagatagggtcggagagggacgggaaagatggatcatggcagaagaaaggtggccggagaaccagggagcagttgagaggtggcgacgaagaacaaaatcaaagtaactgctacagagcataaccccactcgggcaaaaaaaagttttttgatattttgaggtttaaattttaaaaaaattgattattttattttaaattatgttcagattttaaaaatttattaatctttttaatatttacatattatttaattataagatcagatattttaatattaaccatattttcaactaaaagataactttatccttttaatttgaaatattatat

SEQ ID NO: 133179 - DNA, 993 bp, Cannabis sativa
ctaatcttccaataatctttaatgtcttcaaaaatctatacacttaaaaaataaataacacaaaaaaatataatacaacaaaaatacactaacaaattgagaaaatatgagtacataatatcactttcctttatgtacaaaataaaataaaatgaaatatggtgaaaaataaagttttgaaaaaaaaaattgttaagaagtaatattgtaagaaaaataaaacagttcaaaatataactcaatagatatgatatcaaaattaacataatacaaaaatgagtagaaattaatacaataattcttatactattgaaataataaaattttaaaaagaaatcgttacaaaaataaagtatataaacaatttttatttaaaaaaatacacttaatttaaagaaattggacgaaaatagaaaaataattatattaggattggttaagatctttccattgaattcggttgaatgtataagatctttccatttttattttacttttaggaaaaattgaaagagataattacatattaaaatttttatattttttacatttaatttttttatattttttctatatttaataaaagcataagaaaataataaaaaaatcacttaaaattaataaaaaataacattaaaaatattaaaagtaaaatataaaaatacaaaaaaaattataaaaatattaaaaaatttatataaatcatattttttatttattttatttttgttgtttttatatattttttttaaaattatcccatagatgaagctatacaccatccaagtatacaattgaaatattttacttctatggtacgtttactatacagtattcagaatcggaataaattaatggagaaatgtaacggaatcaataaaaaataatcgaaaatatgttgtttactaaatttttttaaaaatggaaaagttatgatttattttgtttactttattaggaaacgtaattggaatgcttaaattgattaaattg

SEQ ID NO: 133180 - DNA, 827 bp, Cannabis sativa
  modified_base (29)..(60): a, c, t, g, unknown or other
attaaatgttatttctgatttatattaannnnnnnnnnnnnnnnnnnnnnnnnnnnnnnnatttagggcataaaacacaacagtaacaatattattttgaggtagaaaaattctttgaagttaatgaattactttcttgtggccttgtaagtattaaaagtgataaatgtgagattttaaagattcacaagcgtaaactgaaggtatgcatcgatgatagcggagtgttgactgaacaactccgtaatgaggaaacttgaagcaacaacaatgtatagctaaagatgataacaaaacactggcaacccatactttttttttttcattttttagtttttaatttttattttcaagctgatctcattttttattattttttattttatttagtcaaggaatcatgaaatacgtaagaaaattgaaaaaaaaaaaatagcgacatgtcgaccacagtaagtgacatattgcctgactgaaaaaagactaagttttatgctacttttgcccgccatttatcgtacattgattatcttcagtgtcctaatgagctcggtagaccatactagccacctattggtaatgatagtttaaccccgcttcaagcctctattgggtccttacactcacggaatgaatgactcttatacacgagtatgtcattttgcctgcttcatggactgatgactaatcctacagactaacactagtgtttccagcgtgctttgtcctcactcgcatgcttcctgggattacttcccaggaggtcacccattctgaaattgccccaagtcaaacacactaaattgtggagttctttcgtgatgggc

SEQ ID NO: 133181 - DNA, 885 bp, Cannabis sativa
ttaagtgattgtttttttttttttccttttttaattttatatatattttaatttaataattactataacattagcttaaaaaaaaaaaaaattactataacattcataaaatgttatgaataacatactttctttcaaaaaaaaaaaaatgttatctcatagactcgcagactcatagttattatgtctaataataatattctattataattgatgattattatattgtaaaaccttatatattttgaattaaatttgatctaaaatatatcataaaattatatttggcctaatttttatatttgtgctccaatacacaaagtacaaattaattataaaagtcaatatttactcattgaaaatatacaaataattaactttatttatattattttaataacttatataaaattgttttttttattaatgaatagtattaataggtaattaaaaatgtagcatttattgtggcacaatttttagcttgagtcaaatttaacacatattttacatcactattaaatttaacttttagcaaaatatttttttaaaaaatatcaatacaccacatttataactctccattgaagatgttctaacataatataataaatatttttgtaaaaaaaacggaaaactctccacgataagggaaatgtaagctagaagaacacaactaacatcttggagaaccagtaccactttttggagataaatttatatattattatctacaatgtacgaaagtggtataagttctcctactctttattgggataagttagaggaatatttttttttattcattaatcaaaaatacattcatattatattttattaaaatatacgcatttttttttgagtgaattgcctaatatactctca

SEQ ID NO: 133182 - DNA, 746 bp, Cannabis sativa
agggaaacacccaactaaggcacataagtggacatgaatcaagaaaacgagttgttcggggaatctgccaaaaccgattttacaggtcctggaaaactggttaatcgttttgctccaagttttctcaaacaactcaaaacttgtccaaatgccaccaaactttccagaacacctaaaataagcatacacaacatattctaatcaatagaactcaaaaaaaaaaacttagaatcaaaatatgccattcaaactcaaacttggtcatccaccacaacaatcaataaaaacagcaacaagaacttaaattcaactcattttaagcttagattttgactcacacaaacttcaaaccctaacagcccctaacttccaaaattacataaccaaccaaacttcaaactcaagaactaaaagattatggtactaaggcttacctccacttggaaattgctttgattacttgctgaattccagaaaaacaagacaaaattgctggttttccttctagttttgtggtggccgaacaaggagagatagagagagaatgaaggatgagttctctaattttgacttttctttatttttctctaaatgaataaagattaataactcaatcttttgctgaaaatagaaatggccaggtgtccacaccctaggctgcacctaaaccctcacttgacaaattactaaagtaccccttaagcttaaacttaggcattttaaagtctaggggtaaaatggtcaaa

SEQ ID NO: 133183 - DNA, 1351 bp, Cannabis sativa
ttttaataaaatattaattagatattaaattttacattaaaattttgtaattatatattggagcacaaagttaaaatttaatgtaaatttaccacaaaagcactttttgtgctaaatatagcacaatttttacatctcttgttaaggagatggtataaaaataaaataaatattataatgagagaacttttagcaaatgtcaccaatgatgatactcttacagctccaatattctcagaacatttttgtccaaactatctattctatgatgagaaaaccaaataatctcatatcaattcaacaacactctccatttgtccagagtacaatcgatgcatgtgaaaacgccaattttgagcccagagaaagaaaaccaaaaatgaaaccctaaagtattgttttcatgctaatagtgaaattaatatgttgaatagacaaagtcagaaaagcctacttttttattactctcatcaatccttaccgaattttttatttcttaaatgatgtgatagtgttatcattgactatcatttattgggtaattacttttaaaatctaaaactatggcatctttggcaattcaccctataaatttggtccattgccctataaattttcttctgcaaatgtcaccatgtgacaactgcattgattttatcactaagggtaagggcggccattaaaattctagcaaataataatatcatattgaatcttaccattgacattcttataaaattccgcctacaaatatacgagttatttgagtatgataattatttttattttagtgctgaaatataagtaatacactatttttttagtatttctattgacgatattttcgatatttttacgtgataaatttacatcataatttaatgcattgttagagtaaaaattttacatagtgaattatattaatacattctttagtttatttttctatagtcgtgtacgttaaattatttaagatattttataaaattttaaaaaaaattaaaaatataatttaactcgtttattacatgcatgattttttattttatatgtttgtgaaatagattgtttgaacactaatttctatattataaattattgtaaacttctcaaaattgtgagaatgtctttaataactttaacatacctgactatgaaaataaaattagactaaaaaaaatttttcgatatcaaaatattacgggatgcatcggtacacttatttttggactaatttttttcgtaaatactaaagggaaatttgaatttgtatacttgcatttagttaaaatttatcctcaaaactcataataccccatatttaaaatatatgaccatttttctattatgc

SEQ ID NO: 133184 - DNA, 997 bp, Cannabis sativa
  modified_base (484)..(492): a, c, t, g, unknown or other
ttattgagaaaatagcggtaatttttcgagaatgtcgagcttaaggactataactacaatttttcgagattgaaacttatcaagtaaatcttttcgggacttatctgcatcaaagtaattttttttagacttatgccttaatttaatatcaacacgttatagtttagagagaaattaatgagtttgttaaaaaaagagtaatagacttacaagaatctcaaacttatataatattaccgttattgtttaaaattaaaaacttatctatatcaaaataaaatttttaaagacttctactgtaattttctatttttatttgaaaagaattttagaattatttcacaaatacaaaaaaattgtaaaaatgcgattttacagaattttaaatattttacgattttatttatagaaaatgcggtctttttatgttgtatatattcttgttaatttgttgttgatttgttgttatatgtatgttattttnnnnnnnnnttttgatgttattttcatgttaattttatgtagtttttttattatttttcgtattattatttttgtgaaaaatagtaaaaatgtaaaaaaagatatctttaaacgtaaaaataatttttttttttttataaaagaatagtatcttatgtaattattctaaggattttagtatttttcactccagcaaaataaaaaggattatggtataaagacacaacttatggactaacaagaatgtcgagtttagggattataactataatttttcgaaattaaaatttattaaagtaaatttttttagaatttatgtgcatcaaaatatatatttttttttaaatttatgtcccaatttaagattaacatgttatattttagaaaaattctaaaaaaaaaaaaaaaagactaatagaattacaagaattttgaacttatatactattatcattatatatgggtaaataccattttgaatcctgtgttttgcaaaagttacagattggaccct

SEQ ID NO: 133185 - DNA, 905 bp, Cannabis sativa
  modified_base (848)..(869): a, c, t, g, unknown or other
atatttcagcaatttgcaattgctttggtatggaaagttcatctgacaacgtaattcaactaaaatagcgtttaattgaaatgaatgaaaatataagattatgaatgagaataagaataagaataaaaataagaatataatcaactttaaaatatatataaaaaaatattaaattttttctcattttgtaattgattttcaagtcattttaccaaccaaaattaataataatcttcattcaagtactttaaaatacaaccaaacgaaaaattagaataaaaatattattttatttcttttttattacttccaattacaccaccaaaatatagatgcagctcaaagtgtgcaaaacaacaaaatgagatattcgggctagtaattcaaaatagtgttaatatttttttcgatattatgttttgtaaaaattattaattagactatttattttgttaaataataaaataaatcatgtatttttttaaaatagtataaataagattctgaaattaattttcgacaatttttatttttaatataataaatttgaagacaattttcagtacaaataaatgtaataaacgtaatcagttctattaaaaagtttctatttcaagttattattaaattttattatataaaaaaaattaatttaaagtactatttccttggcgcaggagctttacaaagcatcaaatatatcccccacctaccaaatgctttccttgaagagtttgtttatcaaattaatctctccttttctcactttcctcatgtatctattacctttgttctaagataataattaggctaattatgagttttgcctcctaaactttgacatgtannnnnnnnnnnnnnnnnnnnnnttaaggtcgttaaaaatgccccataaactattgaga

SEQ ID NO: 133186 - DNA, 519 bp, Cannabis sativa
tagtttagccgccaaaaattcggtttttgtggttaagtgttacaaaccgtaaagttcggatggtttagccgccaatatccctaaattatattatgtgtccattatatctagtgcacaatacactgacaatcaaacatgatagttaacagttaaaaataaatagaaatgataaattactaacagaatgtggacttaaaaagttttacagctaaataataggatttgaggattaattgctagtatggtaaatttgttgaaaattttgttgcaatttctttttttttttctctatatcattgccttcgcttctatcagattctatgtaggtgtaacatttggttattatttataaatttaatattgtggaaatagtcatataaatatatattaatagaataattgagggctcgttcgtgcctttcaaagggaaatttaattttctatacttacatatacttaatatttttttttaaaacacataacatttaatatttgtgggatatgacacattttagaata

SEQ ID NO: 133187 - DNA, 571 bp, Cannabis sativa
taattttgaaacattttacacaatttattttaaaatataaaaaatagatgaattaccaaataaaaaaaaaatggttgatagattcattcgtgcttttcattttgtgctttagtgtgacattttcgtgctttcatgtgatgttgtgtttaagctcatattttttgtactgtatctaagcccatatttatttgtgtctaccaggtacaagtccatattttttatagtgtgtcgtaattgtgtcacttatgctcgtactggttcgtgtcgtgtcgaaaagctcaatccaaaggtaaatgatgagtatatgaattgttcccaaaaccacaaaattttctattaaaagataattttttttcttttttaaatttaaaatataaaataattttaaatttaagacactccttagcgtatataattttattctaaacatctactaaacaaaaattgttggtctatgtgttatagcacgcaaattttatggggtatttggtgtaagagttttacttagtaaattttagttgagtggagttgtgattactcaaagttaaatttaagttaattaggatttttg

SEQ ID NO: 133188 - DNA, 580 bp, Cannabis sativa
aggattgcagcctaccaatctatccattcttggaatttgcatctctactgggtgaaagcatcacccatagtagcgcatgtttcttgctggtcatggtgaaggaaatttgtgtgaccctgcacttgccctacaacctttctcagcctggcaagtatagagtcatcccccaggttaacatggggttcatcaatgctagggttgccaaccccaaatccagtctcactaacataaacacgaggtccaatccccatgtcaaaaacttcaacagttggttggatagtgggtccagtaggaggttggtctcttggccagacctccgtggtagaggtgccggccagttgaccagactgtggtggccagacagccaagtttagtttggtcccagtggttggcacttggacattgagattcgtgaccataggatctcttacttcagtagaactttcacatctcgtaacaaccatgcagaatggaaattaagaaaaaagtgagagctttatgaacaagaattctaagctctcaataagagcaccaaaattgtaacaccctaaataattaggcacgctacccaaaaatgctt

SEQ ID NO: 133189 - DNA, 765 bp, Cannabis sativa
tcaagtctgtagattaaaaaaaaaatagtctactgaatgtaaaaaaataaaaaaaaaaatacatatatatatactaccatgtaattttgggccaaaaaattaactaatagattgaaatagaaattgtaattatcgcaactcttttaaataatatggtgttgaaaacataagttgcttttaaattgtacctctaaaaatacgcatttattttctaagttgccagtattactttctctctaatataattgtattttgagatataaattaatgtaaatttttaaactaaattaatatataaatatatatatgtatatgtatttatacactatattataattataaaagagctgataaattttaaaaggaaaataataaataacttataatcaaaataaaattaaagagcaagttaaatatatttatgttatattaattgtttatatgacagaaattgttgtttctttttaaaatatttgtctatgtaatataaagtattttttagaatattgtacttaaaatttaaatttattgagcatattttaaaaaaatatttttctttattatttcttatccaatccacatatctaaaaaatatatacttttgttattgttttcatttttaataaaataataataaaaaaagtatttatatttcttaaagaattattgttgtaatgtattactttttacagttaccaaaaaaataattttatattattatttttaaaaagaaaaataaaaaagttcatgatatttctaaaaaaa

SEQ ID NO: 133190 - DNA, 590 bp, Cannabis sativa
atttctccaaaaatatgcagcctagtgacaaagtttctcaatcatattccctgatttgatgcctaataacatgctgcaaattttgctgccatagtggaagaagctataagtttctttttgacacttttccaggttacattctattatcttggcatccagaaaattagaattagaataccccacgacctttaaatgatctgactttctatatgtgagcatgtaatcttctctgaagatacctcataatcctcttggttgctatctaatggtccataccagggttgcttaaatatctacctaacatcccaataatgtgcacaatatctagatgcgtacacacctcataatacattagaatcccaacagatgttgcataagaaatcttttgcatttcttaaattttaagattacttttagggcattgactaagactgaatttgtctcctttagaaacatgggtatcacctagtctacaatcttgcatgtcaaactttttgagtactttatcaatataactcttttatgatagtacaataataccctgagaacaatctcaatgtatctaaattcctaaaacaaaataggcgtca

SEQ ID NO: 133191 - DNA, 903 bp, Cannabis sativa
  modified_base (861)..(873): a, c, t, g, unknown or other
agatgagaagaaaaattgagagaattttgctatagtttttctacactaaaaattacacaccaaaacaatgaaaatgagctccaatttatagagtctcaaaaaaggactaaaatgcaaaacataaataatttagggttacaaggtaataataataataataataatctgatgcatataacatcttttattatcattacattatatattattattattttattgttgttgatggatggttgcattaaatatgatttgatttgtcttttatgtattttatgtaggcatgggatgagttggcgtgaagaagaggagaagctcatgcatgaggctaataggtggctggcaaatggtaaagcgccatgtggcgtacgtatggagaaaggagagagctgatggaataagaaatggaggcagcgagccaatggtacgctgccatgtggtggcacggctggagaggagaagcgctaaacagggcgctagctggattgcgtggacgaatcgggagggaccatgtggcgctgacgtggactcctactgggctgaaggcaaattgggccttaagctcttttgggttgcttctttcttttctttttgggcagcctcatttttcctcaattcttctttcaattttgctactttcatatctctttttcttttcttcaacaacactttaattcctacaaaataaaaataaattaaattcaaataaaatattttcaatataaaaatgtatttcattaatttcgtgaaaatattaatttaaacttaatttattttaaactttaagatcaagaaatgtgcatttttcaccaataatcacatattcgaaccttgagtgaatgagtgtcatgcccacacatnnnnnnnnnnnnnctcaatcatagtgagtaagacggtggtaac

SEQ ID NO: 133192 - DNA, 746 bp, Cannabis sativa
  modified_base (27)..(28): a, c, t, g, unknown or other
aacataaataactgctaatttccaaannaactaagcgggctttacagaagggttaaagacagaccaactttcttctagaattcgagtcttattgatccgatcgaaaagacatatatatatatatataaactagtaaacaatttgtgcttcatggtgaatattaaaaagatatataaattatttacaaaaaataaattatatttattatttaatgataactaaatcttaaaatagtataaaattttaacctttttaacttttcatagaactcatagaagatgtcatgtaatatccgggaaacctaattatgataattaagatttatcatatattatgggttaattaagtagtaatgagtaggattatgatcctgctaacttaatttaacataaacaataaattttgttataagtggataaataaatgtaatttgttaattagggaaatttaattgaaatatgcggatataatgtaagttatttgtgaaataaaaatatttttcggttcaccgaccttagagatccgattggaggctaaattgtcacaacagttttagttagtaatattgatgggatcattgagataagtcgattttagaaatattatggtattcggagttgaccaaatttccaaaaatttagagatttttcagtggttaaaaaataataagaaaactatgaaaataaaatttttgttaataatattatcattattctatattatatattatgtttttaaaaatgtat

SEQ ID NO: 133193 - DNA, 1705 bp, Cannabis sativa
ttgggtcttcccaatactatgggttgtaagaagactactatcttgggtttccttaatgattggttgaagaagcagatccaagggtgggagggaaagcttctttctcgggctggtaaagaagtccttctaaaggctattgcccaatctcttccaaattgtgttatgagtgttttcctcttaccacacggacacttgtaaagaattggaatgtctcatggcaaggttttggtggcaatctgattcttctcaacataaaggtattcattgaatgagttggtcgcgcttgagtcgtcataaacatgttggagggttgggctttcgtaatctacatgattttaatttggctcttttaggcaaacaaggctgacatttattaactccatgtaattctctaactggtaaggtttaaaggctagatattatccacatggttcgttcctttcagctacacttggtgataattcgagtttcatttggaggagcatctttgagtcacaacaacttctttgagctagtattcgtagatccattggtgggggtcatgaagctctcattatgaatgagccttggttaccagataatgagtacccatatgtgatttccaatcacacatgcttgaaaaacaaggttgtctcaagtttattttagatgaatgagcgagtttaggagactaatatacttcatgatttgtttgatgctcgagattgtgagcttattttagacattcagttgagctctactgctgtacatgatgggcagtgttggaagaaggaaactttaggtatctacttagctaggagtgcctactgttttatttaggagttaaaagggtcgtggtctttagacaataatgtagactttttggcgcaaactgtgaaatttgaaaattctcccaaaagctcgaaactttctttggtgtgccatttctaattgctttcctactcgggctcaactaagaactaagcatgtggagcttattaatttgtgtccaatgtgtaatgcctatgctgaatctatttttcatgttcttgttggatacacttttgtaagatcttgctagcttcgatcttcaatttctctgggtattgttacttgaagttttggaaattggtgggccaatttgatgtctcattcaagtactggtgtggttgaagaagctgctgtggttgcttcaggaatttggagtgcctgcaatgagaacgtctagaatgacaaatcatctaatgcagcaacaatggtgttatctgctagaatttcacttgaacaatggaaacttgctcaatcaaaaaggcatgatgccttgcttgttgcgcctgcaactataagagatgagcgttggaaaaaaccagcaataaaccaggtgaaaatcaatgtggatggggctctctttgctgtagagggtcgttttggggtggttttggtggctcgggacggcagtgggaaggtcctgaaggcgttttctcgtgccaagactggtagagttgatcccttaattgatgaaatctttggagtcaaggaagcattaagttgggttgacaggaataagtggtcaaatgctattatagaaacagatagtcttatgtgtgtttaagctttttattgtgatgtttctatgccttctgagtttggcattttggctcaagattgtagagctttattactcaattgtcaaaacgttgtcgtttcttttgttcagcgatctgca

SEQ ID NO: 133194 - DNA, 587 bp, Cannabis sativa
tctaactctaagtttaggttgcctctagtaagcatatacaagtatgagattctctaagatcgaggattaatatcatttcgggataaaatgtctggaatatagtcatatgcactgttatacccaaaattcggcttgcgcttcagaggaggacacgtgtcaacctgggagaatacgaatcaaaaaatataatggtaattatattaaagaatattaaaatggaataactcattaaatgcagagctaatagagtatacctataactcgccgactgtacagtcttgagcgagacacgaatatacaaaccatttcgtttatgaagacacaatcataaggacagaatcagtaatgtaaagcagggcatcaacctcgctacgcatgaagaaacatagacaagacatgatgactgttattttacttagcgtataatatgcattatacaaaataagtataacagtttgatgaatctgaacaatgactaacgaggtatcaatctcgctataggcaggcatactcctagtactttcactaatcagcttcagacatctttcaatgagatcaactactccgtcgagtcagctctctcagat

SEQ ID NO: 133195 - DNA, 1049 bp, Cannabis sativa
gtttgattttctttcttaacttttctaatccattacgatatataatgcttattgtattgaaaatattataatgatgattacataccaaaatcaatgtaatctccattacaaagaaaaaaaaaattaataacaatataataaaaaaagtcaaagtctataataccctttttttaaaaaaaaatattttataattttataataaaagcaacaaggttattttagtcaatacacagtttattttattacattctcataccaaaccaagcattgtaatcaattcatattaacattcttattttattaccattactattactattaccattactattacattacattacatcaaaccaaacaccaccttatggggttctatcttaaaactaattggtgataagtagagtagtttatgttcttatacatgattcaatatttttacatttaattcatatgggataagttttccaataaatcttacgaaattataggtacaactaaattattaatgttatgtttataaaaatcaaaacgtacatatacataaaatatgagtgtgtgttatgtaagatatttctggtatttatatgctatcaaatctttttataatagagttttagtaatggaataaatgttatatttggtgtgatttattaatacaataaaatttttatctaaggatcaacaatggaaccaagttatttggagacagattgtctttgtgtattgcaagctttaagaagttccattagtatgatttccttgttcggtatggtcattcaagtgtagacaattgcttgctgatttgggttctgtttctttatgttttgttaaatggtttgtcactgcagtggctcataactttactaaggctggtatagtattccctgatattgtttcagtttggagtctgttccaattgagttactatcttgtcggtaactgattttgaagcttaataaaaatgaatttttcattcaaaaaaaaaacaataaacaattattaatactatatattataataaaattattttaagtaaatataatatttat

SEQ ID NO: 133196 - DNA, 980 bp, Cannabis sativa
tagactagaaattgtagtaaatgttaaaaccagatctacgaagttaccctataaatgtaaataactcttttgatgattaattaacatggaatatttggttctcttccatcctagtccttcttcgatgacaaacattgatgtgaatgaataagtaagaaaaatgggaatggcaatgattgatatcatgaacatgaaggggtgagtgttcatttagttttcactaattatataataaatagaaaatggaggcatgtgcagagttgggccatgtctgatcgatagattagatcgtgggaacatcagatagagagagagtgagaaagaaagaaagaattgttaatttcatgcatcgcacgtccgaggttaatgggcccacactaacaacactacaatcctctctcgttgaacgtgatgaccttgtctacttcaaccacgtgccccacccttattattaattaactagttaattttaggactatttacaaaaatatgaaaaaaaaaaaaataaagttttgataaatatagcatgtaaacttaattgcattaaatatggttttttttcaaaaaaaaattaaaaatatgagaaaattattatagataaaaaagaatgccataaaaaactataaaattgtggttcattttttatcatataaaataaccagttatttacataagtactgtaactataaatttttttttaacaaacaaaaaaaaaaaattataaaatataattttgttaaggcaataaattaagacaacaatttattctaagtaatcaaagccaatttttaatgaaaaaaccagctatatagttgttaaaagtcatatataaaatttacatatttttaataagctcaaaaacttatcaaaactaatgccgaaactaataccaacacaatactaatattaaaaccagttacaaacttctcggaaactccaatactagaccatcaacacactaccaaaacattcaatatcca

SEQ ID NO: 133197 - DNA, 546 bp, Cannabis sativa
aaatgattgttagggtcttcaccaggcaacccatgaaaagctggcagtaagtggatgaggcctgatttcagttcgaagttaacatccaaatgtggataatgaatgcacagtggttgttggtcaagatctagcgcgaccaactccttcaacgtcctattttgagccaaggttctgtgagaattaatcgagtcgtcaaaatcagactcaggatcagttgatagtggctctttgacaagactaagaggatgaaaaattgggttgtcggtgatattctttgatgatcgaaaagcagacgatgacttaagatattgttttacccttgatagtctctcttgaatatcgtctgcactagacttgtacacctgagattgtcaaagtgaaaacaagttagtaaagaaaaaattaaatatgaataataaaataaaaaaatagtctccggtaacggccccaaaatttgatgcgtgtcgtaaaccataacaaatttactaattatttttatttctatattactagttacttcagtataacggtaaatacaggtggatt

SEQ ID NO: 133198 - DNA, 1097 bp, Cannabis sativa
  modified_base (1057)..(1072): a, c, t, g, unknown or other
tgattcggcccatcacctaggcccaactctactcttctcctcttcaaatcagaaatagtcagcgtatcactctcctgattgtttggagatatgatatttatattcccagttgacccatatcccccccttgactcctgtcttgcttgatttgtggtacccacaatttgagccatatttccatgcatcattctctgtaaagacggcccccctctattgttaactggcacaaaatgtgggtcaatcccactgttaacgcctccagcattaaacactccagcaccaaagccgttcatctcctccgccctacctgaccggagccaccttgaaccaaacaactggtttgcccgtcgagatgaagctatcatccatttcccatactgtttgatgatagaatctagaggtatatccaaggctttttcacaaaaccgttcagagtggcccattataccacagagaaaacaaaaggttggaatcttttcatatttgaaagtagcccaaaacacctcagcactatcttttttttttaattttcatacgacgttttaacggagtctccaaagacaaagttgctcgtactctaagaaaatccctccaaacacccgagaaattattcgggttcgattcaacaaagcctcccaggtaagatcctgcagcctttacaaccgtctccgtcatacattctggttgcagatcatgaatttgaacccacatctccatcttattcaatttagccattttcggattgtctccttccttcaaccgttcaaggattaaatgtttacgatcaaaagtccatgggctaccagtaagcactctatgaatatccatttcatggtagaattgaaataagaaaagattagaactcaattccttcacatacataccccggactggcttccacaaatctgccataaagtgttgaaatatctggaaatctgagaccctccccgtaagaagacgtccaactagacaccaaagagtatctataaccagttctccttcccctggaccttcaaaaaggaactcctccccatcttctgttggaaatattttaccnnnnnnnnnnnnnnnnaccaagtatgttttattaacatcct

SEQ ID NO: 133199 - DNA, 708 bp, Cannabis sativa
tgttaaattgttaatgtgatagtttatgttatatgtatatataataaaatattgtataattgtattattttgtattttttttttttttttgttaaaaagagggatattttttttaaagaagaaggctagcctaacccgaaacccaacccaacccgcctaaactcaacccaccccagctcaaaacttgaaaaacttgattttcatacaggcaagttcggtcccaatattccgaaacccaaactcgaaaaatgtgaacctgaaaactcgaatacccaaaacctattaaaacccactcgatgtggaaccctacattcaatcctctggattctctagtattatttgtagagtagaaaatgcttatttggattcataagccttcatggttttcttcctcttgtattattagtagagtagaaaatgcttatttggattcataatagccttcatcgttttcttcctctccaaactatgtatttttagggttgtttatatttttataatttcactttgaaatcggcaactactccaaagaagtaaaaaatatatttttttcttatcacgaaaaaattatttaaaacaatataattgttaaaaaaaaaaaagtccacaccaaataatctttttttagaagagttaattaattttagggtaatttttagttatatacataaattattaaaaatatcttacatataacgataaaaaaat

SEQ ID NO: 133200 - DNA, 860 bp, Cannabis sativa
  modified_base (27)..(29): a, c, t, g, unknown or other
actaatcagattgtaaagagttttatnnngggcataaaacccaacaagcacaagcactttactcggctatatcttggtgccatgaacacttcttttatccggatagtattgtttcagattgtaatgtgttagttaattatatttgtaaaaaggaaactcataatctgcatcttaacccttttgccattgaaatcaaaagcttgctttcttatttccctaatgtatctcttagctacatcccgagaggggcaaattatgctgcccattgtttagctaagacagctttaggcttagagcaggaagctttatggatgagcccttctgtccaaaattaattgtatcatgtatcttgtacttgatgttcttcttaatggatacaagttcttttcaaaaaaaaaaaaaaaaaaagcttggccacgaggagttattttttattttttatttttctttaaccatgaacaaatatattttttgcgttgaatacattgaaaaaaagaagaaaaatctttcatctaaactatttcaccattcactctaagtgcatgcaaaactaattcatgagcatcgttattggccaaccgacggacatgaatcaggaatgcctcagaataattggatagtagactagaaatatcatctaaaagagaaccaagataattacaaagagatgatctcttagtgaaagcaaagatcacggttaggcaatcaaattcaatacaataaagagggataccaatttcaagtgaccaatccaacgccaccaaaggagctactgcttcagcatggataactgtgagattcccttcaaaaccaacacaaaacataataaaattcacccaaaaatataataataataataa

SEQ ID NO: 133201 - DNA, 610 bp, Cannabis sativa
catggcaataccctaaatatctcaaaaattggaaaaactagggttccaaaaactgccccaaccagaagaccggttccccaaccagaattccggttctgtcaggtttcctgggagccaaccgaaattccggttccggaattccaatttagtgcaggaatgagttaaaaaaaaaatcacaactcattcaaatcaacccaaaacttcatgaaaccttccagacctactaattagacctcaatgaacataaaccaagcaccaaaccaactaacatgcacagatacaaaaaccaccattgatgaggcaagcttgagttcaaaaactcaaagcttgctcatcctactaacaagctatcaaaacctgctcaaatcaccttatattaccacaatatagctacagaaaatataatctaacaacatcaacaagtacaacaagaaaaacaacatttcatgcaaaacttcatttttcttacaattcaaacaacgaagaaaattgaaactaagaacttaccttggcttggatacacttgaaattagataaagattactcagaattgttgaaggaaagctcaaatcctagcagccctaggaatttttgagagagagagagagag

SEQ ID NO: 133202 - DNA, 3860 bp, Cannabis sativa
tcttacctgatgtcccgtaataatagagattcaaaatccctgggtgctcctgaccaggtgctgatattcctagccacaaatccgggattttcacaaatagggttaacccctaattccacattcataaaatatatacatggcatttaaaatacatataatcacatagagctcagaatgagctttccaatgatatatagaactcccaaaacgaagtttggatcacaaagttatgaattttcaaagtttgcacttgaatttgcccgaaaactcgagggcgggcagcggcatgcaaaagccatgccgcggcacctgggaccaactcccaggttccattcaaagaggcaggctgcggtatgctaaaagtcatgtcgcgacacttgggtttcaaacccagaaaccagcatgcaaaccttcgaattcagcaacgcaacacacccaaatcatcccaatttacatccaaactctcaaatcactaaataaagttgctagaaacattagagagttaaaatgcatcaaatccccaataaaacacactaaaattcagattacaaatcaatgaatattaagctccaaactaacaaaattcaagctcatgaacttgagcttcaaaccattcaatcttactattttctagcagcataacactaaataaaacatgaattctaacctagaaaattccctgaaatctcagccaaaactcaacaacataaccttcaacaaaaccaagcaatcacactcaaactctttcaaaattaacactcatgcaaccatcattcaaagcttagaaaaacatgattttcaatttttacttcagctacaattacaaataaaggccatgaaaagttacctcaattcaaacccaaaaccaagcaccaagatccacaattatcaagcttcacaccaagtaatttctcacaaaactcactaactttgaaatagattttgagaaaaagagctagagagagggggtcgggtttaaggtgaaagaaccagaaaattcatcccttaattcccaaaatttcttttatttgttgaaaataatacaaagggtcaaaaagaccaaattgcccctagggccaaaaatgcacacacataacacttaagggcaaaaatgtcatttcacacataaagaaacccaattaaatttttagattattcaccaataattaaaatgccaataattcaattcaaattgcatttcgggcccgaacccagttcgacccgaaatacccggttgtgactataccacgccaacctgtcatacacacttgaaaaagacaacacagacatactatataataatatagtcccataagcatgttaataaattaatttcactgttttacccttttcgggtcaaaattactaaaatgcccctaactcaccaacgggatcttaacacgtcataaatcatataaattcacatatattaaattatataataatataattcctcaataatacataattatctaattaggatttttttaatccatttcataattctagagtatcacagaaacaatctgttggacataccttattcagatcagagaagtcgatacaagttctccaagttccgttaggctttgggacgagaacatgattggctatccacgagggataaaatacctcgcgaataaagtcgttgactaacaacttgtccacatcctgttttagggccccttgcctctcacaatccaagggtcttcgtttctgtcgctttgctgggtagtttggatcaacatttaagtgatggaagataatattagggtcgatccctatcatatctccatggctccaggcgaactgttctttgttcgccttcaaaaagcttattgctgctatttgagctgctcgtccaagttcttcccaatgtacacacaatttgtgggatttcctgggtggagaataacctcttccaaggtggagaataacctcttccaattattcgattggttttagcaggtttctttcatcttgaactcgatgacttcgtctttcttctcgttttctttcgccaagatcatcatcaactgatgactggcctttctatgctgcaactctatgcggtagcaatcgcgagccagcatttggtcaccacgcaccactcccacaccatctgacatttgtaatttcaaggataggtgcttgatcgaactgactgcccctagtccgatcagtgttggatgacccaacaatatgttgtaagccgagggttggtcaacgactaagaaatcttgcataacagtagtagataaagatgccttacctaaagttaatgcgattatgccaaggctggcgatactgtctctggtgaatccgcaaaggttcaccatacaaggccttaatttttccttttcgagccctattttttttagggtctccttataaaggatatttaccgagctgacattgtctattaacactctcttaatccttatattagcgagctgaatggctatcaccaatggattgacgtgagaatacctcacatttttctcatcttcctccatgaatgtaatgggaggttcctcgattttcaccttcttggaaagttctggggaaaaaaccgactgctcgttctttatttctttcacatatcttttctgggcgttattgctttcccctgcaatatgtggccctcccagaataaacagggtgtcctctccttccataggaataggttgcaacccctagttatttgggttattgggcagattgggctggttgtatccctagccctatcttttcacatactgcctaaaatggcctcgagcgataagactttctatctcgtctttcaattggcaaagtttttcggttgtatgtccaatatccttatggaatttacagtatttgttaggatctcttttgctcctcgaattcctcataggctcgggtttgctgaaggctaccttctactcatgtgcgagataaatattgtcctgagtttcattaagttggatataaatagtatacacgggcacgtatttgtcatgcttcttttgtttctttctctccttcaacggttctttaaatccatcctttctcttcggaccagaagcccctgagttatcaattctcgtggaaacagtacctgttgaaacattgctgggtttacttcccaagtttgttttcaacaagttcatttcctttcgggcttcttccttccaaacaggagccctttcgttgaactttgtgatgcttctcaccgaacgtccttgtaagtcatcccataactcaccccctgcggttaatggatcagtagagatccccgcctgaagggctctaagttgcgtgttatcatccaaaatttctaaccatagcggtagctgtgctaaaatgacttaagtatgccttaagtgtttcgtcgggctgctgctttatattggttagtaagaccgcctcgggttgcctatccctagcgacctaaaattgcttcttgaaatccctagatagctgctcccaggaagttattgaatgatgagtaaacttgttaaaccagctactcgctgctccaacaagcgaggtggggaacaaaatacaatgtaatttgttcatcacattactcgctcatattattgtgttaaagttattcaaatgcgagatcgaatctatggttctgtcataagacgagacatgcgggtttttgaatctcggaggaaaaagggtattcataatatatggatgataaggttgaagctcttcgtcagagtcgtatccagatggtttccctaattctcccactagatatctcccaaacttgtcctccagctcgtttatccgtaattggattggatcctcttgctttggaccaagttgttggcaaaggtcaggtttcttccgattcaagtgct

SEQ ID NO: 133203 - DNA, 934 bp, Cannabis sativa
gtagtttgcaaaatgcgctggtaaaagtcacttttaccagcgtagtagcgaactgtgctggtaaaaatgacatttcttgtagtgtgaataactagttttcttgattgtacacgtgtcacataacataacacttacatttattgttcaaaaaatgagtatttttttcttataattaaaaggagaacttagactagatggtcattacaaataaggtccactggaatcattcatacctcaaccataccaattaaattttgagaaaatatccaattagccacattattagccgtaaaattataaagtctagaaataaaagataaattataacacaaaaacaacttaaagagtctattacagtgatacatgtagttatcaatactccaaacagaacaagtccctttacagttttgataactatctcagagtcactctcaatcatcacaaaatagtgcttctaagaaaataccgtctctagggcaagaaggcgggtcttagcttcgccaataaggagaatggagaagttgagcctgttagtagcaacccataaaaccgttcccaagggatctctaccaatgtcgccacacgcatagccccaccctccattttcatgtaaaattaatcttgatccaatcattcaatggttaagaccaaagaagagacacgataactggaggaggagttggaaacaaacaagagccaaaatatgtataacaatgaacgatatacagtcaacataatatttaatattattatgcttattattgtgtactttatcattatggatctgccaaatcgtatataccacaatttaggcatagaggaacacctcatgtgtaaacactgttaggctattcttagcctaggtttcggatctattctatgtgcgtttttcgctgtattgggacggaattacgcttgttttctatgttttcag

SEQ ID NO: 133204 - DNA, 708 bp, Cannabis sativa
agtatcttatgtaattattcctaagaaaaatacaaacttctaatttcttaatcttttttagtaatatattgagctggtgtattttatttgttttataataaaaaggaaaatttacggtataaatactatatgttttcaattttatacaattaaatactatatctttttttggcggatttaatattaaacgttgtattttaagtctctccgttactactatcctgttagttgtgagtaggtgtacacatgtaaggctcagattaaatccctattttttttttttaaatatttagttaaaattaattaaagcttcactttttaatctaataaaaataaaaaggaaatgggaataagaatcaatcatcccaaataaccctaaaaatctcatctgtcttctttcttcctgctgccttcttcaaccaaaaaaaacaattacagtcagtcaaatttaaaaaaacaaacccagaaaccacagcagtaatttttttttttgtcctttgtttgtccaaataccccaataagtttgtagtttttgcttctcaagatgagcttagactcgacccttcggacctaatggatatggagctcaagttcggtcgcacgctcggtgaggaccctaaactcacccttgccaaggtcctttctctctctttgttcttctctcgtgatagttattagtgtttttggtgaagtgggctctttcaaagt

SEQ ID NO: 133205 - DNA, 582 bp, Cannabis sativa
  modified_base (45)..(55): a, c, t, g, unknown or other
tatttgtatatataatttttttatttttttttataaatatgtgtnnnnnnnnnnngatcggttacttttacatgtcaatgaacatccaatccgcataagtacagattttgaatttctaatctaatccaatccaatctgcacaagtgtgaatatctgcactttgtaaattgtattggatcagctattttatgaacacctctacttacgatgtccgtggatgtacttagctaggcagtgtgctctgattgctgcgggagttggtctaataatgagcaagaaattctcaaagtgtattggtgaggctccatgtaaggcgtgcgcttcaacgcattggtagatagtggatagatagaagatcgtttaaggggaggcaatgtgttcctgtgagaattattgggaatgcaaccaaagtcctacaataattagaaataagaaggatcatgggtataaggatagacactatcattgatgtgaagccttttaagaaagtgcctaaaaataaaaacatgagaacttaagctcaaagtggacaatatctttatatattaaaagtgtttatctaacggcatttcttggtttaac

SEQ ID NO: 133206 - DNA, 1322 bp, Cannabis sativa
ttataaatgtattttaaaaatatataaatataattagatgactattggatgataattagatcagtttggttagttatgcattggatcggatgtcacatacaatcgatctgatccaattgaattttcaaaatttacatccaatacgatccaattatgattagatatctgattctattgaatcgattggaattggatcgaccgattgtaattagattggatgactttctacacacccttactcttatatgtcaatattagtattggtccaattaaatattgagtctcatatattttaatataataatttttaaagaatatcgttagctaaatacaagacatatgtgtagaggtactagacactactgatgtccaatagtaatgctggtgtggaaaaagaccccatgtggggatgtttgttagtcaatatctctgtttgccacatcattataaagaaggataagtgttttatgagtggaacacgtgattatttctttagtttttttcttaagaaaaaaattattactccttaaatattttcaaaaggatctctaacataaagataagattattatgtttgattttttttttctgaaattaaatggtattccaaatcaattttttcaaaggaaagtcaataaaattagagattatttcacaaatacacaaaaataacaaaaaattttcaaaaatatgatttcacggaattttaaatattacgattttttttattttatttacagatattacagtctttttatgttgtactcttgttaatttgttgttgattttttattatttgtatgctattttttgttgttattttgattttatttagatcttattttcatgttagttttatgtaattttcttgttgttcgtgttatttttatagaaaaccgtaaaaatattacaaaaaatatatatttaaacgtaaaaatataatttttttttttacaaaaaatagtacttgatgtaattattccataaaattatcacttttgtctatacccaaagaaaattgcaatgatcatgaacacaatgaactcctctcgagaacactatctaagagcattttcaatggtagctaaaaatttacacatcatttttggtactcttacttttaaaaacacttgaatgtataacactctttaaaaatgctacaattatgatctcaacattattatttaatatatatatatcataatttttagctacaatagttttttagctaaaaataatgaataacatcaatgctacaacataacatccgtgcaaatttctagaatgacatcctcttctctccaatagtatagtatctcaat

SEQ ID NO: 133207 - DNA, 1287 bp, Cannabis sativa
taattatcccaattaatatctaaaaatctaaaaaaaaaaaattaaatactattttaatcaggatagtacagccacggggaaaatgatccttgtcatttttcttcatcccctatcttcagcttccgggttgtttgattcgtttctctgcatatgggctcgactgacccgacctaaaacccgattgtaaaatagttatttgacgaccaaattaaatgtttttaacccaaaatgatctaaatggaaaaataaagagatcaacgtgagttttatacatctaaaacacgtaaaatgttgactttaatttcaagaaaacattcggatccaaacattgatttcaaaaatttttccactcaaaacatgttatcatgctcgaattcattatatagcactatatgaacgtgatgaagctattcataaagaaattatatcaaattttgaaactagaaaattttctttcccatggttccgacaataaatttttttacatatatatacacgcatataatacaattttactgtataaaactatgagaaatatataaattagattattctcattaattaaataataaaatcatataatcatagaaaattatatataaatatgtataggcaaagctatatatacgtacatataaatatatattatatatatatcaatttgaagaacatgaatatatatatataaaaataaattaaatatgaatgtatatactaattaagattatataatataatcgtatatacataaaaaaaatatataatttatattataaatgaagaacttgtacgtttatatatatatatgaataaatgaatctcaaaataaatgaaggcagagatatataatttgctctgatacaatctgttggactataatatagaatgaacaataaagtatatatgaacgatatgtaatgccaaaaaaagtagagacatatcaaaatcgtatatgcgatgaaaggatcaaaatacctcgagctattgaatttttgaactttagtcccacacaagttttgatctgcaaagaaagttggttggtgtgggtaatcaggcttccaagctctctctactctctttagatggatttattgttatcataaaatgagtagtgaattcgagaaccaagaccctacatttatataggtgagaccttccattaagatctctgccacaattagttgtcaaaatattttgacaatcaattttgaaaattaaattgggtaaatgaaatatttagtaattaaatctgaccataattaggatacttttaattaattagtaaat

SEQ ID NO: 133208 - DNA, 619 bp, Cannabis sativa
aaatagttataattttaatgtaaagtaaataataaatatttttataacaattaagcccccacagatcaaaaattatgggtccgtcactggttacacctattcttagcttacgtgtcaaaaagtattaaaaaaattataaattataagctataaattataaatattcttaggttttttaatacgcgtataattattgtttgaactcacattataaattattcagatttaagaaaaaagattagagaaaacctattataattacaataaatactcataaaaaaattagaattataatcaatttacatacaaaaataagatcatatcatgttatccaagacgatcatactgtataattccacgtaatgttgaataaattttttttgtaattttgtttgggtttttgtttgtttgttcttttttttttttttctatcaaaaaaagggtttggtggtccataataaaaatgattatattggttgatttttttatttgggtgtatgattgtgctatttgtatggtttaaaaaatttagatatttaaaagaaatatccataaaaaaaaaaaaaaaaaaggggttgaaacattaagaatgaagggagcccagtttttacctggaaat

SEQ ID NO: 133209 - DNA, 892 bp, Cannabis sativa
  modified_base (852)..(860): a, c, t, g, unknown or other
cgagcatccgaatgtactcaaaagtgagattgtaggcccacaggtccaccacatgaagctaataggaccaatcgtaattctgctcgaagcaattcaaataatgtgggaaaccaatctcctccatgggattctcttcacaagtcttatgactctagaccaccatgtgaccctgcaaagggaaagggacctacagtcagacttaggggaacaccccaaaagctctaccacaaaagtgaagagtatgagatttggagggtgaagatcaacgaactactccacactgagaaatacttttatgatgaacgaggtgcttggtgtaggtacttcgcccgaggtcttgacgaccaaaagtacaaatacatcccatgggcgcatagagacttgttaaacttgagcaatcagtccaactccctccacacatgtcactctgaggaagactattttggaaggaatagtcagtatagtactacgagtagcttcttacgaagcaaacactcaagagataactctatcgtcatacatgataaatccttacagttgttagcaaggccacacgactaggaaacaaccacaagacctaggtcaatcaatccctttaatcgacatggaagacaaaagagcaggtgtaaaaacatcaagaagaagcgactagctgatacacacatcagcacagtgtgtagggccaaatttgacaccattgccgctctaattaagggtatcactaatccataagcatcagagtacagatgagatcaagagcggtgttatcctctatcggatcgaatcaaggctttagaaatcccttcaaagttcaaaaatccagtgtggcatatgttggaaatattttaccannnnnnnnnatttactaacaagtatgttatttaacacccta

SEQ ID NO: 133210 - DNA, 622 bp, Cannabis sativa
aaaacaaagatggtaagtaaaaaagttgatgtaggcgtgtaggggtaaaactgtaataaaatgtgctaaatagatttttggtgtaaaaatttctaaaaaatactcttatataatttttttattaaaatatatcttcttttttgagtgagttgttcaatatattattttttagggtctaatggggacaggtaaaattaaaacaagtaaaataaagtacataaaaatggcttatttcttaactaaacaaattaaatatatggggtatataagtagaaaatattataaaaattattaaaaaattgaatcaatttttcaaacaactctgtcatgcgataagaatttacttctttctcatgtgatttctctatctctcttcttggtctacttctggtaataatattgaatttgactctagtttctcggtctatatcaactaatcttatttgtcaaattttaatatattctaaattctaatgaatatatattttttttgttatatatgtactagggttgtacaaaaaaaaattatgaaccgcccaaactgaataacccgcccaaatcgaaccgaaaaaaccgataaaaattacaaaccaaaatcacctgaaaaaattacaaaccgccc

SEQ ID NO: 133211 - DNA, 1346 bp, Cannabis sativa
tttttgatataataataaaaatatattaaaataaatatagtatattagttattaacatgatcagaatatcagttaagctaaattttacttgaagaaggatcatgtgaaccccagtaattacatttcatatacataaacgtattttatcataatgtaaaataataataagaaaataatagaaaatgttgcaataatctcctacacctatgtaagcaaatactatatacattctcttttcttttaattttaattggttaaattttcttccctataatatagggtaaaaatagtaagacctaccatataattaccctatatatatatagggtaattagatagtaggtcctagtatttttatcctataatatagggaagaaaatttaaccaacaagaattgaaagaaaagtgaatgtataaagtgtttgtttagataggtgtaggagattattacaatattttgtattattatctcattcttattttacattatgataaaatactttttttttatgtattatgaaatataattactggggttcattgaccatttttcaagtaaaactagcttaactgatatttttttgaaaatgaagcttaattgatgttaataactaatatactacatttattttaatatatttttatcattatatcaaaaataaaagaaaataaatttttaatcaaaacaataaataaataatattgggtacgtttaaagcccttaaaaggttatttccgtagacttagcatttaagagaattttttaatctaattttttttcatgattgtgtacgttatagttatttagaattacttgtaaatttttaaaaaattttgaatattttacaatgccgaaaataagatttaaatattttgttgcacacacaattgtatttttcttatgcatgtgacaagtaattgtttaaactttattttcagtattgtaaactattcaaaaaaatttaaaaatttacaagtaattttaaatagctacaacgtacataactacaaaaaaattgaataaaatatttttttaggcatcaaaatagataagaaaatctatcacaacacctatttaagaagtgtactacataaattttcaataatatttagtagtgattatattggaatatttagtagcttagcatataatggcaatgaatttagtttttctttttatttgatttgagtagtgatttttttttaggttactcaatttatttggtatttatcaatataaaataaaatttccataaacccaaaagttaccaattgagatgcaaagtgaaaatatagctcacttaacataaaatatggagaagtttacacttacaccttatttttaa

SEQ ID NO: 133212 - DNA, 1722 bp, Cannabis sativa
  modified_base (27)..(28): a, c, t, g, unknown or other
tttaaaattccataaaaccgtattttnntaatttttttgttgtttttatatttttgtgaaataatccctaatttttttatactttttattttttggatttttataaaaatattggacattggataaaacaactaaaaaataacagtgaaaactgaaaacttaacacaatacatagtatttttgaaagaaaaaaatacagtattttttgaaaaaagattccgccccacagtaaaaaaattagaaatttcagtatgggatgtaaaaattcattttcttcgtaagtaagaatttaattagaatttaattacaaactaccaactttttacaaagaataactaaacacaactaatgtgttgtacttaaactatcaaacctctcaatatcctctatagcattctcttttctgaattgagaaaacctaaaacaaatctcttttttaattctatttacaagaaaattagtagtatatatttgagcattccacaaagtattatttcttgcgtcccaaatattgtaaaccaaggcatttatcaatgcaatacacacctctcttcttattaatttggaccttctacacctcttaatccatttcagactatagatcaactcacttttctgaagctttatagcaacccaatcacacagctcataaaagatcattttactataaacacaattgaagaagaggtatttatgagtttctatatcccattcacaaaaaagacaaatatccgagtcaatgacaccaaaacttacaaagctggtgtctagtttggagtcttccccaacaagccacccaaataatgtgtctatgctttggagtactttgcctattccaaatgatattaacccacttcatttcaaaattctctttcggtcagattttggaggaagtgtttgaaatattgaaggtcatattcttgaattctatagtccccatattacttttgataatctccttaatcataactattttcctgcagtaccaattggaactttacaaagcattataaccccaccaatcttgctctttgatgtagactgaatgaaccccacaaacccaaagattatctttttttatggcaatatcccacacatacttgctaatagctcccatattgcaaacatcaatatttctaaggccaagaccccctttatttttttattgacaaacattatgccaagcaacttgcctcggacaaaaggagtctgaaacacccttccctaagaagctcctacaaatattattaatttttccaagaaatgtactttagtaaaatcataagttgatcagcccaataagagcgtatggataacaaaacactactacaaaatgtctcattagcatcggtcaacgcgtctcaccaaaatagttgaccgatgcaaaaaataagcagagattttatgcttcacaggataactgaagctaaaaagtaccaattagcgtcagctgctactccgatgctaaaagaagaactgaggaaaaaagttaaaattttaaaaaccgtcttttatattttgcttcggtgaaaaaacaacactaatagctttagcttcggttgaaacctgaggttaaaaaatttgcgacttttatccaccgaggcaaaaagattgatttttttttagataaaaaaaaaattaagttttataatgttaggttttgtgccctaaattaaacccatttcaatataatcagatttactaaataataaagatcagaaa

SEQ ID NO: 133213 - DNA, 581 bp, Cannabis sativa
tagccattatctcattaattacttttctcaacaatattactcatatatatacttttacatgatatattatgtgtaataatataattgtcaatattttgtaacatatagcagaattactttgttgctatgtataatctctacaaattatcacctataggttcgtaatttgaaaattttgatgttataaaagttatgatatgtccatataagttacatatcttttagtcttacacttaatattgagtccatataatatctatatgatcaattagaattaattttgaaaggtgatatcctaaacactatataaagagatctaagatccttatattgagatgataaagtttttttataatcaataagcatttgctagaaaatacaggacttgataatttttaaagttatttccaagagagtttccttagtgcttagaaataggaaaaataaatttttggacaaaggtgataatacattatttaaattttggtgatccctactaatctatactcaaaattatgaggtactgtttatcttcttcttcatctaatattatttactatatatgttatataatatattgt

SEQ ID NO: 133214 - DNA, 645 bp, Cannabis sativa
  modified_base (32)..(41): a, c, t, g, unknown or other
agtatacgtgcctcgcacgtagtttttgctannnnnnnnnnatatagatatatatagattatatatagtgctatggcttcccaataattgggtggagcaagcgaggaggaggtgaatttagggatgcactttttatttgtggagtttttttttatgggaatgggttgtttgcgaacctgtttttattagcgcgataattttttgtttgaatgtgaaatgggaagggatgaggattatattttaatttcgaattaatgttataaagggtggggatgtcactttttgttttgatcagtaacctgtgtaatatttactaatttttaatagtgttttatatttttattttatttatgaatttttagtataatagtaattttttaagttgtattttgaataataatttgtatattaaatataaataatgtataatattttaattttatatattaagatttttaatataaaattattttaatataaatagatatcgatgagattcttcatcgcaatagagaattcctacctcttctgaccggtagggatccaaacatctgatgggtaaaggcccatctagccacattattattggacaccagtaatactcatcactttctataagtatcactttataattagttagcgata

SEQ ID NO: 133215 - DNA, 763 bp, Cannabis sativa
ttgtgactaaaatttacatttaattacaaaaaatttatgttgtgattaattaaaaaattattaaaagtaaatttttttatattagataaatacactgatatcttttaatatcttttttaaatattagatcttatatagtaatgattattaatagtaatgctctaataataagaaagtttgtagcaaaaactagctaacattgtttagttttgttacaatttgttttttttttattatttttaatcttttttcactacaaaacaattctaactaaaatcttaagtagttggctgcaaattttatgcaagttagagttatgattttgactagtcaacatatatatttataacttaataaaaaattaaatgaagcccaataaattcaagacaaaattaaactataaagtatatataataataatgcatatgaaataattcaaattggatatattataagaaataacaaaatggtaacgtaaaaatgagaagaatcttataagagttgcatttgcatgagtgtataatcgtcattgtaacaaatgaaaatggttgtttttgcaacaagaaaataaagtataatactattcttaattatatattctcatgctagcttcttatcaattaatgagaatcgatcaattacaaaatattcacaattccggtcaagtgattgaagcctttactctaggtaggacaggtttggtccaacctgaaatggcggagattatcggtatcaaagaggctttgagctggattgatagaca

SEQ ID NO: 133216 - DNA, 888 bp, Cannabis sativa
tatcagtaatttggtaaaaaaaaatagcaatttcaaaaaaaaaataacaaatgttgtccaataccgcgcgaagcgcgaattagttctctagttaataaataaaataaaactatgttagaatcatgtttgagtaatttagaggatgattagattaagggatggaagggaatataaaactcatgttttggacaggggtaacattactaatatcaaataaataagttattgcttttgttaaaaaaaaaaaaaaagttattgctctttttccagtatcagccaaaagaactgttataactaattcactccaatttctttccctttttttttaaaaaaaaaaaaaatggaaaattggctataaaatttgtagcatataagttggtcatgtagccttttatatggctgcttcttctatataaatataaaaattatatcaatatgcattcatattgaatcgatttatggtctaagaaatttacaaactaaaaatattcaataagttggtcaaccattatatattaaataaataggttctgtcatctatgtgaatcaacctatgaacatatgtgtgtctatatatacgacctctcatattaaaatttgattaattaacaagaactgatgaatgggcttttgattaagagcccattctcattaataatagggattttttcaataatatacataaatagaaaattatttacaataataaccttacaaaaacaattcacaatctttaacgtgccatgtcaccaaagaatacccatctttaactattagtgcctgacaataaaaacctagaaacaagtaaatatttaggctttttttctgtttaattgagaaaccattagacgtctttttcctttattttttcctttttgtgtttttttt

SEQ ID NO: 133217 - DNA, 1166 bp, Cannabis sativa
tttaatggtttcgaaattgtactgtaaggactccacactatctatttcatcaactggttcgtatgtttttagagcttcagcatcacaaacatcaataagttatattcttgatgagaatatatcataaacttcttaacaactttaatatattagctctgtcattcttttaattagtttaaacaataggtgtaacgaaatcttaaatctattgttaatgggttgacattgcaataaagttttcataaaacaaagtaaatatgttccaaaacagaggacaatatattggtgaagccctttccaaactaagcagagaaattgataaagtctaaaccaaccttgaacttttttctttgatttccttaagcttaaacacacggcgaaaatgatgattagtgccacgccggcaatggtggccacgacagcaataataattcttgtcttgtcactactcttttgtcctgcaaaaaaggtaaaatttgctctcttaactgtatctcagacattaaaataatgaaactagtctttcaatctcataactatataagtagttatggtgttatttgttcttaatttcaagctttattaccttctgtagcattgttaatggtgttactagtcggccccgtcgttacttctggggatggaggcggcgcgttatttggagatccataaaacaagtctttctcataccttacactacaactcgggacaataactctgcatcctactttcccagaacaacatgtcggaatttgttcgtacacattattcaaacaattgatacattgttgctcggacaagtccggggtgcactgtacgagtgcataaattgttaaaaaccctggagccttggcatttccggtggcgtacttacgaagagatcctcctgaagcggcttcgcttttcaagccattcaataaagtgctaagattatcaaaatgctcttcaacgttagaagacgacacgttttcggtgttaaacaagcagaatcttggggtagtctcaggaattcccaacatggacctattcgagtagcgtaagatcaggcagctgtcgtacccacctattacctccttctggttcgggcagatgtctttgaggacttgcgtggagttcttgaggcaactccggcagaaatcggttgtggtgtctccgcggcagagtcc

SEQ ID NO: 133218 - DNA, 569 bp, Cannabis sativa
aataaacattggatttatgccactaacaaacttaaaacttttggtacttatgcctctatttacccttatttaaaataaaacaaaaattattgttcaagtatcatacaataataaaactgatataacaggaataggaagcttacccacaacaagaaattattgattaagaaggtgaaaagcttggattatcgaaatggtgcaaaaaatcctagaagaatggtgctatgtgggataggccctctagatagaaggaggagcttcttcaaaagtaaatttagtgagagagcaaaaagtaaaaagtgaagaaagtttccccccaaaagcacttatataatatgtgtgggatccctccttaacttgcttcacatacacaacaaagagacatataaaatagttagtttattacagtgaataagatgagacaagcaaaccaaagtattttaaaaggctaacaatgcagcaacttctatttagcaaaggctacatcggttccaactactctaatctaactgataagtccctatctgttaacgcagattttcgtcaactaaatttgagcctcacagtag

SEQ ID NO: 133219 - DNA, 916 bp, Cannabis sativa
  modified_base (613)..(613): a, c, t, g, unknown or other
caacaaattataaattaacttatggtatctacacattaattccatgacactttaatacccttttgatacccataacataattggtcacttaattttgtatcacaaaatataatagcatatgcattatacatatgtgcccacaataagatttttaatccaacaatctcccacttgggcaacatatgttaccttataaatgtataacatcatgagcacaaaatttgctattttgtaaaggtattcacaacaatctcgtccatcaactatatccatataggatcaaagcagttttcatcatatcaatcatgactaaacccatcaatggtcacatatacaaatataccaaatgacatcaatcatggatgtttagcatagaaattacatgcaatgtgaaccgaacatgcccatttccagttggtcctccttaatcataagtgaggtcagacttaaacttaacaaaacagagtgaatgaacttaaaattttatatatgatcaaaaaataagcaaatacattaatgtcttaaataaacataaagcaaacaaaatgcaaactcccactgaatcatgatatcctcaagcaatactacacccatatgagtagtgtgcccatgnaagaccttgggtggtaatccttttgtgagcagatctactatcatggagtttgttccaatgtgctctatggatatctgtccactctgtactatttctttcacacctaggaactttatgtcaatatgctttgatttggatgaacttctattgttattagaatacaatactactaatttattgtcataaaatatcttgtgtggtctttctacattctccaaaatacgcagcttagcgacaaaatttctcagccatattccctgatttgatgtctcataacatgctacgaattctcctgccatagtg

SEQ ID NO: 133220 - DNA, 1351 bp, Cannabis sativa
  modified_base (31)..(74): a, c, t, g, unknown or other
tgtttattttattgttttagaaagttcatannnnnnnnnnnnnnnnnnnnnnnnnnnnnnnnnnnnnnnnnnnnggtaaaataatatccaacataaagttgtcctcctaatcctgatcgccgtcgaaagcatcccctccagtgccaaccatctggttgtccgataaatcgctcatctgaaagatagaagatatatcagtggtgaacgtgcgaaaacaatataagtgacctcacccacataaaaaattcaaaatctccttagaaggctgattcggattctcacgaaaaaccaatcagcccaccaaggcataaaatcgcaggtgtgcaaatagaagagtatctaaaaaaacggctgggtgtatcctcgtgacccaaggggcatgcattttcgagcatgaccctgaaattactgggaaacgcccaccgttttgaggaatctaaccaatcacaacctgcgagtatgtcacgcgtatccgactagcgatatacctcaaataactgctgggcatttcccagtgacccaaggggcatgccttttggagcatgaccctaaagttactgggaaacacccagcgtttcgagcaaatctactagtcgaagaatacgattatttgggaactgagagcactggcttatgtcgcaaatggctgggtgtatcacagtacttcaaggaacatgcgatcgcacgcatgaacattagaatgtggtgtcacacccaccattcgaaagacttaaccagtattcccacaacaaaataaaaccctatgctctaaacaacaagtaaaatgataaagtctctaggaattcctaaaggaagaagatatggaagtattcaagatgctcatctgaatacccgcgagtatttagggataagcaatcaaaaaggtgcgagtattcagactattcttcctaaatgttatgccaattacaggtccgtttttcctggggattatccaattttaacaaaggagtaaaactctatgtgtattccctacaactaaacatgcattttcaaacttctcaaagtgctaaaaaactcagaaatgcaattttttcaaaatcagaaacaaaaatacccaagtagtttcgaaaactaacctttagttttgacgattctccctgtgattggtgtagattacttctgaaacttaagagattcaagaagaaaaggcagaaatatggatgaaggacgtaagtctttgacattacagagagaaggggaaaagaggagttggaaatgagagggaaaataaaagatttacttcgtatcatggggcttaaatactgatagccctcataaattgggattgtgacacgtggcagcaggaatgcctaaggtcatcccatccaac

SEQ ID NO: 133221 - DNA, 1303 bp, Cannabis sativa
  modified_base (843)..(846): a, c, t, g, unknown or other
aatatttgaaaatcacacagttgtgatgggtccacttttaccggtcaatataaatgtgtattaaatactttgtaaatcgtaacgttcatggatgtctcgagtggaacacagcatcaataactttggtagcgagctggagcttttaccatgttttcccaaggttgatgatgtaagcctcgtcattcctgcgcttgaagacataatgctccatttgaaaaattgcagttcttagtgacaaagtggacctcagcaatcaacatcattcgtatgtcagcttctatttgagagagctgacttgacaaagctatgaaccccattgaaaggtgtctgaagctgattaacgaaggtaccatgagcacaccttcctatagcgagatgggcgcctcgctattagttttttggatttacctgattgttatacttagtttgtataaggtgtattatacactaagtgtcttaccaatcaccgtgtctcgtctcctaatgcgtagcgaggttgatgcctcgccttgtacatctaaagtcgtatggtttctcgttaacgtacgaggcaacagttggtgtatctttatcttgcataaggcctttcagccagcaaacttctaaatatactgtgtcaagcccgtattaaagagttattccattttcaaatataattaccattacatttgttgattcgtattcttcctagtttgacacatgttctcctctaaaatggtagccgaatatcaggtataacttcttataagataattttaatataagttttcaaattaaaatgataaagctgtctttttaatgtaaaatatggctaatattataatatctgatcttataattaannnntatataaatattaaaaaaaattaacaaatttttaaaatctgaccataatttaaaataaaataattaatttttaaatttaaacctcaaaatatcataaaattaataataatctattaacaaattaaatattattaatttagaattgatatttaagtttaaatatttcaaaaataataatttattttgaaatttgggtttaaaaattgtaaaaattcaaaatttggggaaaaatcgcatctttgtgtagctgccaacagtgttgcgcgtgcagccctcgagaggctgctagcaggccctatgcgcgcaaggaaagagcaattgcagcctctttgaccaagaaatctcagtcaactacagagtatcactcgacgtgtgcagcatgctgggtgtaacgtgcgtgccaagatgggacattactgttggaaattattttacctggatcttagatctactcaca

SEQ ID NO: 133222 - DNA, 683 bp, Cannabis sativa
gaagcaactctcacatctatataatcatcagaaaacccaagcaaagacacttcatcctcaattttccataacaacgaaatacctccactcctaccattggcatctacaaatatcatgccatcaaatcccaagtcacacacactctctccatctgagaatgattggatagagtctcatagagaaacacaatactgggcttcttttggatcacaagatccttaaggaattgtaaagtccatgggttcccaagccaatggcaattccaagataaaatattcataatgattggtgggcctggagaccagtacccaccaaactcaagttctttgaatcatttacctcttcacccaatgccatatcacccttcccatgggctccatcaaaatcttccaaagccattcttctcctcttcgtgtcaagaaccaagagacaagcctcctcaatgatatcattagatatttccttattcttagtagctcgtaaaatatcttccataattacaggatccccattaacaacctttgacgatcttatcctttcctcacgttgacccaaagtttgctccactatcaatggacccgaccccagcgcaacacgattcccctcaaccattgccatcgtcgactgagacacctcaccacgagccgtggtttttgctagagaatctgttgggttttatgccc

SEQ ID NO: 133223 - DNA, 647 bp, Cannabis sativa
atgatttattagagcatgtccaatcgagatgcttttagaatgtttgacaatatagatatatttttgacatcttttaatagatacatattacactgaaaaataaaatgtcattgtatgactttctttatatcttctcttttttattttttattattattattttgttataaagtaaaaaaatttaattatttaacatatattaaatagtaatataatattattttactaaaatttatatgtatttattataagaatattttaagatgaaatgtgtcaaaaatgatataaaagaaagacaaaataatatattttatttttaggtgatgaatacttttaaaaataatatcatttaagacagacggagggagaatttataaattataagatggggggcaaatttgtagaacaattaacttggagggactgattattgatgctcttactgactattatttctttagcagtggctatttatgattgtcattaataagttttaaatacttgcaactacaaatattaaatattatatttattatttatcggttgctactttgactacattaaaaattgtcgagtaactatagccttatccaaactttctattcaaaaaaaaaaaaaaaagaaaaagaaaagaaaagtaatgatat

SEQ ID NO: 133224 - DNA, 1881 bp, Cannabis sativa
tctagatcctgctaaaatatttccaacagtatcgactgtaagtggaagatggtgatcttccaacccgagggcgaggaaccatttgtgtttgtgggagcagttcaaggatcttgaattctaatgatttcggtaatgaaggctaaagatcttttacaagaaggttgtttagggttttggcaatggtgttggacaccacttcgcctgaatcaattcagtcagaagacatcggggtagtccaaatatttctagatgtgtttctcgatgaacttttaggtttaccaccacatcaagaaatagattttgtgattgatttagcacccgaagcggagctagtttccaaagaaccttatagaatggttcctacaaaacttaaagaattaaaagttaaacttcaagggatgcttgacctaggttttttgcgacctagtgtatctccctagggagctccggtgttatttatcaagaagaaagacagaatggtacacatgtgcattgactaccgggaactaaataaattgattatcaagaataagtatcatttacctaggattgacgacttgttcgataaacatcaggggaagacaatcttttataagattgatctctgattgggctatcatcagttgagaatccaagaggaggacgttccaaagactgctttctatactaggtatggacactatgaatttttagttatgtcctttggactaaccaatgctctggcagcttttatggatttaatgaatagggtattcaaggatttccacgatatatgtgttatagtatttattgacgacatccttgtgtactcttaatcagaagaggagcatgaacaacatctccagatggctctacaatgattaagagaatataaactgtatgccaagtttaaaaagtgtgagttttggctatctcaagtgtcttttctcgaacaaatttttagtaaagataggatcgaggtcaatctagggaagattgaatccgccatagattgtccgagaccaaaagacagttatagaagttagaagttttctgggtttggctggctattaccgtcaatttgttgagggatattctatgatctcaacacctttaacagaactcactaaaaagaatcaacaatttctgtggatagacaagtgtgaagcaagcttgtaggaattaaaacaaagatcgatcacaactccggtattagctctaccatctgataaagagaaattcatggtttattgcgacgcatccaggcagcgtctagggtgtgttttgatgtaggccgattgggtcatcgcttatgcctctcgtcaactaaaagaaattgaacagcaataccaaactcacgatctagaactttccctagtagtttttactttgaagatttggcgacattatctttgcagagagaagtgtgagatttatacagaccacaaaagcctcaaatatttctttacccagaaagattagaatatgaggcagagacgtttgttagagttggtgaaggattacgactgtgaaatcctttaccgtcccgaaaaagccaatgtggtggaagatgccctgagtataaagggcctcggggaggtaactagtatgactaagatttctcctcaactagcagatgatatggtcagattgggtattgagttttttgtaggaaaaattcataatttgacattacaatttgatctgttagacagaattaaagttgctcagttaactgatctagaactggtaaaaattcaagaagaaattttagctggtcaagctaaagattttacggtgtcaggtaatggaatgttgttatataaaaccagaatttgtgttccacgtagtgtggaacttagaaaggagattctcgaagaagctcacaccactccttattca

SEQ ID NO: 133225 - DNA, 602 bp, Cannabis sativa
  modified_base (570)..(577): a, c, t, g, unknown or other
ctcactctccccgctccctcactcactccctcctccaatccctcactcactctcccttgttcccttactcccctaattatcacataacaccacctgctccacacaatggagtaatcacattcactgtatatatgttacacagagtgaccaccaaaaatgatgggggaggaagttgctaccaagattaaacaacaagactcacctctcatgtacccatcacttagctatttctcctaagtgttatactcgcatcatgagcgtaaagaaagacatgtcaaaggaacgcacaacaaaagatgaaattgctaaagcacgcacacctctgaagaagtagtggttgtacgacaagtacaagtaatggagacactattcatctcattcgcagtaccaactgacacccgacaactgccgcaccactatccgtctgacgtgctgatctttatggtacaaaagtaatcttttgagaccacttgcattttggagccattagagttccctgtaaatatatcttattagaatatttttatttatggaaattattttctaattaaggaaatgattttctatttnnnnnnnnaaataaataattgattttctgataa

SEQ ID NO: 133226 - DNA, 667 bp, Cannabis sativa
  modified_base (168)..(179): a, c, t, g, unknown or other
tcattcagctatggtaatttagtaatgcatctctcttatttttttttaaaaaaaaacaagtaatatttaattttttatattaagaatatcaaattttaaaataaaataaataaacacaatgcatttgagccctccacgtgtctatatttatgagttaataacgaaagnnnnnnnnnnnngtaagagaattgtaacattaagtatttttgccaccaaaaataaacattaggtatttaagtgtataaaatcaaaaatattaagtatttataccgcaatttaccctatatatatttagatattaggcccttttctctttttctttgaaaaaatcaatatgtatatctaatattaaacaattatagtatcaaaatgtgttaatgcaatatgtaacataaatataatagtaaggtatttttttttaaaaaaaatatatcgtagacctaatcaagacaatgaaattggtttaattcgactaaaatagccttaaatgattgaattagtataaaacctttctttctggttgaaaaagtgtaaaaacgaagtgtaaaagtagaaattgggtcgggatgaggtttctgtagccaattacaaacaagcaaagaagaacttggccgaatgttatgtgcaacgagaagttttttggcgtcaaagatcgaagcaattgtgg

SEQ ID NO: 133227 - DNA, 818 bp, Cannabis sativa
tctctctcaatttctcactctaacttctctctctattgtgttgtatatctcttattattcctcttcctcttttttctatggactttttataattcatattgaaatgagatgagtagtcttttttatataggccaaaggacgcaacctgtcctttttgacagtttaattaattaaagactaactaactaaacaaatgttgattaggagttttaggaataataccacaataagtaattatcatctctttgatttagttttatctataaatgattattgttttgttttttgacttatgtcatacattggggttgtttggctttataacttaaaaattgttttcagtttttaaaaacagaaaacagtttttaaaaactaatagaggttgtttggtaaaattttataaaaatagtttttaaaaaactgagttttaaaaaactaaaaacagaaaacatcaaaatgttgctttcaatttttaaaaactatttttttgtctgacatattatattttatatttttgctcacatactcggagtctagacccgaacccgaatgggttcatattatggtatggtgttgaaatattaatttttttagtaagaaaaaaaattgaaaatagttttaaaaaacttgtgccaaacaccattaaatttttaaaatgacaaaaaactgttttctattatcgcttttaaaaacacaattttaaaaactaaaaactgaaaacacaacaaaacaaactcttatagcatgtttggtattgttttctgtttttcgttttcaaaaaattgtttttagaaatgagaacaaaaaatactttttga

SEQ ID NO: 133228 - DNA, 974 bp, Cannabis sativa
  modified_base (691)..(697): a, c, t, g, unknown or other
tttttttttttttttttgttctccattctataattatttttttattaatttttttctctctcagtatagttttatgatatattttgttatatgcaatgtcattattttacctctaagtattgtatatattagtatatatgcccataatattagggtctggatttttaattttttcaaaacaaactattattacgacttttaaaaatttaaaatcaaattagaccatttgaatgatcaaaccaaaccaaatcacacaatcctcttaaggaaaaaaataactgtaaattatctatttttttttctctcttttcaattttcatccgtatttgtttttaatttttaaatatattttctataactagatttcaaagtaataattttttttaatagaatgtaaacaatttatatgttaatagttctgttttctactatgattttaaattattagttatggtttttaatttatagttatcataacaactgtagttagttagtccaaaactttttttttcatatcgtcccctgttgtgctatatatattcactttctttttccttcaatatatatgtatatgtattgtatttataagtacgtatatgtatatgtattatatttattaagtatgtatatgtattatattcactttaattcacattatagtatatatatttgttaacgcagattttcgttnnnnnnntttgagcctcacaatgataattcatcacacaaaaaataaaatctatagaaaaatagaatatgaacaccagattttttacgtggttttgcacttaaaattctgcatagtccacgagtcaatcttattcagatttgtgagcactttttttagggcctccttcataagaaatttttttcatcccctttttgagattgtttgccactatttataattgcatagtggtagttaattacaaagctaaccagaatatgattacagtcattatccctaaaatcgt

SEQ ID NO: 133229 - DNA, 586 bp, Cannabis sativa
atatgtgctgacacatttttgtaatttttttttaatttttattttttatgaaaattcttaatagtttataacaaactagaatttagttaagtgagcatttactcaaaatgtaattgataggtttaaggcttcttcaatttcagatagagatggcaattttatacgaaaactcatttatctgtgggaactctactcaaatggataggatataacctgttgaatgacgatttagggtagggtaaggacagggtcggccctaggcataggtaggctaggcccatgcctagggcccacacttttcggggacccaaaataaaaaataaaaagttttcattaagcttttatttaagtaaaattaaatgtattataaacaataaatattcatagcttagttgcttggggtgtatgatatattacataatgtcatgggttggaatcctctgacactcattttcaatatatatttttgagagtgagggcccaaaaatctaatttgccttaggctcatatattctcagagtcagccctaggtaagggtatgaaaacatgtacctgatgcggatattgttggttttatgccctaaat

SEQ ID NO: 133230 - DNA, 965 bp, Cannabis sativa
tacttaattaaatacactagttttcatcgtccgccttaataataagggaacttagaaacccataagaaaattaactaagaaaactataaactaacactgagcgctctgagcgttttctctaaatttttctgtctgaaactgaaactgtaactgaattctaaaaacataagcttctatttatagaagggtaaaaggactaatgtgcaattaaacttattacaaattgcgtatttttacaattaaaataacttaatttgaagctgccacatgtcaatgttggattgatttcatgtggacacgtggcaagtagagaatggtgggttggctgaattttttgtgtcattggacacatgtctcgctggtattgggtgaaagtggagcaagttcgacaaaaggacacttggcgcatgcagaggagagaacacaaaatgcatatttgactttttgaccatccttgatccctacgtgaaagacaagcccacttgtgttggtagtgtgtgataaacacacttggacaagctgtagaagtgttttacacatgcgcgtagggaagtgaaagggggacaagggctgatggaagctgatgaaggggctgattggcgaatggataggcgccacgtatatgggctgtcttttggaggagtaaaaagggccggctgggcttggtctttgggcctttatcttgctcttcaaaaataccagctttcaagtacttgagcctcgtttttatcattcttttttattttttttctttctttttataaatgctattttctcaattaaacacaaataaaatacagtactctcaacacaaaatatatgacatgaaaatatttattttaaaatctaattaatttataattgtttgaataaaaataatacattttttttatctttttatttccttttctcaattatgccatacatactaatttttatttataaacaaagataaaattaatctt

SEQ ID NO: 133231 - DNA, 1219 bp, Cannabis sativa
catacttctagagtgaatttgcttctaatttcaatgacatattacatttctatattgtgattgaggtgaggttggcactggtattgcaaataactcgattagagtaatattgtcactacaataatctgagaaagagggcgatagtctttggtagtgaaaaattattgtaagatgtttcgaaataccttagtaaaaatttctcggttgtaagggttagtcaagcccgttaacttggctcgatagtggaactcaaagctaggtttataactttgaagaccaatgacataggtagcttagttctactgaatcttgtaaaaattgagagtttataatttcttacccttaaactctttactttacaagtttgattatttgatatacattattgcttgtcatgttacatgcatttatttatttaagagattaattgcatagttttgtgttaaaaattttaatttactgaaattagtttaaatatccaattctcccccccttggaaacatatcttgggttaacacaattttcaattttttcaacttttaaaaattatttttcaatgaaataaaattcaaattttggtagattttatttaaaatcttatttttcaaataaaaaatctaattatcaaatttaaattaatttttattaatttattattaatttaaattaattttagatattagtatgatttaatttaaaattttgatttttctaaaaatttgctattttggatattttaaaatttgattatttttatttatttattaattttaattataaaatcagatatttacttgttttaattatttaattaataaaacaaatgaaataatttcatttatttaattcataaaataaatgaaataatcttattttgacattaaaatagtaataaaatttaaagataatctagataattttaaattgctaaccataaatatcaatttaaaaaaattattatttttaaatatattttattaatttagattataagattagataaatgctatttatttaggattttatgttattagatatttattttattaatttatatttttatttaaaataacatgaaattttcaatagtaagttgatatttttttaatagactagattgatgttattgtgatagtcagtagtcccgtgatccgtaaggggaaacaccgggtaagctatgcaatcccacactgcttggggaaggtcaagtggaatgatt

SEQ ID NO: 133232 - DNA, 510 bp, Cannabis sativa
aaaataatttccaacaaaaacctctcgcactagacaaaagaaagaaaacactataacccaagagaaagacagagcacgaaaagtgaaagagaaaataaagagaaaaagaagaaggcaaggaaggaaaagaaaaagaaacaaacaagagtcacgaagggatgcagacggggaaatggacagcacaacaaacacaaacacagaacaatgagaataaacacacacacacgaacaaacaaacagtgaaggaggacaatcaagacaaaccggagttacaagagagagaagtatagtaaaagaccatacttcttgaccaaccggagttattggatttgataatatatttaaatgaattaaaataataaaagatgcagaaaaattattaaaataaggggtaatttgaaaatattaaaaatttaatcatatttaaatttggggacttctatttgcaccccataaaattataaatacacaccattgttaaaaaaattataaacttaaataatttttaaa

SEQ ID NO: 133233 - DNA, 606 bp, Cannabis sativa
atgaaataaatcatgtaaaccatgaaacataaaagcgatttctgatcttttattaattagtaaatctgattatattaaggttttatttagggcacaaaacccaacagtgttcacaatcctttaggagccttctaataataccaatcttatcacccaatgcccttccaaagacctcatgcaacatttccaaatttcacccattaccattgagtgataaatcaaccactaatttaaggtgagggaaccgcaaccttacccttttcataagatcacgaaactccaaaaaattcagccaggatgcaagtttgtttccaaatattaatcttatctccattcttgggtatagttacacttccagatcttagaatccatctagtggataagatccctttccataaggtagagtcgctcccttgagtatcaatgtcccaaaaggacttcttgcaacaatacttagcagtcaagcatttcactcataatttttcactatcactagccatatgccacactagctttaacagaagagccttgttaggtggtgtttggttggaggtaataaaattgaatggaatggaaagaaaataatttttattccattcctttgtt

SEQ ID NO: 133234 - DNA, 618 bp, Cannabis sativa
ggatgctaggattgatttgggctaaacaggggctcaccctctctggtcttgaatcaggtcgcgaccaccataaattggtcgtgactactcgatttaaaaacccaaaaaatcatatttttaccaaaactaacttaccaaattcaaaaccaaaacctaccacatcttagagatttacttccaagccaaattaaagtatttttaaagtatctcatacaacaaataacatgcttaaacactcattccaacatacaaaatcaaatcaccccaaacaccaaatctccgaacaaacacatgctcttaaaaactcaaagtagccacaatatactttcaagctcaaatctctcaattcagaactatataaacaaaagttaaactcttcatctaactgcaaaacaaaaactaataacagcataaaattataacttcaagccttaaaaaaataactaaaaacctaatttttaaagctatggttctcatcatcaatctaccaaaataaaacatgcaattcaactttctgaaattaaaattgcaagaaaattaaaggaacactactacaaggaaaggccttttatcccggtttttaaggctttttatcccggttttcgctaatatgaaaac

SEQ ID NO: 133235 - DNA, 849 bp, Cannabis sativa
cgagtcgggtttcttctttcttctccagaagactaagcagtagagtaaagcacctaaaactaagacaaaacaaccacctccaagagcaccaaaaagggcataaatccatttttcatttgagctcgaattagagaaagaattggtggcggtagtggatgttcgaggagggggtaatggcggcggtggaggccttattatggttgaagaattggttggtggggtttgaagaggaaccaaaagagtggtatctggataaatagtattgtcattttcagtaagttgattagctttaagaagcaaaccattatctacatcaaaatcttcactaatggttgaatcattatcatcataatcaactaagtaactcattagataattcacaccatcatcaacttggctctttgtgggacaagcacatctaagaggaacagtaattttctcatcagtttcaagctcaaattgattaggattacctttttgattctcaagagcttgacaagttgtgatgccttggaaggtgttgttggcaatgactagatatgtatcatctggtttgatgacataagaggtgtttgattggtagtagccgccataacaggaacaggttactggaattatgaccaatttgtttgtatcaaaggttgtcttattggagtttattacagaaatctgagaagggtctgcagccaaaaggtttgagattgctgccaaggttgtgtaaggaggcacagctctgaaagtaatgaaagcttgacatattctgtttagaccattacagaagtagccaagagaagaggttgaattatcctttttgtcacattcagttgtgtcttctctcacatatggctg

SEQ ID NO: 133236 - DNA, 987 bp, Cannabis sativa
ctgatatcctccgtggctttacctttctcagctgctaacctctcgaaatggctagccatctttggtactctgactttctctacgcggataactgtctcgtctttggtgttgtctttccgactaagttgatcagaagccatatttcgattattaatcttctctttttgaaactaattgttgaacgtgtagtatggtattgttttgctgtaaaactagtgaggtgtgatagttttgggtgtggtgtttttaaaaagcagagtagtgaaatgaatgaatgaatgagaagggagtaatggatatgtacttagttgtatgcatgggccatgggggtgacatgtggagctgtaaatggtggggtgtctgaaacgtagaggctgagtcagtacactcgcttgccatgagtggcacacgtgtgtaacttggttttcgaattttgatcaacatgggaaaagagacgatcacttctgttatcaagacacgtaccaaatagtttgatctgccacctgtgatacatccccagcatgacacttgggcatatatatactcgaagtgtcatataatgtgcttttttagtgaaaagaaaacgttaatcattaagagagaaaaattgttacatgcatgtttcattctcatacatgtttaccaaatccttttaagcatacccactataccacataatatatttagtttctggaatgtgcggtgcaaattatgcaatattatgttatttaaatgtagtaattttattatctttttaatagttgtcagtaaacaacatattttattaacatgcagttttgatgcacttaaaataatattgatcaaattgagtttcaaatagtgttttgatatgtagaagtgttaattactttttattagttaattttgatgtttcaaattacatgttaagaatatttttccttaaaagaaatatgggaatattacaattagtgtatagaatcaaatcaactaacaattaatatttac

SEQ ID NO: 133237 - DNA, 513 bp, Cannabis sativa
acacctcacaagagtgctaggcactataagtaacctttatcttattagcaattttttttttttttaaaaaaaagaagcataaacatacagttcctttctagtaaagggtttcgttcccagaggggaaagccccccgcaccaatatcgagaacaaaagtagagccagactaacacgatttccagagaattttgatttcggtgattggaaatttgtggtcagggcgtgttgagagggtatatgacatagttggggagttattatttttttatggaacgatcgggagagattctggtgagggccatttgaaaataatagtttgaaatatagaaaaggatgacgtcaaacgtaagctcccgtctactttcaaccaaaaaaaatgaaaacattaaaaaaatttgttaaactaaattttgttacatagtcacactttatatagaatagatagatttgtatgttatttttctattatttttatatagtgttgtttgtaaaaaaatatttaaacttaaaaa

SEQ ID NO: 133238 - DNA, 623 bp, Cannabis sativa
attttgtgaaattcacccgctgactagaagcttgctcaaacatatgaagtagcaggagtacattatcatcgtcttcctcagtagcacaacaatacacataactgtcgttagcaaaaaagcatgtgagaaatagtagggactcattggaaactttacatcacgttagctcaccattcctttcaaactacttaattaaagatgagaatccctcagcacaaaggagggaaaggtagagagataaaggatctctttgttgtatgcctctaccaagaataataggacccaagctcctacctccatgcacaaccttatacttaaacggtagtcaacgtaagatctacccaacgagaatgaaatcccatactgagcatcatagccttgagacaccccattttatacgatcataggctttacttaaatcaagctttaaggccataaaacctatcttaccctttcgctcacgtttaagataatgcatgacctcaaacactaccataatattatataaaattaaacgtccagggataaaattagattgattctcagaaataacactaggtaaaactaacgtcaagcaattagcaagcacttttgaaatcactttatacagcacattgcacaac

SEQ ID NO: 133239 - DNA, 682 bp, Cannabis sativa
  modified_base (644)..(652): a, c, t, g, unknown or other
tctctctctctctcatttcataataatgaccatatttttcctcatgcctaaatggaaaatacatcatttttttcatagtactccatagtaataatatcatacaagtgtttagataatataattaaggattttatgaaagtatagtagaaagattggtagtacttgaaaagaaaaagatgaaaagtgaaaacaaagagtatggtactcttatatgtatgattaatataaagttctaaaagaaatattcaaattattattagagttatgtattgcatgaattaaaacaaaatgactggtttgatgatgctatttccgaggctataaaacatattataacatgtttcaaagttcaaacgatttgatctcattcagaagccccacctagaacataatttactaaaacgatatctattattagtacacattttggatccaaatttgtccagctaagcaaaaaatttgtactttcattctcccttttaaaattaacaaatataactcagactaatttttttagtgataatattaatgtatgtataatttgccatatgtgcttaatatatatacaaagaccatttcatttgtgtctattccggtttcggttgtacttaacaatattttgtggggtaaataccattttagannnnnnnnnttgcaaaagttacagattggaccctgtgtt

SEQ ID NO: 133240 - DNA, 544 bp, Cannabis sativa
tacttctgagaaagtgggaagttgtaaacgagtttcacacacatcaaaatctaaactaggactttcatttctgtagtagattgtttggaattaggattattctttttatccaacaaaaactagacaataaaattttgaaaggaaagtaccaatgacttggtcccacattcatggatgagcagtgctctaaaccggtacgagcctgagaggaacaagcacgatctaacacgaaaaaatataaacttaaacacgacacgaaaaaatatatacttagatacgaccaaaaaatataaacttaaacacgacacgaaaaaatatatacttagatacgacctaacacggaaaaatatgaactaagacatgagacgacatatcaagtctaaaagtacgacacgtaaacacgaatagtttaactcaaaaacatagcacattaaaatgtttaataatttaataataataatgataaatatttatttatcaattaaaatgatagtaatattcaaattataacaattacaattattttttatataattgtgtgtaa

SEQ ID NO: 133241 - DNA, 2437 bp, Cannabis sativa
  modified_base (1072)..(1072): a, c, t, g, unknown or other
  modified_base (1862)..(1865): a, c, t, g, unknown or other
ctatcgtgtccacccggatgaagtctttgggtaagcttatcctcctctggaaaggaatttcggatggccagttgttccctcctagatagtcgactccagttgttgtctttcctatccagaaagtcccttcaacgtacgctttggtctatcttccaggaagcatatgtctcatccagaagcactttatttatgctgacatggagatattgttacaaagaattggttaagtttgtttagtctaactaacttaacaacttatctttggtagccattgattttaggatctatttcctagatctataaataccaccaacacttatctgtttgtgtgagagaataagttcagacgagttacgaaagatgttcatgagaaagaaagactgaaaggtagagagagaggtacaaagaaaagagagagaggttgtgtttgtgttttgtataaagaatcttttatagatgaagaagattcttggggtaagagtgagagataaacactttgagagaatccaacagagaatcaatcttgaatgtagtgtaccctgttcttgttcaattaataaaaagatttttggtggggttccagaattagaatagagtcatagatcatatcgatctctataagaattgaatcaatatatattttggtgttgttttattgctttattatttttgttctttaatactaagttcatcaagaaaattacattgtatatctattttactttatttataatttttacctttatttttatattttttaagatatacttacttttataaatgatgttcttattatacctcttttttttgaaacaaagattgcaactttattaatgcaaatcagctattaaaatagcttccaaactagtagggacaaaccccctacgggaaagacggtcaggacatgaaccagaagaacgagctaaccaattagccgcttagctcccagaccgtttaacaaactgaactgaaatatgaaaaaacgaaagagatcgtataagactaatacaatctgaaacaattaaaccaagaggagaatgaatttgtctattattattaatagcattcaccnacactagacaatcagtctccaaacgcacctcagtaggagcccagccttcaaccgaaccaccatcaccccaagcttgtttaagccaacttaaagcttccttcattgacattgcttcagccaccacatggtcgacatcaccatttctcctcacggcagcagcagtaagaagatcactaatagagtcacgagcaatccaccccaggccatgactcttttctcttgaaaaaatagctgcgtcacaattaacctttaactctcccgaagacggtttactccaaagctctgaaccagccgaagcttggctaatagatgccgaggcatctccatttttcaactgagcaactttccaaagttcaaggtacgtaattgcagcagctacaactctttcaacagaaacaatctttttattccaaagcaagtcatttctagctccccaaacaccccataaaatcatagccaacttatcaatgccatctcctgggtgagtatggcaaaagctctcaaaccatgaaccaaattcagtatctccaatcgtgaaaataaaacctagccccctctccaaacaagccatagtaaaagggcaagaaaccataatatgaaagatggtctcagcatctccacaacaaagagggcaagtatttgtcacattaactcgcttagtttgaagtgaaacaagagtgggaaggcaattagagagagccctccaaagaaaattcttaacttttggggggagttttaaataccaaaacttcttccgaaaaccagaattgtcttgtgaattccatctccnnnnaagcacttgcaacgcacgataggcacttttaacagaatagcttccatagtcttcaaacgcccaataccaagagtccatattcagagttaaaggcaaaggtattttgcgaatgagatcaacatctctcggctcaaacaaatcctccaagacctcttcatcccaactcatattaccaacttgtaacagattaaacacagtacaatgatgaagagcctcatgagaagaagacacatatgggttgtcctttgatggaagccacgactgattaagaactggaatggagatgcccgatcctatcctccatctagcgcccatcttaacaacttcctgagcttcaaaaagacttcgccaagcatagctcagattggaacccaactcagcatcaaaaaacgaccctcgaggataatatcttgcttgaaaaacacgagcaacaagtgacgttagatttactagacttaagtagagagtgagtgtatattaagcaacccacacacaaaagtgtgtatattttaacgaaataatatatatgagtgtgtttttgattaatggatgtaaaaaaaaaaaaaaaaaaa

SEQ ID NO: 133242 - DNA, 1552 bp, Cannabis sativa
gcttaggaggtggccagccagggcattgactaggtggtcggccaacccatggaggctatggccggtccacactctaaagatccagatcttgcaacttcctaattcgctccacattcccctagaaaaacgtagatgcaatttattagttttcagcattatcgttgaatgatataaacagtattttcatgttttgtatggcctgtggccttttactttttgaaaattatttattttcagccctagggccttcatgtttgtacttttggcctataggctccctagttttgatcactactattgtttggccctgttgctttttatcagggaatgcgtgaccgaccagacagtctttaatactggctatcttcttatggccttgacatgtaagtatatggatttacttttctttatgtcaagctgaagtatgcatgcacctaacttggaggtaggtttagtagcttattctaagcattaaaatttctctacataagttttctatgctagttcgatgcattgtacgatatgggtgcccccaagtgaacacacagacttacggtctcttggtcacctgcaattcaccaagtttcatataccttgcctgagacttttctccaggggtgttacctattgtacgcatgtggaactgagaaaagaataactttgagaagttaatcttattagcaaggcgcttttgcttcctcaaggagcttctttcggatgtccttaagggtttttttgatagcttctacctgcccatttgctttagaatgggccacagcaaagaagcctttgatgatgccatttctgcagcaaaaatcagtgaacatgtcactatcaaactgctttccattgtctgacataattttttgcgagagtccaaatcgacatatgatgttcttgacaacaaagtcaaggacttttttggaggtgattattgcgaggggttcagcttcaacccacttggtgaagtagtctactgtgatacaacaaactatacctctccttttccctttgggagttaaccaattaggtctatccccctcactacgaagggccaatgagactgcatcattgtgagcccattgggtggagctcttggaatttttgagaatctctggcacttgtcacatcttttgacatagtccaatgagtcatcgatcattgttgcccaaaagtacccctatcggagtatctttttagataggctttgcccctggcatggttgctgcagaagccttcatgcacaacaatcattagccgctcaacttaagctccatctgtacattactccgtctaggatcagatacctagtagcttttctccttatcttctttgcttcattcttgccttccagcaaggctccagttttaaggtaagctgctagattgtgtagcccttgagctgaattaataagtctttgattttgctcaagtaagccaccatttttttcacctcaattcgtgtattcctctaggacttgatgttggaatttattttaccaggatcttagatctattgacaagtatgttgttcaacaccctaaatatgaact

SEQ ID NO: 133243 - DNA, 2375 bp, Cannabis sativa
aatcttattactaaattaaagtaaataaatataagagaatgactatcttaaccttcattctaaatatgtgtaattaaaaaaacttaatatcaaagcgtaattaaaaccattaatgtagcatttatataaaaaaaaaaagttaaaacttaatttgtagaactcaaagaatagttagagactcggagtataggtattgccaaattaacagtactaacataataattaaagacatgcataattattaaaattaggcacattgaagtcctttttgtattaggtagtaaatgcaaatctgaaagaaatttattaatactacaaaatatatctagatatttatattttttttttgacatagtgattagaatcactcatgaatatatgatgcagatatccacatatcgcgcaggaatctcctcaaactaagatagttcatcgtctaaccgaagggcatgcttgtcaaatcatgaactgctaaagtaagcgagcaacatgagacaaactacctccaagaatttagacaataaaactaacgtcctcaaacaacccaccaaaatagctagagcttcaacttataacattgaaaactacacgccaactcatttacatatcaaatggtctacaaaatgtctacaaaataaaaaagataaagaaaagtggattaacccctaacgatgatattaaaaactaaaaaacaaaatctcagtagtaaaaagataacgactctcaaataaattatatttaaaaacttataagaaaagtctctgtaatagtaggccctccacaaaagccataaatggcatctaaactatcaaaaaattggtgcaaaaataaagctaataaagtactaataaaagtataaaaacaaaataaatatttgaagtaattattaataatctcaaaaattttaattgtataaacaatattaataatctccaaatataactatatcatttaaaagtaaaaaattagaaaaggaggatattacacaaactaacttaaacattttgacgtttatcacataaaaacctaaaataaatacataataatattaaaaatcttgcaattaaaaacgcacaacaacctgtatataaggtataaataagaaaaatattcaatattaaacatgttataattacaattaaatattaatatatactaaaccatatatatgcatgtattaataaaattataaattggaaatagattataaaagccatagagtatgaatggtaaatataaattaatataaatttaatgaattaatataattaaaatacatcccaattatattactaattaacaaaaaaaaatattttaaaagctaatataaaagtaaataacaaaatattaaatgctaataaagtgtatgtaaaatatcaaaaggctaattaaaaacctaagagagttaaatacaattaattggcctaactttaaaaatacaaatcctaacttaaaaacctaaattttagaaaaatacaaataattatgacaatataataccaataaaaataaaaacagctatatatataatttgttatataattaaatcaaaagttttacttcatattagtaaaataaaataaactagtttattttttgtaagaataagatataggtattaaaattatcataataagattatatatggtaataaaaataaataattaaatacaaagagtaaataacatatttataaattaattatgtcatacaaacctcacgaaacaaaactccgtcaattcggtccgaaaatgcgccactaattgaaacgaacaaaattaacactccaccaccgacctctcctctctttgccatcattgtcgatccataatgtgtcatcatcatcgatccttctactattgacgatgcagaaatagtggaattgacaccctcttctcactacaaaaaatcttacatttagtcacaacaaaatttgttactaaaagtaaaaaagttgtgactaattataaattatcattcttcaattgtgactaaaatgtctgtggctaaaagtattagtcacaaaaattacaattcattgtgactaaatatatttttaatcacaatacttgttgtgactaatattaaattagtgacaacttgtatctaaatattaagtaactttttgttgtaactaaaagtcacatttagtcacaaaaaattaatatcgtgactaaaaaattgtcactaaatgtaactattttttctagtgtctccatctcactctcaaatccacgcacgtgatgggagactaccgtgaactaattcttataatataatggctttgaaaagaaaggaaagagaaaaaggtcaaaagaagggaaatttcattaattgaccctaataaaataccccattttaaaatttataccctc

SEQ ID NO: 133244 - DNA, 673 bp, Cannabis sativa
aagcaaaatgttgatcattatggctcgaaaacagctaacatgatcagattgatgacagaggaaaagttctgaaaaactaaggcatgattggcatgatttttttcatccttaggtcatttttccaattttcatttctttgtcatcttaagtacgttttttttttaagtagtttcaacttgctgtgagtttttcctctgtacaaaacaggtcatagtacaacacttgaggctagctcaaatggccataggagggtgcgtgtgttggaggtcctgagtttgagtcccaaattatgcattgtaatatataaacacttaattcaaataaataaataaaaaaaagaacagcacatagtacaaaaccatattactagatatataataatgtataatttttttgttggattgagcaaatttggtgaaaaaatctaagcactaggccaatgtaatttttaatatattgtatcatatttatatatagttatcaaacaatgtatatatagttgtagtaaatctcaattaatatacttatttcttagaattaatttattgtcactataaaaattagtgacaatattttagttataacataatatctttataattaaatgtgatttttagttgcaataaaaagtaatttgtaactaaaacatagtatttaaatataaattgtcact

SEQ ID NO: 133245 - DNA, 2034 bp, Cannabis sativa
cacagaattgaagatcttttaaagtgcctgaatggtgtatagtttttaaaattctgctaagagtggcaagggaagggtgccccaatttttggtgccaagtattgatatcatgagtaaaattagttaaagaagcaaatggagaacatgtagaagaatacacagaaggattttctttattgatataggacacattacaagaagtcactgaatcttcagtgattttattacaacaatggtgacaagaagaaaaatcacaatctgtgttggactgagacaaggcagtgagattacattgtagagtgtgtgagttatgactagagtcaccaagaacatagaagccatctttaactggtcctttgagaagaacagctcccgtgagtttgtccttgacaaaacaacaatttttgtgaaattcaagatacacattattgtcatgagttagcttagacacactaattaaattctttttcatggcaagaacatttaagacagaatttaagtgtaaagcatgagaattggggaaggacaaagaagtagagcctatgtgagtgatgagaagactcttacgatcacctacagaaattgtctcagttccaacataaggagtaggggaatcaagggactcggaaccatttgtgacatgtacatttgcccctgtatcaacaaaccatagattgtcatctccaaaatcaggtaaaatagtagtgtgaggtacctgatgctcattttcaacttcaatctcagtgaggtaggcacgaggaggggcagatttgggtagaacatagttcttctcaaagaggtagtggcacacagcagccgtgtgtccactcttcatacataattgacaaataagtcttgtatgatagacaaaagaaccacgattagtacctcggccaacatttcttgaagagttctcacggtaatttccacgagcaggtggtgggatgtacttccctgagttaaatttgttatttccaacagtgaggttggcctgaagtttcatataaatgtctgtcatagagctgtgatgctctaactggctctcatgagacatgagtaaggcttgaacctcagcaagtgtcaaagaatcacttcttgaagtgatgccagagacaacaggatcaaattcagcacctaatccattcaagatctgaagcacaatatcttgttcacttatgttagaaccaacaattattaaagaatcaataagagactgaactttatcaacataatcagatatggacagatttcctttgtggacattggaaactgacctttcaattgaagcaatctggcacgagattgactagcaaatctatgttcaagttctctccaaactgcagaagaggtatgatgattagccatagaagcaagaacaccctcagtcatgattgaacgaatccatgacagaagaagctgatcacgtttcttccagtggtgaaaggcagggttgagagctccattgatcaagaattggggaggcgatataccactgaacaaaatatcatccaaatcgtggccgattactgtaggcacaacctgagacttccaagaaaggaagttagtacgatcgagcttgatcttgagagaggtagaaagagaacttgaaaatggattccaaacagagggggtagaatcggcgaatcgtgcagacacatctaacacaggagctgtgactgtctgaggaggatcggagggtagaatcgacgactcctttgaaggcggctgataccatgtagaagctaacaagctaaacagaaaaaggtagaaaccaagaagcaaagaaatctcagagagaaagtaaaagacaaaggaaaatttaattgaaagcttaactcttgaaatgagttaagtccctttatttataccactcaatacaagatacaagagagttagttaagaaactaactaactgaaatagaaaaacaataaactaaaacaaaacagttagttaatacccacaaaccatacattgtttatttaacacataaacttgaattaagcaaaagtaaattaaacgatattataataatt

SEQ ID NO: 133246 - DNA, 1003 bp, Cannabis sativa
aattgggggtggtgacacacccttggtgacacacccttgtgcgacacacccttgtgcgcgtggctggctgctggcagcaccctttgtcgatttttttttttttacaacctaaaagcaccataaaatgccttaattttatctatacaatattatttacaatagttggaaccaatctctatctttttgctttaatttttttggcattgcaaacattattctattttttttaatttttttttttttttgaaaaagaacatctttattaacaaagccccaaaacactacaaagaatgagagagatcagctttacgaaaatcgaccaaccactcaggaaaagaattgtaaaaggattgagttaagttattctctaagcttctcttagctaatctatgtgctatctcattattgtttctttttacaagagtgagctttgtacaaaaggggaacaactggtgtcttttgatcttgttaatgacaaggctaacatcactaagctgactgcctttctccttaaaaccgtccaccagcaccttgcaatcacacctgatctcaaaaaaccggcttccaccgatcgggcaagccttcagcgctgcaacaatggcctttgcttcagaaaggaccaccgaacaaatgtttggaagaaagatcatacctgctgagattatatttccagaccagttcctccaaataaatcccagcccaacgccctcctttcccggtttaagagcagcatcgcagtgaacacaaacgcttgggggggccaaccagcgcccatggtcagtagcaggaataggagtttgcttgctatctttcaccctacatctagtagaatttgggtagctattaaacactgaatcaatcaaccgagccccattcataacaggcatatgattccactgcctgttcctattctcccaaatggcccaaagaactttaattacctcctcaaactcctctttggaaagctgccgtctgaattccactgtaggaatttattcctaaa

SEQ ID NO: 133247 - DNA, 603 bp, Cannabis sativa
  modified_base (556)..(574): a, c, t, g, unknown or other
atgaaaatgattttcaaataagatgtgtaaaataagattattaagatattagaatccacaaaatgcaagtttaacaatatttatacgtatatatttttttgaatgaaaataccagttatttattaaactgaaaaatctaccaagagagtggcaactaacacagaagacagacaactctcctggataatacgacatagagaataacaagaagcacgtgcaataagatgagcggctttgttagtagattgcttaacaaaacataaagaaacatggtgagaagaatttaagagttttttacaaataaaaaacaatcatgccaaattgagacggcataaaaacaaaactagaaatagcctgaaaacaaactaagctatctgttttcaaaatcacatttgtccgcctatggcgatcaatccaactaagagcttctttgatgccaacaatttttcgcaatctctggttgaacccgaccaatgttgcctttgttgaaagcttctaacatatttccagagttatgtctcaccacttgaacgttgtgttgggttttatgccctannnnnnnnnnnnnnnnnnntaatcagatttgcttattaatatagatca

SEQ ID NO: 133248 - DNA, 1139 bp, Cannabis sativa
aaatgaaaatgaactttacagaacacacttttgtttttttttttaaattggaaagcaagagtggttacagaacacattttttatttttcaaaaacaaaatttttattttttaaaaaatttactttcatttagtgattaaaaaatttaaaataaaaaatattatgaaacgacaccaatatgtgtaaatataaaaaagaatattaaattagaaagagtgatatgtataattacttgatgatggatttgttgcaacataggagtacttgttctgaaacagctcccaactctccttatcatttaggaaatgaggttcatggatgaaaccaagttgatccacatgcaaagctacattatttttccgagtagtgagtaagatcttgctatgtgggtctccttgaggaaagacatgttttagaagatcccaagtttcagtagtccatatatcatcaaggaccaccaaacattttttctgtttctgacagttgtgaatctccctggctaattcttcttcacttgtctttctgatttcttttcttctttcttcggtgggagaggtgaaaccaaataaaattgtttccatgacatggcgtgtattacattgctgagatatcgaggcccaagcatgacaatcaaagtgttccctaacatcaggatgctgatagacctttcttgcaagagtggtcttccccaaaccgcccatcccacatacagaaatcaccttatgattatgagggttctctttttcagtcaaaaggccaaccaagtctttaatatctttatcaaatccaacaacaacattgtcttcaacaaaagaataagcttgcctcaactttctttgctgttggacatagctgcttgaagaagcttcatctgctttttgtattgatctgtgtactccaagtgcttctaattctgaagtccaagtatcaatgttggatgagatcctctcaatctctgatccaactttgtggacatcaattccttttctgaagatgcaaatacacctcttttgtaagccttcatttctcctcaaagtcaccttgagaacataagtttcaataacatcctccaagtcaagagatttttctctgatttggacaaccaaaaggcgaactctctcatcaccatttctaacccaa

SEQ ID NO: 133249 - DNA, 596 bp, Cannabis sativa
gggaagcatgcccgcaactggctgctccttgtgacgggggctcctcgtgcaggacgttctcattggggcagatccatatttaattttcttacacttataaagtgcattttaagatttcttacatttaatcttcagatctccaaaaattacacttggtaaattttgagagctaacaacctgtaaaaaaaatctgtaaaaatgtgaaaaaaaaaatcatttttagatgtattgtcaggaccgatcctgaaaatatatgggcctaagacgaattagatttttgggccttcactctcaaaaatatatataaaaaaaagaattattgaaaatgagtgatatgggattcaaacccatgacattgtataatatgtcatacactccaaccaactaagttatgaaaatttattgtttacaatacattgaatttttgttaaataaaatcctaattaaactttggctacttagtaatttttcccccgaactttgacatgtactaaattgtggcccttgaacttttttggctgtttaaaattccccctaaactattgagattgttagatttttttacttttgtctaatttcattcaattttactgttt

SEQ ID NO: 133250 - DNA, 720 bp, Cannabis sativa
taagagaattgtaacattgagtatttttgccaccaaaaataaacattaggtatttaagtgtatataatcggaaacattaggtatttattccgcaaattaccctaataataataataataataataaatgaactccagatattttacgtaattttgtaattaaaatctacatactccacgggtccttcttattcgggatattgatttggatacagaatacaattctcagtaaatgtaaataatagttttttcctcaattttttttgtccctttttccatggattacgcccctatttataggtgtataggatgtcgattatttttattaggatctattcatttacaaatgctcatgaaacgtagacatttcccatgtttcatttatatccacatgggataatatctaataactacccaacttctctttgtctttatcctttaaacggttatgctaactaagaaggttatttctcgctaaatgtgagttatccttcttatctatctttatagaaaaaaacactaagtatagtaataatgcttcttctcgtaatgtgcttcatatcaaaaagttatttgcgaggtggctactccgttgcgcaaagggtgagatggatgaatgtagttatcttttccatgtacaaatatgtacgtcaatgagttgcaagcttttactcccaagtatgttagtcaataagctgcaagctccttgatgtctctgttg

SEQ ID NO: 133251 - DNA, 636 bp, Cannabis sativa
ctgtcccaggccagtttcctgcattccttagtttacaagttgtgtttgcctaacatctgtattcatgcgagtagactttgaaacctcaggttgttcattaaggtgtttctagaattctaagactcgagtgaactttttgtgaatccataggaaaaacaaaaagaaaaatacataatcaattcatatgcttacaataaacaaaattaatggtataacatttttgttaagtgtattggtatatactgagacaaattgttctccatttagacatgtaaaccccacttcattaaggtggaaccctattttatggagaaaatatgtatccttaccttagtagatgctcccatttttttagttataatattgtaattttttaattttccattaaaaatttatttattggcctctctttaattttttgtagtactctgcccccttacaaatactttctatatatctctgtcccaattcattgcatgagtagtttatacatatggtgcaggagaagtttggacagtaaataaatacacaaatatgtggctttaatatttgtagtatatggagaaattggaacacatcatcacactacgtaatacaagaataaagggaattaattttaataacgtctaacttgca

SEQ ID NO: 133252 - DNA, 543 bp, Cannabis sativa
gttgaaaagttcaagcagtggcatgcaatcaattcctttcgacaatttgggcagagtggttcagtagatatgaaaaaaattgaaactgttttgccacaaacaaaagaagaattagataaatggttcagtaaagtggttcagccatgttatgcgggtattattagaaatttcaaaggctatctatcgtcaacaatttaaccgccaaattttgaaatggatagagaagcatgttttggaaccatcaaaaataagtatccttgatataattataaatgtagttgtgtcatgattaattgatgtcaatccacaaacaattgccaataattttaagcattgtaaaattaggactactgatgctaatgaattgcaagttgtgaaagaaattgaagaggaaaataaagaagtcatggcaaatttaggggaacatattcaagaacttcactatactagtgtaatggatattaatgacttccttaattatccaagtgagcaacatgtcacgtatgctttaaatgagaaagaaataactgttggaaattattt

SEQ ID NO: 133253 - DNA, 1234 bp, Cannabis sativa
  modified_base (1202)..(1209): a, c, t, g, unknown or other
agatatattaaaattgacaattttaatgctaatttaattttcagataatatgtatatattttaagtttttgtaggttaatatttcatcatgaatatataattgattgtgtagtttgaatttacttgtgttgaaaagtttggagatttttcataaaagtcgatcacgagttgattactccgtttttggtgcaattgtaattttgttcctttttttgtttgaatgctgttgttttttgttaattgttgcagattttgtttatgttttatgtatttgtaggtcaaaggaggtggagaagatgatacagtccaaggagatgctttgttttgcgaacgataaagcaccagacctaaggtatatcacttgccggttgaataatgaggaattgcagtagtaagcgatcgtcgaatgatagaacaagaattacattttattttttgagattttctgaagagtatcacagagagagttggggttttgagaaaatttaactgacttttacactaagtttggtttatatagttttttttttttttttttgaaaagttttggtttgtatagttttagttttcttgtaggtttatattttttttcttttgttgctgtttattctcgtatttattttcattatttttttattcaatataaatgtaaattttaattttattttttatatttatgaaaattccacaatagtaaatatttgtgtgatatatttcaataggaaaatgttagatgtcaccatttatttatattcttttctttaaagattattaattgttcaaatttcatgacacattcaattgtatgcactaaagaaagacatttcaaaatagatttttaaaaatatcataggatttttgcttcgacatttaccaaattatgtctctgaattttttctttcgctaaaaatttcctctgaagtattgagattattgaatttatatacatttgtccaattttattcaattttactaattttgtgattgtcaatgtactaaatcatgctccctagactttgatatttacgtttttcgaattttaacatgtaccaaatcaagccccctaaactttcaaccatgttagactttcctaactaaaattgaaaaaaaaaaaattaatccaacaatctcaataattcagaaagaatttttaatgaccttaaaagttaagagaaaatgatgggtaaataccattttggacnnnnnnnnttgcaaaagttacagattggaccct

SEQ ID NO: 133254 - DNA, 1142 bp, Cannabis sativa
ccagagtaccttgacgaaagctatagtctttcttttttctttacatttcgcatacttcctccctacttaagacactttttatttcttgcatttactctttattaggtaaggggtgactatcatggcccgtccccaggccttttgttatttacattttgaacaacttttatcgtaagtttatatctatttttcttctctctcttttttttatctggcctgttgttgcgcgtactttatgccttagtacccccataagtgacatggaaaagaatttttcgggtcacttagcttaaatatatatgggataacacgcatatttagtccgtcacgggttaacttatagaataaagaagaatgtaattactgaactcctaactattgatagtacttgcggtgatggtcagcattccaggctctaggtattgcgaatccatccatccttttgagtttataattcccagagcctatttcatcgtcaatctcgtatggggcttcctaatttggcccaagtacccgaactcttggttcttgggaggctgagaagaccctccttaggactagatcaccaatgaaaaatttcttatttttgaccttggagttaaaatattttgccaccttcttctggtatgctcctatgcgtatttgaagaatcctctcggagctcgtctactatatctagcacttcttctaaaagggcttaattttttaccggatcataggtggctcttctgtgggacgggattatagctccaaccgggaccattgcttcacatccgtacaccattgataatggggagtgtccggttgtagttcttgtagtggtccggtaggcccataacacatgtggcagttcctcatgaaaattatttttatagactaacaactttttctttagggtgacctttagtattctattaataacttctgcttgtctgttttcttgtagccttgcgactgcagagaaacttttgatgactctttgttggtcacaaaaatttgtgaattcatcacagttgaatttttttccattgtctgagactattttgtgaggcagcccgtatcgacatacaatgctttatacgacaaagtccaaggctttcttggcagttatggtcttcatgggttcgacctccgtccacttt

SEQ ID NO: 133255 - DNA, 1034 bp, Cannabis sativa
tagtcttattggcttattggtgatggtgtagtaatggcgaaatggcgaattggcgaatatatatatatatatatttatatactttccgtatatgaaaatgattcctttaaaatataaattaaagtaaatggagactcacaataaaatatgttagaaaaaaaatgagagtctcaaacagttgaaaaaaaaaataaatagaagaagattaagagagtagagactctcggtacacgcattccaaaatagtaaaaacaaatcgttatggttgatatattaaaacattaaagcgtattcatgtaattattttaagaaatacgtatctacagctaattttctctatttttttcttcttcttttttttcctattatatatacataaataaaaaatttataattgaaaatttatgaacaaatcttagaaaaaaaaaactagtaatagaattgtagttttaatgtacacaattttttttttttaaaaaaaagcccaattttaaaattttgcacaaaacccctaaaatatttgagccggccctgcactccgtcccaatccccacatatgtattttacttattctcttctttatttcttcatctctttcttctcttcttcatcttttcatctcatccaatcccaataataataaactcaaccattaatttttcttctcttcacctcactattcttttttaagatttttttcataaactcgtctccatctcttctccttaaaattgtcatttactctcttaaaatttctaaaaataaaaccctaatttgtaatcaatccaatctcaagccactaaggctagcttagtggtaagggagggatgtgaaagaaggagagattatgggtttgaacctaggatcttgaagctattaaactattaactgattgtaaaataccattacgctacactcaaaaaaaaaattaatctaatctccatagttaaaacacaagaaattcttttactatgtttggtaggaaggagagagagtaagatggatggagagtgtagaaaggatggggagtagga

SEQ ID NO: 133256 - DNA, 695 bp, Cannabis sativa
taaaatcaaaattccctttttaatttattcttttgtttggttgcatattaaaaaattagaatgttattttgatggaaagacgtttccactattttagtaaaatgactattctattttaaaatgaaaacaaatatcattccaatgcatgatgagaaaaaaaattaataattttttatatattttaaattttattctatttcattcttattcttattcttattctcattatcattcatattcttatattttcaatcctacataccaaacgccacctaaaatgagagcatttgcaccttcctaaaaaatcctatacatgaatatatatatatatatatatatttatagatttcgaagccagagtaaagtcctaaaaggtattactgttgtttagtatttttttttttgtgtgtcatactattgttattagtgtaattaagtagcggttctcatataaattaagaaaaataaattttaaaaaatatcactaactaatcataagataacacttataaaaggtgttgagtactattggtaccaaataacgatactttatatttttagtacttgactctttaataatgggtacgtatgggttcattatatgctttctaatgtggaaagaatgaaatttttataatagagtaatttacggcataaatacctaagtttaactctcagttgcaaataaatatcta

SEQ ID NO: 133257 - DNA, 566 bp, Cannabis sativa
tagattcgttgtgatcgacctctcagcaggcccttgcacatatggaaagattgaaactgaagagggtagtgtcagtcctaggacactgcctcgtttacagaatgtgatggttccactgggtttgactttgcctttgctttctgatcatgttacgcatgatatcttcattggcgagcttgcctctttgatatccaccacagtggagcatgttattgccccagatgttaggtatgacgcctattttcctccactaagtcatatttccccttaaatatttccctttgtgtaacttacagttaagactgttgtaagtcaggccaaagtttgatgtcaagcatgcctttatggaaactcatctgatagattctgaacatgcttgattttctgaaactcaggtatgaaactgttgatcttgcgacaagattacttgtaccgatcattgtcctacaaaatcataatagatacaatattatggataaaggccacaactacagtataaatatagaagagattgaggcagaggtcagttgtttttcttgacataaagctaaatttttatgctttgc

SEQ ID NO: 133258 - DNA, 572 bp, Cannabis sativa
agatcctggtaaaataatatccaatagaattttcacccacatatcaagagtattcagaaccaccattctagaattttcacctggttttaatctttggataagcatttgttttcgatcataagtccacgggctaccctcaattactctttgaatgtcgtctatctcatggtaaaactgaaaaaaaaatctgttttgatcaaggatttttattgtaattcctttgcctggcgtccagagatcagccataatattctgaaagatttggaaatctgaaactttcccagatagcaggcggccaacaagacaccacttatcatcgaaactagtttcttcctcccctacacattcatcatcaaacaatacctcgtgatcctcttcttcctccagacagatatcagcccattgcttagtaagttgttcctcattacttgaggatgccattagatcaagagaataataaacagaaagaaccaataaagagaacaaaataggaccaagattacacactctcaaacgtgagagacaaaacactctctaccaggagagactacctaaatataattaatccactt

SEQ ID NO: 133259 - DNA, 745 bp, Cannabis sativa
aaaagatattagtagtgtctagtatgatttgcagtgtcatatcactaataattgtatcgaatctcacataatttaatttaatatattaaaaatattactaattattcataagcgctaaaatatgctttataattcatatcattattcaaaaaaataaataaaagaggattggtctatcatggtggtggttgctgaaaaaagtggtccaaaagctagaccacatctcacataaactttagtgtggagtccgaaattctactagtgtgagaaatggttaagcaatgagcattgagcaaggttagaccggtcctgagttgaaatgaatcataggcaaaaaacttttttagacctttactataaagataaatgatatttttaaaaattattaaaaatatatgtatattttttaaaaaatatttttatttaggtctctaaaatgagtggaccctaagcacagacttaacctgtctatgcctagagtgggcccataacacagtacatactacataattgagggattttttcaataactatccaaaagaagaaataaaaaatattacaatttcatattacagatttaaagtttttcttatatatataaataaaaattttattttttacattatttttgcaatagtattatatatttagggatacgattttgtcccgtaatgtgctttcacggaatgtattccgtgatgtacgacaactattagatgggggcgtaatttgatctgaggactgg

SEQ ID NO: 133260 - DNA, 797 bp, Cannabis sativa
aattccgtgaaatcgtatttttataatttttttgttgtttttatatttttgtgaaataatctcattattataatgtaggaatatttgaagcgacactttttaatatttataattattatgcatatgattctagtaaaaaaaaacagcggtaaatttattttaaattttgttgtagtcataccttttttttagctattaagttttaactcgaaaatacgtggtaatatattattattagactatgtattaaattagctaaagaaatatgttaccacgtgtttttgagctgacacttaacggacttaattgacacttaacaactaaaaaagagtacaaatataacaaaatcgtaagataaaatactttaacagctacttttttaattaaggtcatatgtataataattataaatgttaaaggggttttaccacaaatatccttataatgtattagtagtgtctaatattatttatagatgatgcattacgattagttagcgatattttataaaagttattttattaaataaattatatgagatttaatacttatttataaaatagtattcaatgccattagtactttttatcactctatatatcattagacgcacatgaatttctatagaatagtggcaaaataggtttcgacacggcacacgaacacgaacacgaacacggcacggattttatgggttagggtcgagaaaattagacgcgggtcgaaaatgggtcgacacgacttgagacgaaataaaaacgggttaaacacggcacgacccgcttaacacgaatgtg

SEQ ID NO: 133261 - DNA, 583 bp, Cannabis sativa
aattgttaaaaaaaaaaaaagcaaccaaacatctaaaataaatcaaacataaactatatacaatatcctaatactctaaacatgctttatataaatccaaatacaaaataaatatactacagttatttattgggaatgatgaactaaaattgttactaaacacaataaaaaaattaaattatttttttaagaactaacatggcagtactataaacaaatagataattattgaaaaaaaatacaactaaacatctaacaaaataaaacatcaattataaaaattatcctaatactccaaatagtctttatattaaaccaacacaatacaaaaagactaaactcattcaacagttataatgaaattccatactaactcaccctaaatcctaatactcaaagcacccattagataaatcaaaacaaaataataatattctagagtaaagaaattccatactaactcaccctaaatcctcaacagaagacaaaataagaaaactaaacataaagtaaacataaacaacaaaaaagttacaaaatataaaatttaaataaacaaatgtgtaacaaataaaatccaaaa

SEQ ID NO: 133262 - DNA, 1626 bp, Cannabis sativa
aaaaaaaaaaaaaaagaagtaaatggaaaaaatatggccatatgatggaggaagacaattgaggaagatgaacgaacttaattttatttttggatcaaaaataattttgattgtgggagaagttttttaacaaaaagctacaataaaaactaaaataaaactgaaaaaataaatagtgtgtaaagttagtataatgacatcatatatgtgtaaaaagtattagtgcaaataaaacaaaatgaaaagtaaaaataaaggtgtagtcgtgtaaaagtaaaagtataggagtaatatttttagattttatatttttcatcaaaatattcttagaaagtattcttaaaataataacataaaaaggtagacttaaaagagtttcacagccacaaaaaacatgttggaaaatttacttatatttttcattttctttccacaaccactaacccaaaatcatgataaaaattagaacatataactttttaactctcacagacaacagtacatggaacatatacttttccaatttagatgacattgaatcacaccacctcactttggaatcttatgtgtagttgatgcaagcttgcaagcatatattataattaatataaccatcattgcaattactattaaataaatattttataaataactaatagtagctagtagtgttaaatgttagctttaattagtacaaaaacaatccaatcagatgtactattgttttctttattaaaatctatagaacaattctttgtccacaaaccatggtgttgcttctttgaaggctcacatatctaaccaacttagacaatagtgacaagtgacaacacacattttgttgttacatttgtagtacatccaaatttgtgacacaaacaaaatctttgattattattttttgcttcttgtttttatatgttcataaattccagctctcgtatcattattttccaaattggttagctgtgtgtattattagttttggtgatattgcagattatgtcagattgattgagcagagacattggactattaattaaatttgatttggtcattaattaagatatatgtagcatggttccgtgtagcaaaacaaaggcttttacgtacatcaaaggtaaactataagcaaatttattaaagtagtttacaagaatgaataattaatttggtaatgataactcgaaaatttacatgaataagattgatacatgtgcaatgaatctgatgttacctgtaaactcaattgtttatggttcttctaaaagccatatattatttatagttttgaattcatagtaaactctaaggtcttttccaatcaagttgagatgccaaacaaacaggggataagtaccaaaaaattatgttttgttattacacatcagcttgatcattacaactttacaatcacaaccattaatctctatataaaatctctttttttatgtacagataaataaaataaaagtgaagaagttagagaaaggtaaaatgtgtagacactgatgtaagacatgtactcagcttgactctcttttctccaaaagagaacccccaagctgttgttaatgacactaatcttgctgagctgtcaagtggttaagtctgttaatcaagatt

SEQ ID NO: 133263 - DNA, 627 bp, Cannabis sativa
  modified_base (524)..(526): a, c, t, g, unknown or other
  modified_base (572)..(596): a, c, t, g, unknown or other
tgccctttagcatttctcttaactcattccaaacagcccattaatctcctccgtcctcattcacaataacaaatatatatttgacttaccaatcattacatgacatggggtccactaaaattaaatgccccacctataggtttttttaaaaaaaatccccatagaagagtcctatatatattttattttattttgaagaaatcatgtaattttattaaaagcaattaactaaaataatagtctgcaactcaattgggacatctcctttgttgaaaatacaaccaagattagaatcaaaaaaatgagccaaccaataagtcatctgattctcaaattgtttgactaaagaaactataataaaattagatgataaagattgcagcgtcacagttaatcttaacctacattcaattttccctgccgttcaaaagacacaacattagaaactgttgcaacatgttcattcaaaccattagcttgagcactcaactatatgtaactactgttggaatatgttttaccannntctagatttactaccatgtatgttatttaacattctaaatatgaannnnnnnnnnnnnnnnnnnnnnnnnatataaagtttaggaaaccttatagtgggtg

SEQ ID NO: 133264 - DNA, 722 bp, Cannabis sativa
atattctgttaaaccaagaatgttaaaccaagaaatgcattttttatttactttgctatggcattaaattataaataatttatatatgtacatatatatattttttattattttacataataaaacaataaaattattgtctcttacatttttaataacacattaattaaattttgcataatgttttgcaattatatattaaagtataatattaaaaattgatgtaagtgcatcacaaagttatttttttgtgttaaatgtattataatttgtacattttttattggaataggtgatggtcttaattagcttattattgtctgcctaaattatgtgggtatgaaatcttttattgtgcgttgtgatttatatttttttacaaatcacatagtataatacgatgtacgattttgaatttaatattttgcagttcaaattttaagttaaatattactcacatatataatagattaattaggatttttactcccaaattttgacatgtactaaatcatgccccctgaatattttaaaaatgctccatgaactattgagattgttgaatttaaggacttttgtttaattttagtaaaaaaagtctaacatgaatgaaagatcagggacatgatttaggacatgtcaaaattcgaggggtatgatttcgaaagtatatcaaaatgtggggagcatggtttagtacataaacaatcactgaaatagta

SEQ ID NO: 133265 - DNA, 816 bp, Cannabis sativa
tgtattaattttctcaaatttgttgatggaggtgtacaattttttggttttgaaaattttaaattacaaaaataaaaatatattttgtattcttttttaaaataaaaatgtatttgtaacttttacttaaataaattaatagaaatgggtaaattttagactatgtatcttataaaaattacagattgaattttctgttttattaaatgacaaaataaaatttgtaatttctaaaatgatacaaataggacttttaatttattttttgtcaaaataaaacttaataataatccgacctagaagtgttatagcaacacttgttaaattttttgtatctattcgtgttaggaattgtttttaagttagttatattaaaaaaattatttaaaattgaattcagggttctatttgtattattttaaaaaatacaaaattcattttaccatttaataaaatagagaatctaatctataatttttacaaaatatacggtctaaaatgatattaaagaaaataaagtgaatattaataaaagaaattaagaaagtacaaaatagattatggtttttttttaaaaaaaaaaaaataaagatttatattttaaaaaataaaaaaaaaattaagaaacatattctttgaaaatattattattttcaaattacaaaaacaaaaaaaaatgtttaaaaagactacactttaaatttctacaaccaagatttccatttaaacagtttttgttacaaatcatatatgtctttttcaacactctaattttttggcttcacaatagtttgtatatatatatatatatggaag

SEQ ID NO: 133266 - DNA, 572 bp, Cannabis sativa
aaaaaaaaaaaaaaaagccatacaaaatatatattaattatatatatgccaaagtaggaaaataaacatttatatattcatatatatagcatgctaaacttttttgaacccacatatggttcaatgcaatcgatgcacgaattgcatgcacttaaaaaatgtcacttaaaaagtcataatttaggtatatatttttctttgcaaatatcacttaaaaaataaaaataacatatatatatatatatataagaaaaatataaatatattttataaatactttcactttttagagccatcaaaatatataaaatgatgtttcatggtcttcattggaccttttcaaagatttttaaaccaattaaaatggtgttttattcaaaaatgagaaatattctgtggaaaatacgaggggaaggattatcgatatgtctttgttgactttctagcattttttttggtagcattattataaaaaactagtaaacaaagccgcgcttcgcgcggttttaaagcataatttaaatatatatatttaatatcatatttatttaattaattataattttttaaaa

SEQ ID NO: 133267 - DNA, 907 bp, Cannabis sativa
  modified_base (866)..(878): a, c, t, g, unknown or other
aacttataaaaaaacatagtaaaaaagtaaaaaatattgtctggtagtatttttgtaaaaaaataacaaaagttaatataccatgtaaatttctctagacttattaaactaatatgtacgtgaaatcaaatgagataattacaaccgactctaactaatactgtaacaagattaatatggacacacaaataatacacaaatttaacctacataattatctaatgtaaaaaaaagaaaaactccaaaatataatccttattattatttatatatgtttaaatcttggggtattttattttcattatgcacagtaaaaatatactcttatatgtttgtcaatgtgtatgtattaattaatgagaatactgttttgcatgcaaatatataatatattattcctatgtgaatacaatttgtacagatgcaaggaaaataatattaatataaaatacataaaattgactgtgtaataaattattattatttttttaaaaagaaaaagtatgtctacaaatgttgactggttgatttcaaaaggaaaaaaataaaaggcaagaataaatcagtccaatttaataataataataataatacgtaggcgatgatgtggtgtaagtgtacaataataaaatttagggtaatttgtggcaaaacctcttaaagtggatatgttttgcaactaaccccctaatctataattttggtggtaaaactacctaaaccattagtgcgttagcagttagccctttccatccatatttggctgttaagtgccaggctgaaatgtccaagtgtgcacagtgtacacgtgacacaattttattagttcacgtaaataaatatataaaaaaataaaaaaattaatnnnnnnnnnnnnnaaaaataaaaaaaattatttttctttaaa

SEQ ID NO: 133268 - DNA, 648 bp, Cannabis sativa
attttttggtctcatttctaaaaataattttttgaaacaataccaaacatgctcttaggttttcttttgttcttctttacacagaaaataatcgtgtttatttaataaataatggcaaaattttaaaatatagtaattttgaaaataagttagaaattttttttatgataattacataaagcactatttttgtaaatattttatatctttacgttcaaagattttttttttaatttttacagtattttataaaaataatacaaaaataacaagaaaatttcataaaagtaacttcaaaacaacaaaacaaaataacatataaataacaaaaaatcaacaagcgtacaacatacaaatacatcaaaagaccgtattttttgtaaataaaattataaaaaattataaaaaaatttaaaatttcatacaactgtatttctgtatatttgtgaaataattccaatattttttttttctatagaaacttttcgacgagagtagagggccttggcggcaacccatgtcaccaaatccactacaagaaaagtaactttgcgcatttcacaaattgcactggcaaagaggtcaaagttttaccagcatacatttgcagtgtctaaaatctaacttttaccagcgcatttacgcact

SEQ ID NO: 133269 - DNA, 834 bp, Cannabis sativa
tttggagggttttaccactaaaatataagattggatggttatttgcaagtgaattaagagttgagggggttttgccgccaattactctttaaaacttaagatactatttgattaagtgccatgttgggtctgttgcagttgtgtatttttaactactcttttgggattttaactattttttcaaaagttttattttccctcttctttctgctttcagttgttcttcattctaaacctgtgttaatgtgttaattgttgttgttgatctgattttttctgcctgccgtgatggatcctcttctgcactccctcgattaaacattaactcttactgaagaagaaagttctgttgccatttttcctgctgaagtcacccctgcttcgactaacaccttgagccacatccttatagcacgagttctcactgagaactatgtccataaacctaccttcaatgatcaaatgtctagccattggaagggtagatttcctgttacaatatctgaatatggagatggtatgttaaaaatttctttcggttgtgtaggggataagttttgggttttgaacaaggaaccttggcattttcaaaaccattaagtagtcttttactccctagatactctgcaaaatgtcacagtgaacaacttatcaagtactcctttttgggttcaaatctaccatttgcccttccttagcaagtcaaaaatgcttgctacagccttagggaacatcattggggaatttattgatgtccatgaagactctcttgatgagggatggggacctttttgttgggttatatgccctaagtaaaactcatttcaatataat

SEQ ID NO: 133270 - DNA, 525 bp, Cannabis sativa
tttttttattttgccaaacactttttaagcaagagctttctcaaaaagcacttttaacttttctaaaagctacgccaaacggggccttagcctcttctcttcggctcctcctctcctctttttttgaatcacaaaacaatcttatctaaacaaagtctacttagccagctacccactgtgtgatgtccccacatacaaactttagtgataatagtgcacctctggctgcttctcggttattctaggtcgagaattttaatctgctggctcaagtcctccaaagattactagctacaattagttatcttgtttttttaatcgaaatctaagtttttcagtttgaaacttaaagcttttttccttattcgttatttatatgtttgttataattgaacaaaattaacatggacctttatatgtcactctacaggtggtgtgagttaaggtctaaaattgatttctcaattttatcataaataaaatttattatttattctatcaataaataataattaattaattctc

SEQ ID NO: 133271 - DNA, 668 bp, Cannabis sativa
caatggtctctaatttgcagtgtcatattttttcattttcttgaaacctcatcatcaagaaacaaaggttccagagaaagatttcattgcaagtttggaagatcatacattttacaattgatttaatggatttcagtacgtttatgctaatctttgattctattatttgattcttatgaattaattagcacaataaactttttctaacataaataaatatgaaatcaatttgtaccgtaattaataaaataaatattaccgtgttggactagcgtgaatttgatcaatttttttttttaaaaaaaaacagagcatgaaaataataaaagagtaagaaaattaaccaagttcattcatctatggtgtactcaaccaatcacagctacatattaaaattctcaccgcatataacacatcatgggctatggattggattctcaacacaacgacaatttgtatcataattattatttatctccactcataaatcaaatttattagagatgaataataatggacatcttttttttgcagtgattcatatatatatatatatatatatatatcacatggagtagattaagggagaagctataccatgtcaccataaattactcaatataaaaagtacttttaaataagcaaattaatcataaattgtggctcat

SEQ ID NO: 133272 - DNA, 1218 bp, Cannabis sativa
  modified_base (432)..(433): a, c, t, g, unknown or other
  modified_base (549)..(558): a, c, t, g, unknown or other
  modified_base (1108)..(1143): a, c, t, g, unknown or other
gtgaatctcctcttctttcttccaaggtcaggttgatttcggaaactattcccttgtgttgcccttgctgcggctatttcatgctctaatttggcatcacgcctgtttgcttcctccaatcaacgcctaagatggtgattctctaattacacgatcggtatgtaccttgttggattgtaggtgtcatcctcatcgacctggttaggaagtgactgggcattgttcacccaaggtccgtcaagcaagggaccccaataccgagttttcccaaggcgtacaatctgttcatgtgatgactcaatagatccctgagggctcaatggctcttttccaaggcgacgattggtttcctcatgaagattattttctttgacctcatccttacatttatatgaagaggctttttccgagctttttcacagaggctctcanngaaagcaccaaactgttgacgcagatttttgttaaccaaatttgagcctcacaatattgatttcacacagaaaaaataaaagcatgacacggggatttttacgtggttttgcagtnnnnnnnnnncatagtctacgaatcaatcttattcagatttatgattgtttgtcaaggcttctcctgtatgaatttttttttgacttttttgatcttctttgccactatttacaattaaatagtgggcagttaattacaaaagttgactgtgatctttacagcaattatttcatcaaatcatgggatttgattacaaatcacgctaagtaaatgtggtttttatttagaatttacacagctgtgagtatcctgcttttattggatcgagatgaacgcatattaaagatatacggtaagccttatctcatgaggatgccttgctaggaatggagccgagttaactttttgatggcgagctgatgctcgtcatataacttcccgagattgatactgctttaattttgaactatagtttctggtgtcgagatgatctttctcgtgtgcatgccatcttgcagtgagataaatgcctcgttgcctgtcatcttgacccataaaattgtttatacttagtttgtacactacatcataaacgctaagtgttgggttttgtgccctnnnnnnnnnnnnnnnnnnnnnnnnnnnnnnnnnnnnttaataaagatcagaaattattttatgttacatggttcacatgatttattttatgattatgtttaatgtataaat

SEQ ID NO: 133273 - DNA, 581 bp, Cannabis sativa
cagactcgcagattcttaatgatcatccctagactgattttcttgtatgtttccaataccaagtaaacatctcttctttcctatataacatcattttaattttattatagtctaattgttaaatatactatattataattgttaaatataatggaataatttgcctaaaaaaaggattctgaaccactaacacatttcttttaagagtacggaatcatatatttatttttaattcttcttacatgttacacaatcaagtactttaaaataacgagaatctcatttacttttgaaataattccaatatataaaaatgaaacaaaacaaaaaccactcctacaattccaataattctaatgctcttggctaattcacttaatttatttttgtattcagaatagtagatttagtgaatttgtttattcgaaaagtaaataaaagtacaactagcccaatcaaaaataaaaacttactaattccttatcaaataattttacaggcttttctaaaagtaagaaaacaaaaaacaaaaagagaaatattctatttaagtctctaattttaatgggttaattgggtcc

SEQ ID NO: 133274 - DNA, 612 bp, Cannabis sativa
accttaaaacataaaaagtttatgcaaattgggaatttggggcctactttcttctagtgcttaaaaaaacaaaaaaaaaatagagaaagtgtttcacaaatcaattgataatgagtaccctccacgtcgttctcaaaagagaaaaaataaaaacaagaaaacattttcttaccttttctttaaattctctttcactacattttttcttttttcctctcattcatatgaatataattcatagtcgtttatacagtatgtttgttctaaccaatgtcattatggttgtttgcaaacaaaatacattagtgttatccatgtttctgagaggatgacacgtgtaattctaaaactttacttcaaataatacaacctcaaatgtacgtcatatcaagataataaaacaaatccattattgaagttaagtcattctacatagcatcaaccggtatttttagaaaagtaattaatgagtctctagatgtcaagcttagttaccttttaataatatttttattttctaattttttcatcacaaaatgaaaatgcaatttttgtttataaaaattttatttttgaaaaataataaaaaaaaaaagattatttcataaatac

SEQ ID NO: 133275 - DNA, 1356 bp, Cannabis sativa
  modified_base (992)..(996): a, c, t, g, unknown or other
gttctgactaatttggggtaaatttgattattaattaattaattaattaatgttaataataatattaaaaaaaaaaaagatagattttgaagcaaatcgatgcaatgtgtgcatgtgtatgaagtgggatggtttggggatttagcgtggtcggtgataaggtttcatcaaatgaaaagggagatcgctttgaaattccaaggctacgggaactcaactcactctctttctctttcactaccacacacctcaatccccaactactctcttttaaactctcttaactacaagcctttctaataataattagaaataacaaattacttttgttttcttttttggttggcctaagaacactcgcaacaattttgttttttttttgaataaaataatcttttattaaacagataaatccactaatacaatggactgaagagcaaggggaatatcactctcagtaaaaaaacgatctgaccaataacaagcaccacgtgtcatatagtgtacggttttattagcagaccgtttaacatgaccaatagaaacattagttaaagaagataaaatagactgacaatcctgaacaaaaaaaccaaaaatagaaggcatagagaccgaactacgaatatcttgaacaattaaaatacaatccgtctcaacaatgacatttgacttgttattcctctttatccaactaagtgcctctttgacacttataatttttacaatttcgggttggaaacttacggtggaaatagttgaaaacgcctcgattatacgaccatcacaaccgcgtgctacaaaaccagtaccaatctcatttgtgtcttcaaaaactgccccatccacattaatttttaactttccagcagctggtttggaccaattatcccttgtgtcgatacggttggaggccagagaaacagagtctagctgcttagattgagcacaagtccattgtcgaagtgtggtacgagccagccaaacaacannnnnagcactataacttttaccattccatagcatatcattcgagccttccaaattgcttaaccaatcattacagtttcttcaaccaaccccatattgcctactgccaacacttccataaaccagtcgaaaaagttggttgttgtagaatggccaacccccaatgcagatctaatccaacatgaatgagcaaaggagcattgaaccaaaacatggaaaattgactcttccccatagttgcacaacacacaatgcaaatccacaagaacatgtctactatgaagttgagtacgtgtaggcaaacaacccgaaagagctttccaagaaaaatgtaaaaccttgggaggggctttaatcttccacaac

SEQ ID NO: 133276 - DNA, 939 bp, Cannabis sativa
tggcactttcaaatacaatggagtaattaatgattctatcaaacagaggcgtttttcattctccctaaaggaaagagcagaaagttggctgaattctctacaatcaaattcaattgtcacttggcaggatctaactcaaaagttcttatctaaattttttcctacttctaaagctgctaaattgaaggaagaaattaataacttttgtcagaatgatggtgaatctctatatgatgcttgtgagcagtttaaagatcttctaaggaagtgccctcaccattgtatggagcagtggatggtggttcaaaatttttatacgggcttatgtcttactactaggaccattattgatgctaaatctggaggcacattcatgagcaaaagtgcaactagagcttatgaattacttgaagacattgctataaacaactatcaatggtctgatgaaagagcaactaggaagattaagaaagttggttatcatgaattagatgctattagaacggtgttcacaatactaggaggaagataccatgtgcagagaggcgacatgtgagaccgcctcaacaaagtgtttcacgcacggtcctagacccaaggaatcacaataatgaggaggaacactgtgatccccttttggacgatcaaggtatcccccctgcgaataaaaataatgcaacaaatgcagttaaaccacctcttgaaacagtcgtgcccaatgatatggtggtacctgcaaacatagcagcagtagccgccctcccaacgggaaaccaagccgcactttccaacaatcccatactagcaggaggggttgatcgagaaaatcttctgcgagcactgaggatgatcgagcagcagagaaagcccatatacaagcttcatggaacgttgcccttaaccgaagaagtggcacacactactacaatttggcctttt

SEQ ID NO: 133277 - DNA, 816 bp, Cannabis sativa
gtttggttggttatccattggatcggatgtctcatccaacaaccgatccgactggattttcaaaatttacatctaatccgatccaattatgattaaatatgtgacttgctttccattttttatattgatatggattctctttaatgtttcattaatttctatattttatatattaaactgtgatcacttcttctctaatgtttaaattcaaaatattatgtggaattattatataaatttgatcattttcttcttctatatgcttaagtcatatgttgaagtaaattcaacttataaccagtctttttacaacaaatatccacatcagcattttacaacagaaataaacaacaaaggactcaatcctaggtggcttcgcctctaccagatcaagaaacaggagttagttacaactgttattgtaactaactcctagatctgtgatcaaccgactcactacgagtatttaaacacagaatcaaagcaaatacatatagagaatacaaatcagagaagatagagagataaagagaaggagtaaaccctagttgaaggcctctgctccaagatccagagatgagaaaccaagttctcatggtgaggacgtagaagaaggaagtacatgcacaagaaaacagaaatagagttagatcgagaacaaatcaagtgaagaacaaaaacaaaaagtgtaaaagagaaaatcgagcttacctggttgattatctgtgacaggaagctccaaaaatgttgtaactcaccattgttgatagtggatatcaagctaatatttgagacgagcttgacagagacgtagcc

SEQ ID NO: 133278 - DNA, 1069 bp, Cannabis sativa
aggcttatcgggatattacataagaatagcatagaacatgttatatatgtgattatgtgtatgtgtgatatatgcatgctatattgtgatttgtacactactaacattagtacgatagtggtactgagtgcattggtatagtgtacaatgacaatgtttaaagagtccattatcattatggtgttaccaacactagtacgaataggtacggagtgtgtgtggtacaacacttaggggtactcgaggtacgaggcaaatcctaccaatactcgtacaatagcggtacgtagtgaatatggtacaatggtcgtaccttagtaaagaacgttcttacttatctgataagccttgtggataggtgtataggcgcctagatacaagtcggtattatattgtatgttatgtgcttttttactgaatccgttgactcacagatattatttccgcgtgtaggtaaaagaaaggagaaagatgaacaagagtgagtttcgagctcgagtgatgattgtacatgtcgagacgacgcgacctggagtgttcggtcacaggacgacttgggctatattttgtagttgttgtgcgacatgtttgtaaaagtttaatcatgggattccagtttatgtaaatatatatatgttataaagtttagtagtttaaatcaaaaatttattttgggacgattttcaaggaaacccctttgattagtaaaggtgacacgttaattaaaaaatcactgtagcgcctaagtatcacggcgttacacaaggggtcatgtcctataggctcggtctggctcttgggttggttgtgttgatacaggttttgtcgagattctaggcgtgaaggatgtccttagctggatcaagatgtcaaatgtctttaatgtaattgttaaaacgaatagtctcatcactgttcaagttgttagaagctcggtgactatgatcttcccttttggcagttgtattaaagattgcaagtctcttttctatggtttagggcccatttgtttggtcttaatagaccccttgatctgattcggtcagatctggtatcattaagtggtttt

SEQ ID NO: 133279 - DNA, 560 bp, Cannabis sativa
gatactttgcttgaaggtcgtccagccctaacttctaagggaatttccattgccaaatttgttgtaaccattgctcgacatgcaactgaactaaagtcaccgaccaagcataaattgatggtgtagacaaagcaaacaatgaggaaagcgtatgagagcaacccacattttactagactatttgctgcagctagagtggaacaagcctgacatgtggtcgaggaaggaaagattattgatggcaactttgaagtccaaggagctgaggaccagggcaaggtctgtcttgttacactcctgaggctgagggagaagaggaagaggaagaagaagaggaagaggaggggatagtttgggtactgcccttcggtggctataatgaagagagagatatctctgagatcggagaagtcttggaagttggctgggattatgtagaggaggagtatatcgaggcctcttctataaacaagagggtaggggtgtttgtggtgcaattttgaccattttttcaaaccaacccacacgtgcagtttttccaatttcccaaatcgcacccg

SEQ ID NO: 133280 - DNA, 1356 bp, Cannabis sativa
actgtttaaacattattttctatattataaattattcggaatttctcaaaattttgtaggttatcttaaatagatataacttacatgaatatgaaatggatgccgaaacaggtcaagggtatatcagtacacttcttttaagggggtgcattgtagaatcatccaatagtatatatatttttattattttttccaccgaaaaaatatccttacatttcaagaaaatttctctctcactctctagcgttaaccccgacccaaaacccctagtgtcgaaacacacagatcgagaacctcgatcacaaggtctcgacgtcattttctctcatagcctctctcgttttttgtatttttttcttctagtttaccaattttttgcgatattttgtaatatttagcaatatatttataatgatagaataaatctgaggttaggaatgaagttagaggatcgatcttacttaattacatatatttatacttttcttacaaatatttgttattgtgatgggtattcaacgatggagttattaacaaatttaaatatgtgttattgccaattcattgacatacttccccacttgatcatatacaatggcgttttgtaaagaattggagttgtgatgcttaaataaataagtcctatcataatgaagtgacacaaaaacttactagttgataaatatatttatttctaaacatatactttttttcccaaccgttatttaatataatttattatttctaccattgatataatagatatagatgtgtgataaagtatgagtgaaaagggaacagctaagctaaccaatgattatgaagaattaaagtaaattgtgtggtgtgtgtggtttggccgggtgagtcaaccatgatctctagtatttaatacataaatgagacacaatttgaacgagttttttcagattacaataattgagaataatgtatacccttcaaattgaattgacactatcaacattacattatacatatagcacaaataaatatacactaatgatatatgataacatactcacatattatacatattacacagctaccagtcatgtctctcggttttttcattttaagctaatcatattcatctaaactcatacctacattttattttttgaaacataacatattatattgtttgtaggtaatatatatcttttatttaattttcttacttaattttatttataaatttacgaagtagatacctgtaagcgcatagtaaaattttttttgaattagaataattcattatctaaccgaaaaacatgtactataaatttttttacttttagtcacaataaaatttatgactaaaagtaaaaaaattgt

SEQ ID NO: 133281 - DNA, 937 bp, Cannabis sativa
acattgagaatgtaactgttgacatcgtaatagccagttgacctcagcagatgtggaaacagctgagtccaaggtagcataatggcttcaaattcttcattgctggtacacgagatatcattatcgtacacctgaatctgccaattatcaatgtctacctcaacagccacctaatgtttttgtctttcgaaatgcaggacgaagtataagtagccttgatccttccaacatggcatgtaacgactctccatacccaaatagtactggatcactgcttctggccattcaaaggtacttctttcacccttgtgacacccccaaatgccagtgaggaattgtggaagtgttgtgtccaaaatcacacctggttgagggtacaattctagaaaatgaaagcgtctcctcctcagcatgtgtgatatagcatctatgtgttgcatgaaaatcagagaaaaattaatcaaattgtcgcaaattaagtcgcataatgtcgcaaattaagtcgcatgatgttgtgaataagtcgcaaaaatatcaataaacaacacttattttgtgttagcgacaatgtcgtgacagtgtcacgacatgtcaaaaataacaacagagaacaataaaacatcaaaatagtataaaatcatacaataattaaatacttatatcatcgtccaactaatcccccattagcaacaattttgtgaagaacttcacatcagcgacgccagtgtgcacattcctaggtcaggtattgggaatgtctccaatcaaccacctcttgaacgtatgtagcaatctacggtctgctggtgttttcgaatctatgttatttggaagaagtcgcctcttcttcttttcctcggtgtagtccttcaagtacgtaggcggcttcctcttcctcacaaacggcacatcgtctgggggtccaggtagaagtagg

SEQ ID NO: 133282 - DNA, 785 bp, Cannabis sativa
atctggtgtggcgagcttgtcaagcgtgtcttccaacgatggttcagttgcgaactaaaagggtgaatgtgtcaacaatctgtccaatgtgcagtatgcaggaggagaccatttaccacgcccttgtagaatgcccagctgcacgactctgctggaatagagtcggaataggcactctgctgcaagataatgcaacatttctggactggtgtttatcagcctttttggtgcttgattcagatcaaaagaagctcttgattgctctttgttggtcactttggaatgcaaggaacgacaaggtttggaacaacaaattgtcaagtgcggaaagtatagtttattcggcaaaaacttaccttaatcaatagcttgctgctcataattgcactacaatttacccgtgtcctggcttggtgcaaggtgacggggctgagcagtggcagccaccaattgcaaatagcattaaggttaatgttgatggcgctatatttgctgacactaatcagtatgggtttggttttgtggcccgtaatgcacaaggtttgttgatcgaaggagttactaagagttaccaagggtcggtcacaccagaatttgtcgaaacattgggtgtcaaggaagctttaagttggatcaagagaaatcaatttagccaagttgtccttgaaaccgatttcttggtgctaatacaagctttgcgtagttcaattgaaatgatatccatgtttggtcaaatggttaaagattgtaaagctttattgaaagaaattcaaaatgtttctgtt

SEQ ID NO: 133283 - DNA, 1021 bp, Cannabis sativa
attttggttgatatattattagcaggccagctttgaaatttagtgggtcaattttttatttttaatttacacctagatactaaaaattccaatttgttttcttttttattgtgaagtgactggtttttactattgttctactgttattttttagttgttcctctgttgttttaattgttttgctttattgttttacggttattttataaaaagataatatttttgtaaaaattccatgtgatcaaggtaaaattgtaaatttttgtctaaaatccaatatttttgtaaaaccctccccaaaaaatatgtttaggcctttatttaattttttttagtattttttttttataatcaattaaaaaatgtgtattttaaaaagggttatttttttggggaattatcactattttttaactttttttttttaaaaaaaatttatgagatgagttgttccggtagttgttatgtgggttgctatgtatatcgattttgattgcgatttagattgctccgttagttgttataggggaaactgtgtagaattccgtaaaaatacaaaaaaaatacactattttaaagtgtaaaaataaaaaatttctaattttttaagtatatattaagtaagtcttaattaaatacaggcttaacccgtctatactcatatagtcactcctaattattagatttgattttcattaaatgagtcaatatctagagattaaattttgtatccataaaatatttggtcccatgtgattgtgattaaaaatcttatacataaaagccacaaattttttcttatacgtatacatgtcggtgtgtgaaaattattaaatataaataagttgttttttagtaatttatagtgtaaatatttaagtttaattctcggttgtagataaataaataaatataatttttaacggtaataatacttaagttatatttttgaaacttttataagtacctacttaactaataaatatcaaattattatttacgtgtcatttttttattggta

SEQ ID NO: 133284 - DNA, 1609 bp, Cannabis sativa
aaagaacacaaataacactcttgagattgagcctaaccatctcaggattgaaatcatttgatctaggatcaacttggtgatattgaattgaatagatattacggtaggattatcatacgtcccttccgatgcatactccactgtagacttagaattgcactcttaattacatagaacactatatagctccaatatagatacgttatgaatcatccattgtcacaatcaaaataatcaatgatcttctataaacagtctacattgagtagggacaaaattatcgttttattctttcaatgtattttatccttcaaacacttatcttcttgtaaatgatatttctgtaaactaacaaaattactgaaattagtactctactatttaatctcgtttagccaagctcaaaagaaactatcgtttcatttctaaataatcatagaagatataaatgtccatatctatgatgaatgctcccactcaattgaattatcaagttcccaatgaaagtatgaaataaaccgacaagtaagctggtaactaaaaccgagatgaacccgtaaggtcttatatgtaaaaaaaaatatgtgagagtgacacgtaggtctatgttatatagacattaggtgcagtgatttattatatatgagataatgagatatacagtacggtggcacaattatatttacagaggcgtaatgtatgaaatgtgattattataattgttcatactgtattattattctgtcttgttgggtcttggctcacgggttctctattgtgcaggcaagagtaaagcagtgtcgggtcagtcatgagttcgagggtttaaagatgaattgtacatgttctagccaagctagaccacgagggttgggtcaaataggaaattgtatagaaattccattttatcgcctagatcggcctgtatatgaaataacttgtaatattttaaaaataaattttacaggatctcaaatatgtaactttaaatatattagtttaaaataaagttaatattattataaattatttatttaattaagtttaataattatttcaaatcacttggttcataaacctcaattaataggattaatttattaaaacacatggctgttatagtacatttctcttgtaaaacaattctcatataaataaaattcagctcaattgttattttgggttaaactttcatagagcttagtgcatagcaatataattttctcaaatatgactattattggctttacctttctttaattttgtttacaattacgtgttcatgcgctcatctttggtttggtagttaagttaatttaaattcagtcttttgtaacattagacaagtgatttgatttgtattgaaagaaagaaaaagaaagaagaattgaaatattcttgttataatttagagaggggatctatgaacacttcttgtgttgtttgagtgttgtaatcaatcttctaccattgatggtgtgcttgaattgaacccattctacaaggagttcgagagagatttagagcttgtttggctgtgttttcagttttcagtttttaaaattgtgtttttgaaaatgagaatagaaaacagttttttgtcatttta

SEQ ID NO: 133285 - DNA, 1246 bp, Cannabis sativa
  modified_base (1189)..(1221): a, c, t, g, unknown or other
tgattggtcgtagtcaaaatcagtctacacaagcttgaatggaagaaattcatccacattttaacacacatgctaacgtgcccgcaaaatgggacatgcaccatataatacattattcacattttagagtgacaagagcattcaactatgctagccagacgttctctgattcaatttaacatagaacacaaccggacgaacaaactacttcaacaagggacctcataatttgggcttttcacaataaaaactctaaacattatttgagtttaaaatttatactctttaactcgagaaaaactcaatttaaagagtagggacaaactatacaggccaaaattgggctcaggctcaatatcatatgtgataaacccaaagaatgttcaaataagattgggttaggctatttgactaattatgatggtacggtcacaacatcaagcctaataggcccaaaacaatatagtcaagtcagacattaacattacccatgacccgtcattgagctcacaatgatccgacctgtatatgataccgagtcttatcactcatctaacaacctttgaagtggtcagtcaaactgaccctgcaaataacgatctccctgatcaagtggggaagtgcgcttctaaaagagggtgagcggtcatgagtaatgtccttccatggatgcctataagagtcactctcagttactgagagggagacatcaatttttagtcatctcaatacttcttacttatcgttcactctctcattctctctgaaactacatacttatttccacagtcaagataggtggtaagttagttcgatcatttattctcatttttttattacattgtgaacaatcttgctgacttgaccgtcggagtcccttcagtcggcaccattccggtgtcccaaggtttcccgattactctcttctttgttctacaggttatcggtgcccgcgtacgatcattttctatcgatcgtggattttaccatctataatacccatgacactttttcaaaaaatatgcttagaaattgccaaggttgacaaaatatcaacctaggcgctaggcccaacaccaagtgccaacctggccactagatgactctgttttattcatggaaacactttaaccttaatatttgacaaatgatatttaacattaacattttacccttcaatgtattttannnnnnnnnnnnnnnnnnnnnnnnnnnnnnnnnttcagtaaattaatataattactga

SEQ ID NO: 133286 - DNA, 589 bp, Cannabis sativa
agcttactagttaaggtagagctctgatgcaataacttgaatgtatttctgcaagataaaaaaaactaatgcagatgacatttatcatcattatccaaacataaaaaatatatacattaaataaataataattgtacatatataaatataaacttatataaatggttcaaacttatattttagagtatagaaggtacgaaccaacaatcagtctatgtgaattcttggaatggtcatccataactagtggctttctaatgaagaaacacagtttctctcatcttcttttttgtcttactcgtgctacatgaatggatagaagtagttttggagaagttaaaatccactaaagtagtccatataagttattttaattggaactttataaaaaataataataataatctaattagagttgtacatctagcaacatttatttaaaatgtgttacaattctttattacccataattattaacaacacttattttgaagtgttgctattgcttatttatttttattttaaaaatacaagtttaaaaatatgaaagttatttagcaacacttattttttaagtgtgtcaaattat

SEQ ID NO: 133287 - DNA, 1010 bp, Cannabis sativa
aattccagtatttttgtaaattttccaaataaaaaaatacattttaaaaaatatacataattttttaataatttttaaaggtaccatttatctttgtagtaagggtgtaatattattttttttttgcctatgatccatttcaacttagggtcggccctaacctaatgtaattatctttctgatacttcgtggaaagaggggagggctgggatcgctgttattgcgattgatttggcaacctcttcttcttggaattaccttactgaatcggtctatgcacagtcagctatggaagctgaattgattgcaattcgctttgctcttgagcgggctgttaataatgcttcgagtaacgttcatatgcttttagattgcttggaagtgattaattccttaactaagaatgtttgttccccggattggggttgcttacctatctctctcactgttttagatttagttaaatgtattttggattgtaagtttttctttattagatattgtttcaactctgttgtggatgggctggcaaatagcactagaatttctagtcttgtggcaggctgttttcaaggaaagggaaatctccctgtggttcccaactatcttttcttttgctaataaactttagttctttcaaaaaaaaaaaaaaattgcaaatcatcaaatagactagaacaatctatatatctctctctatatatatttttgaatgtcatctttttcaggtacttattttacagctgcttattttacaacaagtcacgtggcccactaagttgttatttctttacactaaaaaaaaatgaaattaaccacgtgtctcattcacttactctgatctacttattctgaagtgtcatgtactttcacaaaaaagtgtcatgatctcatttactgttttattttagctgatactaggatatatatatatactagtatattgttacgtgcgatgcacgtatgctatgttttatattaagtattatattatgagttcggaaggaaat

SEQ ID NO: 133288 - DNA, 708 bp, Cannabis sativa
gtgttacatgactttcattaagataaaacctttgttttaatttgcacaatttttacactacatactgaaatttttaatttttttacttttttattgtgaggagaaatttttattaaaattaatactgtgtactgtgttaagttttcacggttattttttagttgtttcactgttgttttaattgttctattttgttgttttacggttgttttataaaaagatagtatttctgtataaaaaaatttgtgtgacagtaaaattataaattttcactaaaaatctagtaattttgtaaaaattccttattaatcaggatgactatgttatctaatattgacctggcccttaagttaatgattattttttacttatcaatctttaatcaatttatcacacaatgtgtgactttgacatatatcataagaaaaattaagatctcatctcaattaattagtgatgtgtgaaatagtttagatttttatatatagtttaataattttacatttaatcactatgtgagattattcaataagccactcatttttattgtaacaacatataaattagggaaaaaaaaaagataaataaagggggtgcaatttaagaaaaagcaaatacaattttcataaataaataaagaataattacataaggcactatttttgtaaaatatttatatttttacgttcaaagaatatttttttatat

SEQ ID NO: 133289 - DNA, 1051 bp, Cannabis sativa
ccctgacccaaactcgggacccaacacgggaacctaaacaagaactgccaaactaggaccctcgaacaagactaggatattgaccaaggcccggactcaaacctagaactgaactcgaacctagccccagaaccaaactgagaccgaaactcaggcccagacacagttgtgtacccagaccaggatcgagacctggacccagacctagacttgggacttgatcctagacccagacttaaagctagatagggatttggatacgaacccagactcgaacccaggcccagacctagactaggatcgaaacttgggacctagatccggactgagaccttgacccagacatagacatggaccaacacccgggaccctaactcggacctcgacacgaactaagacccagactgggattcgggcctggaccgagacccggacccagactcaaaccaggactcagaccccgacccagacccagacccaaatctgaacccaaacactgaatcaaaatcgaaactgggactaggacccaaacccgaacatggacccaaactgagacctaagacccggacctggacctacgcctcggaacccagacccagatcagaactcgagactcaaacctgaacctggaccaagaatcgaacccaaatcgggacccataccgagatcggaacttgaacccaaactcggaccaggaattgaaccccgaccggctcttagactcgaaccgggacctaggagctggacccagatgagggacctagacttgggaaacgggcatcagaactgggactgagacctaagacccaatcccggacccagaccctgaccttggactcggactgggacctgggacccgaagtggaactagactaggagccggggcttggacctgactcatagttagtgtttggatctgggacccatagatggactcaaacccagatccaaactcggacctagaaccaaacccaaacccagacccgtaccccagacctaggtccaagtctgagtctaggtttgagttcgggaactagaatttgaataggac

SEQ ID NO: 133290 - DNA, 608 bp, Cannabis sativa
aatttatgatctaattacactgaagtgatccaattacaacaaaccaatcaaattcaatccaattacaaagaattaaatatctagttatagtgtgttgcacccttaaattttagaatcaaatcaataaaattctaggtactattatgtctttgagtctctctttttaagagtgttttgtctctctttttgagagtgtgagtttcttttcaatcagtttgtaaaggtgttttttgtcttgtcttgtttctgtcttactgctacgatctttctttcatctttcgtgtttttttgtcgataccctatttttactcctgttctttatggcgcctagcagccgtggcagtgaagatttatccaaagcatgggcagatatgtgtttagaagaagaagaaaatgcagaggctatattcaaggatgaagatgaagttgaagttgaacctgaatttgatggcagattatgtttagtggggaaactattgacagggaaggtgacagactactaggtactccaaaacttaatatctgatctgtggaaacatggcaaaggcatgtatgtcaaaatcctggaacaaaatcgatttctcttccaattttaccatgaaattgat

SEQ ID NO: 133291 - DNA, 1276 bp, Cannabis sativa
  modified_base (35)..(55): a, c, t, g, unknown or other
ttttgaaaagatttccgtgtgacagtagttttgtnnnnnnnnnnnnnnnnnnnnntatttttgtaagtttcccaaaaagtaaggcatatataatatatgcatatatgtcattatatggaaaaaaaaaaaaaaaaaagagtcgtgaattgaagagggtggcagttgtaagctcaaggacgcttacagagaacaaaatgaagaaaaataagaagaaaaaaaaaggaggttatttgagtgttatttaggattttagttttgtattttaattttgaattgacaaaaattaagatgaagaagaagagaattttgaagagaaacttggagtattgtgacaaactctatatgtgttttttttttctctatatcgttacttttgaactttgtaagttttgcataatttattaatgagttaatttttttttgctagagttattttgttgactaaaaattgtgatttggtattttgtagctatgtttagtgaattgattttgttcattcaagagtattttttttttgtgattgcttatttttgcttgatcgccattagtaagctagaacctaatcttgatttcagaaaaaataggattaatagaattacttgaatgatgcatgaatatcactttaaaaaaaatataattttttaatggcataggaatatgttatttactttgtatgacttgaaggaattgtgcttaaattggtattctaaaaattaattgggcatcagaatatgttaattaattagagaatcaaaccataaaatttttgaaaaaaggattatgacatgttaagttcctagttgtcattatcaatttaccctaatactcatttgcaccattatatcaattttatatttttaggccaatttaataattctagcttgtttttttctcatagtttgtgcttgttaattttttacatattctcaacactttattttatttttgttgaaaccaatttgtgagtaattagttttgtaaattaatttctaattttcaatccatgtggagatgatactcaacttatcactttattacttgttgatgattgcatgcacttgcgtatacaatttttagaataagtttttggcgccgttgccgggtgtaccgtgcgtgccaagatagcacgttataagctaggtgaggcccacaagttggccaagtggtggtcaagtggtggtgcatgctggtggcatgctgatgcttagtttggatgcagtggcattttcgtaaatatcttcaatattgtccggatcgggacggggcttggtattcc

SEQ ID NO: 133292 - DNA, 538 bp, Cannabis sativa
ggtttgggtttggtttaggataattgagttgaggcaaatcccattatgaaatgtgactcaattttattgaatacaatattaaaaggtttggccgaattcaagagaagtggattaagttgacaaaaccaaatctctcttgtttctctccctttccataagtcaaaaaacaacaaaatttctttatggtcaagagagaatggccttgtgggtcacgcccatacagaacacactttatttgcaacagatttttatttttatattatttttaaaatgctttatagattctaatttgtctatatttaaaataaaaaatacgtataacagaggtgaggaatgatctgaatcttaaatatatatctatatgttattttacggaaaaataaatgttaaaagcaaacaagagcaaaagtcaaacaaggatgtgagaaagactgttggggtcatcttcatacaataatttttgtattgttgcaaaatgtttgaaagatgagtgcatgttcagtgtatatttcaattaattattttgaaattattttct

SEQ ID NO: 133293 - DNA, 1571 bp, Cannabis sativa
atcgtatatatcatatatcatttgtatagcttataatttaattttataaaataaagataattaatcttttatttgaaattcaaataatatagctgaataactatattcagtttatctttattttatttaatcattttaatcttaaatatcttatcttatattatatttaataaaataattaaatgattaatttattttgattaatatatttaatagaataatcaaatacataattgggctcttatatgtcacctacacgtataagccatattttaaaacacaaaattattttactaattttgttctaaataagatttattatttattttataataaataataataaattaattcttattaatctcttatttaattatgagttaaataaatattatttttcattaaaatgatatatttctctctcattattattagtaataatattatatttaagtaatacatagtttttaagtgaatagaataatatagttaaattaattattcatttcccaattaaatatatatacaaaattataatttattaaaaattattattttgccatcaagaatattatttttcagtagaaattaattcttattaatctcttatttaattttggattaaataaatattattttttattaaaataatatatttctatctcattattatttagtaataatattatatttaagtaatacatagtttgtaagtgaataataaaaaagttaaattaatttaattattcagttcccaattaaatatatatacaaattatttcctcaaaaatattaattccagtaaaaattaattctatcttaataattatccctcaaattaaatcttcccatgtacgtgtgatatagagatggtttgggaatcatttactttttttttttcaaagctccaataaatactaaagtattaaactcatcaatagtataatttagtttattaattttattactactctactattaatatgaaattgtgttctttgacaatatacaattatatatttacaggattctttctagtggtccattgataaaatcaatataagtagttcatcttcaatttattagttcataattagggctagtcaaaaatacttttttatccttctaactatctattgaatttcttaagtaccattaattcaatgtgaacgtacggtgaatctataatttcaattataaatttggatccaactgtaatcactcccagaattaacaccgtaagggaacaaatattcaatcttttggaaagcttagattcctcttattgtataacatgttcccaaccattcatgttattaagctcctaaaacataagttgtaagaatcattttctctgaaaatttttatgatacggatcaactctttcttcttgtgccaaagagaattgcaattacaattgaaacgaccgaaaaggatatgtgaagtaatatatgctcaaaaattgaaaattatggccaataccgggtacgaatgaatcaaagaatataatgaacacaaacacgagttcatgaatactcaggaattagattgatttactaatgattattact

SEQ ID NO: 133294 - DNA, 1066 bp, Cannabis sativa
attttaatgtaaaaaaatagtaatttaaaaatttaatatatatatatataatacaaatatattctaaaacttaataaatcaaatttatattttattattataggtaaggagatcgttatatttaaaataaaattaaacatatatttttacatacaattttttttttcttttgaaattgttatttgttattttattttgttattagtgacataaataacaatgatttattttattttgttactagttatatgaaaaaaaatatatttataaataatttaatattaaaaagttcaatccaaaataactcatgcaatctgtcattttgtggattggattgaattggatttgagctattgtgctgattgaattggatccaaaatatgaaatccataattagtgccaatcgaatccactatgagcaaaataatgtagattgaatatgaactattgtgtggattgtatttgatctaaaatatgaaattcgaagttagtgcgaattggatccattatgagtaaaatggtgcatatcggattggatgacccctaattatggtgttgaacactgctaaacaagagtgctcaaaataactcttgacttgttgttatttgaaaacgtcaatactcactgagaccttagatctatgaagaaaattggaagaacagcaagtaccagaaatttaatgaaaaataaagaaacaaataaaaagataatagtagattttcttttttggttttttaacaaatcgttttgtttaatcaataacctatgtcctgttttgagcttcaacaattcatatcaaatcagcaaatacaacctccttttccgacaaaagaaacttatagaagttcaatcactagctgtttaagtgtccaatcttaacgttgagtcgtcttaaccaaattgagtgaagcaccatatgagtcacatcaaatggctgagctggtcgattcaacacaaaatgcctcttcacttgagaaacttgattatataatttcaagtacttctcatttggaatagcacttaagatgctcttaagttttggtatttttgagggtctgatttgta

SEQ ID NO: 133295 - DNA, 870 bp, Cannabis sativa
ggaccgattcggactgcctcgtcggctgattttacgtggagagagtggcgatcggcgtcgctgtaaacggctacagttcggatccctaggcgcttggcggtcctcatgatcctgcatgctatttctcccctgttcgcaaccagaatcttctctatgcggttcgaagcggaagcagaatccgaaaacgatcttactctgacaacatgaacgcgaaatagttttccgggaagccttcgccggagtacggcggccacgaaggccattgcttttaacggacttagctaaagtgattgggttggggttgggcctggtattacgcttctatggaaactgtaataagaagaattggtgggaaaattattaaatatacagtcccggcaaggctagttttgtaaaaatgaaaaaacaagtatatgatgtgtcgacgtttgattggtggtgttttataacagttggagcttgaagtaggcattccaaaaactaatcgtgttcccttaaaacttatccgttgacaccttggatatggatctgacgtggtactggcctggaagtcttagatgaagaagaggcggcttccttcagcataggctacattttttttttgaaataattagggtgcattttgttaattgttaacaattatgttttcagaaaatatgtttgggaaaacagtttttactttttcttaaaaagaaaataagtttttattttttaaaataataatcaaagttttaaaattttcaaaaacaaaaataagttacgcttggttggccaaccttgttggaagtaggtctatccagatccaatccaattatatatttgatgttagattttactatccaatcggatctaattaatttcagtcatcca

SEQ ID NO: 133296 - DNA, 1692 bp, Cannabis sativa
  modified_base (1648)..(1654): a, c, t, g, unknown or other
atttggtaagagtaaatacttcctcctctttattgatgatttttcaagaaaagtatgggcttatttcttgaaggagaaatcagaaatgttcaaaaacttcaagaaattcaaagctctagttgagaaagaaagtggtattccaattaaggccatgagatttgaccgaggaggaaagttcacatgaaatgagttcaacaagtactatgagaatcatggaattcgtcgtccattaatagtgccaagatccccccaacaaaatagagtggcagaaaggaagaatcgaaccacactcaacatggctcactgcatgctaaaaagcaaaagaatgtcaaaggagtttcgagctgaagcgatagcttgcgcagtctacttggtgaattgctctccaacaagaactatagatgagaagacacctcaagaagcatgcagttgaagaaaacctggaatttctcacctcagagtctttggaagtattgcttatgttcatgttctcgatctgaagagaacaaagcttgaggaaacattgagaagtgcatcttcattggttatgactcgagatccaaaggctacaagttgtacaacccaattaccggtaaaactatcatcagtcgcaatgggaagtttgatgaagaagattcttggaatcggaacacagaagaagacgagtatgattttcttccttaatttgaagaggaagatgtagtggagcaaccaaggatggaagaagagctttaagaacctactactccaccaatcttgctaactggaaatatacaagaagatttaagtgagagctcaaataaaaaataccacgctttagaagcttgcaagaactttatgaggtaactgagaatcacaatgaaatttctcttatgtgtctctttggtgattgtgaacctctaagctactaagaagcaataagaagcaaaaaatggagagatgcgatggatgaagaaatcgattcaattacaaaaacgacacatgggagccaactactcttccacaaggatacaagccaattgaagtaaaatgggtgtacaaggaaaagaagaatgctaaaggcgaggtggagagatataaagcaagattggtggcaaaaggctatagtcaaagggaaggcatcgactatgatgaggtatttgcttcagttgcttgtcttgaaaccgttaaattaataatttctttagcagcctaaaatagatggaagatccaccaaatggatgtaaagtctgcgttcttaaatgatttcctcgaggacgaagtctacatcgagcaaccattggactataaactaaaagggcatgaaggaaaagttttgaagttaaagaaggctttacatggcctaaaacaagcgccgagagcttggaacactcaaattgacaagcactttcaatacaagaatttcaccaagtgtccatatgagcatgcactctatatcaaaattaagaatgaagatattttgattgtatgcttgtatgtggatgacttgatcttccttggaagcaactcaagtatgcttgaggagttaaagaaagatatggcaaaggatttcgacgtcacaaatattgggctcatgtcttattaccttggtattcaggtaaagcaagaatacgaaggcattttcatcactcaagaaggctatgctaannnnnnncttaagaagttcaagatggatgattctaatccagttag

SEQ ID NO: 133297 - DNA, 926 bp, Cannabis sativa
  modified_base (666)..(669): a, c, t, g, unknown or other
  modified_base (889)..(890): a, c, t, g, unknown or other
tggtaaaatatttccaacactatgaactagaaagaatacttacctccaagttattcaacttcttcacctcactgctacaatcaatctctgctagaattagagtcaaaattctggttgttacttgtttcctaaggctgtcgagagaaggaagaagaagaagaggtttcttcttcttcttcttccttttttttttgatttttcctttatatcttaatgatatattcagccaccacaataatcccatcctaagtcatattcagccaaaaatatcaactcttttaaagtcaaatattcaccttagtaaaagaccatattacccttccaataaaacattccacaacataaagcttaggggtatctaggtaaattttctaactaatccactacacccacaacttaaaattccaaactagcacggtataattccaattccaaataatttatcttataccgtcgtgacacctttgagcaccccgtcaagttccagtgttgccaagccaaaaaatattttattcaaattatagaatctacgatacctacatcttccaatataatctccgtaattaataaattacgctttatttagtcttttttccctaatcaactcgtttttagtttaagtaggattataatcctactctaatgcccacataatcacatatttannnnaatatgtccaattaaaatatcaatatattctccgggatattacaatttctcttctcattttttttccttaataatcgtttctctccattaggttttcctgtcattacattcaaaaacgacatcattggattctgtatcatctaaccactaaaactacttcgtacattaaaaagctataaataatttcataattaatcaaaaacaactgctaatttccaanntaactaagcgggctttacactctctctctctctctc

SEQ ID NO: 133298 - DNA, 656 bp, Cannabis sativa
  modified_base (622)..(629): a, c, t, g, unknown or other
ttttattccatttctattcccatttccattcccatttctatattttcattcctcccaaccaaacgcctcctaaatatgtaagtttgtgcatactgctagtctagtctgacccatatttatttgtgttttttaaaaaacgggccatatcgtgtatcatgtcgtcccacaaaaaatatggaccgtgccgtgtcgtgtcgtgtcaacatttttaaagggtagaagcggcccgtaaggaggaaattacgttgtataactattttacttattttaatttttacttttatttttatattttttaagatatacccacttttattgatgatgttcctattagatcccttaaattaatgtaaattatatgttagatctaagtagaaagtgagagtatattagacaacttacttatcaaagtaggtatattttaataaaatgtaatatgaaggtatttttaattaatgatacaaaaaagaagtattcttcaacttatctcgcctgtaagctcgatatttttgtgtcgtgttcagatttgtactgtgttttgttcgtgctagcccgtaaacaggccaactcacttttcggacttaaattcgtactttactttttcaaatatatatatatatannnnnnnnagcaaaaaactacgtgcgaggcacgta

SEQ ID NO: 133299 - DNA, 686 bp, Cannabis sativa
aaaccataagcatgaaagctacatattaacttaaatcacttctaattctcttattgataacaaatcagattagattgtaataggttttatttaggacataaaatcccaacaatttgcataattttaagcattatgctcccatatataattacaaaacttaatgtaattttttttttacatgtataaccaatcacatgggcttacatttatacaagattgatgatattagtttcaataaataaatttatactacactatatttttgtttaaataatttttttaacaattgtttaaacataattgataaaaataacaaatataattacaacctattgattttgacggataagtctctatggcacgaccttggtgcctaatacatatcatctatataataagaatggaaaacgacttgtttttgtcgttttccactttttttttaatcttttatcttttattatttttttacaaattaatttttgtacttgttattgccatcttaaggtggtcaataagtggtacccaataattgggtagcaattttttttttatttgttatgaatgatctttgtactatatatttttttagagaaatgctaaaatgtaccagtggtgccaagcaccctcctacgtgtcaatatcgctattggtctaatttagtatcgggtcccatatagtttaatata

SEQ ID NO: 133300 - DNA, 644 bp, Cannabis sativa
ttaaattgctaaattgacatcatattagtattatactaaaaaaaaaaaatgtaactgaaagaggaaatttatgatggttttataatttaggaggattatttaaaatctaaaaaaaaaaaaatagggaacaatttgttgaggtatcaactcaagtcccacattagaagaatatgcaagaattgttttagatataagtgttttacttattctattagtatgaagccttttgagaaggtgcctaaaaataaaaccgtgagagcttacttaaagcgaacaatatcatactaatatgagagtcaaagtgaggtagcggcctgacaagatggaagaacgggactcaacaagtagtatcagaaccaaaggtttaggagcgttgtgatagtgagctccatttgtgatgtgtgggagaagctatcaaagtgatgaccttgcgatggaagatctatatagtgccttgtatcgaaagtttatatgataatgacgtagtcaggtggcctgtctcattaatgattacggcggtacaagatgaagattagtgttaggacctatgtcaaagtcttcttgcatgacaaaggtgattgtcaggggcgagttcccttggtgatagtggcggcataaggtagtttcgctggaggggaggccac

SEQ ID NO: 133301 - DNA, 528 bp, Cannabis sativa
aacatgcacgcattgtcagattctgcatttagagttatgccagtttacgataatgacatccaccatcaataacgtattagttgacaaccattttcatgacatagtgagatctcaagcagtgccacatgttaaaaatcaatcaagagaaagcaaggaaatactgtaaactcccagaccgtaggtcgtcccgaaagcatgggtggtaaatgttgtccagatttttgtaagtgtgacacgtgggatctaacggaagaggccaagataatatttagataattagtgccttcggcccgagctcccgtgaggggcttccgcgaaggatacatccattgcaaggtagggacacatggagcgttagtgtgcatgacatctcttattcccgagagtgaaaggaaagcacactatggaagctgaggacttcctcagataagacaatgtgagttgtggaaagacttaggatgggttttatccccatatgatgtcgctaaagatctctacccaatcatgtcagactatagaagtgacaac

SEQ ID NO: 133302 - DNA, 594 bp, Cannabis sativa
ataaaaataaaaggataaggataatctagcttttcgtatattcaaacttttggacatcaattaatgttttttgtttacaagaaagtgactgacttcattggcatgacttgttttgatgggtattcaattcattcattataaattataatttaatatctatatttaaccccaaaaaattatatttttggctggaaatctataattgtttaaaaaatgtcattctctttgttatgtttttgtcgatttggccaaaattaacatcaaactagttgtggtttaattctacatcgcatatttgtggtctaaattcatctttgaattcagcatattgtccatacttattgttgttacttttattacatcatatttaagtgactactataaatgctaaaggacccatattttaatccgctaaaatatgaatttcgatttatatagaattatgttttattttttttttcttattcacaatgttttactaatagaaacaaaaatacaatacaatactagtgaattccaattatttagcaaaatattagtcagtgcagcgtcccaatcaaacaaaacaagtatctatatatctatatatattta

SEQ ID NO: 133303 - DNA, 1642 bp, Cannabis sativa
aaaaatgaggctctttcagcctttattcagttcaaaactttggttgaaaatcagtttgagagaaagatcaaagctctcaaaactgattggggtggtgaattccaatcattttctgagtgtgtcgtgcaaagtggaatagagtttcaacactcttgtcctcatacctcggctcaaaatggtcgagctgagagaaagcatcgacatatcgttgaaatgggattgacattacttgcccaagctcatatgcccttaaagttctggtgggactcatttcaagcggctgtgtatctaatcaatagattaccaacaccggttttgaaaaatcattccccctttaaggttgttcatggtaagaaaccgtattacaagtttctcaaagtctttggagttgcttgttatccgtgtattcgaccctatcaaacacataaattccaatttcattccactaagtgtgttaacttagggtatagtgacgctcataaaggctacaaatgccttagctccacggggagaatgtacatttctagaaatgtcatatttaacgaagggattttcccttcaaatctggttttcttaataattacaaaccagaacagcctgtttgtgttagtgtgcccatttggtcgagtctatttcagtctcataaacataaacaacctgctcttagtaactctgaggtttctgtcacaccagcagcctcatcccaggtccctggagaagacataccagattctaatgaccaaaaccaggtaaatcaacttgacacatctgatgttgcatctggtttcttcgaaaatttaattactggtgtgcagaacagtcctactgcttcatcaagtgatctggacagcagtactgctactgataaaccagataattcctcacaagaaccagtgcctttagctccctcacatcgtatgattactcaagctaaagcagggatattcaagcctaaagtctatgtaggccaatctcagtggaattgtgacaatgaagagcctactagtgtcgaagaagcacttagacacaagggctggaatggggccatgtcgacagaaatgattgctctcaagagaaatggaacatggatccttgttccaaggactgaaggcatgaatattataggcaacaagtgggtttacaaagtgaaattaaatgcggatagcacttttcagagatacaaagcgaggttggtagcaaaaggcttcaatcaaagaccgggaattgactttggtgaaacgtacagccctgttgtgaaggcttcaactgttcgaattgtcttaactattgctgttgctaaatcttgggatattaggcaacttgatataaataatgcctttcttaatggagatctacaagaagatgtgtatatggagcgacctcaaggttttgtggatgtatctaaaccaaatcatgtctgtaagcttgtcaagtctctttatggattaaaacaagccccaagggcatggtatgacagactaaaggctactcttgtcacttggaaattcagaaactccaaggcagattcgtccttatttttctacaaaatcccaggtctagttatcatggttctaatctatgtggacgacataattgtgactgggaacaactctactaaactcaatcagtttattgacaaact

SEQ ID NO: 133304 - DNA, 737 bp, Cannabis sativa
  modified_base (671)..(683): a, c, t, g, unknown or other
gttgtttattgaagatcgttaagacatgtacaatcatcatcaaagataagctcgactcactgttcagtaagtctttacttgtttagtaagttatgtaattaggaaagcatgatagtaatatattatttattagaatgtgttgcctaaaaacccataagttttgtatttagaatatattcgatcgttgtttgacctacctgacttatgggttcataggctaagtcctataatttggacgcccagcgaaacacaagaagttgtggtaatatggtcgagaccagaggcagttggggaggtcaaaatccacgtggacgtggtaagggccgtagaagatttcaagggcttagttcacacgtgtaggtgatatataaaggctcatgttaattttgtttgattattaaaataattcaaattaattaattatttatcttttaattattgaattaaatatattatcggataatttatttaactaaaaatataataataaaataaaaggatttaactaatttctgctaatcaattatataatatttatatttaaatttaaattttgaatttgaatcaaattaaatattatcttttattttaaaagattaaataagaagtttgtttataaccttatacatctattctatataaaatgtggctatataacagaatttttggtnnnnnnnnnnnnnttgggtgactttttttttaaataaaaaaagtaacaaattattagatgttgccac

SEQ ID NO: 133305 - DNA, 773 bp, Cannabis sativa
tgagttttgggtcggtcatgctttgtacatggctcttaagtttatctatttgggcatgcatctatatttcaacttgacctacctgttgaccgacctgtgtcacatgtggatctcttagaatacgattgggtacatacttatctgcattatttggttgaatggtaggagggatattctgacagtctaaatctcttttgtgatttagatcatacctgaggtcgtgcacggtgcctaactagtcaaagattgattcaccttgaggccttcttgtctaactgttgtcagtatttatttggctaagtatctctgtccaatgacgaatattatcctaaccatttcctcccaagtaatgagctggaaagacttgctcgtctatcgtgtggcccacagtttgactttgtgaccttagattagacgtctcatttttgtgggttcgctaagtgcttctagttggacgttcttctggcccttattgtggttcagcagggacataggtattttccattggttgttgtccggtgatttgataggctctcctgattattacaatggccattctagaaggatcatcaattacctcttgttgggttctcatgatttccaactattgatccctcctctctttgaattggcatctttgctctacaaaagaaaaatttatatctgcttgggtatcttgctaattgtaatgaagagtgttattatgctcttgcatttgccttgagcagcccgcaaattctatagtttagtgtcatcaccgttcaacctttgag

SEQ ID NO: 133306 - DNA, 1124 bp, Cannabis sativa
ggtaaaataatttccaatagtaatgagatttggaataaagggtaagctagccccaaggtatgttggaccttttgtgggtatcaagagggttagggtggttgcttactgatcagacttaccagcacagttggggcatattcataatgcgttccatgtgtctatgttgaggaagtatactccagattcatcacatgtcattgagtatgaggccatctctcttcaggaagatgtgacatatgaggaacaacctgtcagaatcttggcgagagagctaaaagtgttaaggaacaaagagattccaaagtcaaggtcttatgccaaaaccacaaagaagatgaggctcattagaagtaagagtccgagatgtatatgaagtatcttcacttatttaattttcaacttgtggttgtacttttaaatttagggaaaaaatttcttcaaggagggaagaatgtaaacaatcggtcaaactgagtaaaatgagaaaaaaaaattaggatataggatgtgggatccaattttttttatttaatttctttttcccccacccacaaaacacactccctctctctttctctctctttctcatttctctttctctttctctctcttcaatcactcaagaaaccataaccaccaccgaaccccaacactgattgaagtattcaactatcgagaaggccatctccagtgctgtgcgccttcaaccatttatgccactgagccccaacacacttttcaaggataggcctagaaaggaaaagtgagcgtactcgttgagttcaagctttgaagcttactgctacaattctatcactactacaaaatgtacttttggtgtcggttctaactgacacttatacttttagtgccagttcacaaaaccgacacctattccatagtcacaaaaagtcaaagttttgttgtcggttctaaaccgacactattgagttttggtgtcggttctaaactgacaactaatgttatacatatatgtttttcctttagtgtcactttcaaaacgaaattattgagttttagtatcgttttaaaactggcactaaaactccctttagtgtcggtttaaaattgacacttaaagtggattaaaaaattaaaaaaaa

SEQ ID NO: 133307 - DNA, 524 bp, Cannabis sativa
aattataaaaatatttaaaattcagtacaaccgtatttctgtaattttttttttttttgttattgttgtgtatttgtgaaataattccattgggggaggggggtttgcttttttatttaattttttttttgtatttaaacggaaatacacggagcaatctaaatcgcaatctaaatttacattacaacttacactgcaactataggagtaacctaaattataaaaatgaaaaaaaaaagttaaaaaaaataatatataaaatgatttcccataattttttttttaattttttaagggatattcgaatggtattttcgtatttaatttagtaaatcaagctatttaaaaattgctttgttaatataagaattttaataataatattaatatattgtcaggttgtaagaactcataaacctcaatagaccttattttaaaatgggagaaaaatagaaaaatacaaaaaaggaaaaaaaaaattacaaaaatactctggaccggcccattaaacatttatacagtcc

SEQ ID NO: 133308 - DNA, 662 bp, Cannabis sativa
  modified_base (599)..(613): a, c, t, g, unknown or other
tatttagtagatatttagtctcctagctttgtatataaatatgtactattctatgaaatatacacataattcgaatcactattttctacacccccaaacttcttatctttggccattcgttcccagctcatccatacaatacctctactcttactcgacgaagtttgttggatctcagtgcatgtacgaatcaaaataaaataaaaaaaacacttatatcatacttggcaaagcttgaaaaactgtctttattaaaagaattgctttacctacccgagacagaagcttcccttcacaactgttaatacgagctttcactctatccttaaggaacctcaaaataacagatttattctagcccattgtgttcggaagccccaaatacctcttatgctcatcagcctctactgttcccagaaaattacagatctaaacacacatactttcttcagagttaggactaaaaagatcgaggacttcccaagatttactttttggcctgaagtcgcctcaaagataccaagaagctcttgaatattaccaccaccaactatagatgctctacaaaacaagcaactgttggaattattttactaggnnnnnnnnnnnnnnncaagtatgttattaacatcctaaacataaacttctaaaacgatatgaaa

SEQ ID NO: 133309 - DNA, 992 bp, Cannabis sativa
  modified_base (27)..(31): a, c, t, g, unknown or other
  modified_base (559)..(560): a, c, t, g, unknown or other
tctaattttacccattcatgggtaatnnnnnttaagagtgcacccatatatataatatgtctcgtgttggtaagctgagaggctaaccactaaagttgcaagaagcagagcaagggccgtggttgggaattgaaaagaagaaggcatatacatatggaacacttttaatgggcaatacctattgggtactaaaaaaaattaataatataataatttaataacctactatagcaagttaccaacaatatatttttttaaaatattatatttatctattatatttagcaagttaccgattggaccctcaattttgttaaatgacaaaatggatcctgtattttctaaaatagtaaaaataggactctgagcttaatttctaaccatttcttttttaatataaccaacttaaaggcaatccctaacatgaacagataaagaaaatataaacagttttgtcataacacatttagatcggattattattaaattttattatgacaaaaaatcagtttagggtcctattgtactattttgaaaaatatagggtccattttgtcanntaacaaaatagagggtccaattggtaacttttgcaaaacactggatctaaaatggtatttactcttttattaaattgtgaggtcattaatcattaatttatattttaaaactaaaaatcacttacatgtatattaatgtgttttttttattaaaagacaaaaatcttatatgttattattggaaaaatcagtaggcaaagataaattgaaaaatggcatatacattaataggcataccatttagtaaatctaacatattaacgtgtaagcatattaaagattaaaaagaaaaagaaatgtaaatttatctttttataaaatttttctaatttatttttgggtaaatatcattttggaccctgtgttttgcaaaagttacagattggaccttgtattttaataaatgataaaatagaccctgtattttctaaa

SEQ ID NO: 133310 - DNA, 712 bp, Cannabis sativa
  modified_base (682)..(686): a, c, t, g, unknown or other
ataataaaatcatttactttctccttttatctctctaataattaattagtattactatgccacttcttacaaacagttggccatattttcataatagatattaaattaaattacatgaaacttaataattattatatattattatatgatagtttaagtagtactaaaaccactaatatttatgctttttgacatatctcttaattaaaactcaaaagagtttaattcgggtgcatagatcagattatgtatagagcaaatgaactgtaaggaaagaatatgaaatgaaaaataaaaaaataaagtacaagtataaaaaaaaagtaatgcagattaaacaaagactagggctatgtttgttaggaaggatggagaataaggaagatggagagttagtggaggatgtagaataaaagggaggcagaagagagtagcaatccttttaagttgtttggtggaagggatgaaatgattaaaggatggagaatatttatttatgaaattattatattgtccttaaatgtaattttttaataatatattttgaaggtatatttgtaattttaaataattaatcaccggaaccgacgaaatatggattgtcttcgttagcgggacgatcgtgagactccgaatgagacatggagccagtagaagtactgctggaaattattttaccagnnnnntagatatactcacaagtatgttgatt

SEQ ID NO: 133311 - DNA, 648 bp, Cannabis sativa
aaaaacacaatatttttgaaaatatttccgtgtgacagtatttttgtaaaatttgactcaaattctattatttttgtaagttcatacattaaaatattgggctggaaatgtattttacattctttccacattaatttatgaaaacaattaaaaaaaccgaaaacatgtataaagtgaaaacttatgttaacatatatttatttcagtttttattttgtaattaacttttatgctatgtattaaagttagattttagtgaaaaaagaaaagctaataaaaatatagaataaaatgcgaaaaataaaatgggtgtacttttaatgggtattacccctatcaagtttatactctagcaccatatcaatcaaacttgtcatcgtccttcttttggcgtgagtttcctctcggccaggaagtcactcattgccacattatctgcctgaaccaaaaattgtgacctgcctctatgttctcaagtagtgcactattgttgtcatctctttcttttggaccacgcctttctatctcattgagctttcggctctcatatgctattgggtaccttattatactagcacactgcctacaacatagtctaatccatttgtgtgtacttcaaatggcttagtgtgatctggcaactgcaat

SEQ ID NO: 133312 - DNA, 1371 bp, Cannabis sativa
  modified_base (1186)..(1191): a, c, t, g, unknown or other
aatttttctcgacggttttaaatagttacttaatttttttagcgatggtccccgaaaaaaattgtttttaggaccgtcgcaaattcttatatatgtagtagtgataatgacaactaactgagatttacgcaccttgtaatccacattttttttgtttactttattttatgtacagctatttttgtgtgtgttttggagtaattattcagttttatcatatgggcatgattttctattggagaacagcaaaatatctgattcatataatttgttggtgtgcaaccttggcatcggttcacctcacctccatcctgaatttttttaatcccctcaaatatagacaaattttgtttagatataacaacctttaccactagcgcctaacttccctcctaatttatatttttcttatctcaaaaatgagcaagccacagccacttgatcgatattgggatctaaaactttaccaatgataataaatgtgtaagcaaagatttatatgaccattttgttaatgaatctttgaataaacgtaagtagatccttttcataatggccatcatgttgggttgagaaatattgagaattgctgccccaattagactcaaaggtgagttgaacttgaagattacaatcctcatgtgtgacaaaagtcaagagttttgaataggtatggtaacaacatgatccatttcttttaataccttatcactctttttctttccttttcagaaaaatgtccaattcattagcactttctaaaagactatccagaaggcgttgttgaaatacaatgttaatttttgctgacaaaatgtttttggtcaacccaacaaattagaaaacattaaaagtggagtgatcactttgtattatacataagaaaaattgtaaatgaaagtagctggtatttaaaaatgcatacaaaaagacaaaagataaatgcatacaaaaatgcatgacttaccccttattagaaaagtatatcgaagaagactcgttgaaacaatcttacaacaattttttttagggagtgttaacatttttatttgttaattttttaattataaaaataaaagtaaaattgtgtttttaaaaaataaaaatgtatttataactattttttatttttttaatttcaaaaataaaaaataaaaatgtattttataacttttatttttatttnnnnnntttaattttatttaagtcgggttttgagtctagggccgaagttgtggtccgagtctctgactggagctagggttggagtccgtgtcctaaggttaagttaggatcggaatccaaaatatagattaagaagacaaaacggtttaaaaaaaattgaaagtgatttatttttttaaaaaaaaa

SEQ ID NO: 133313 - DNA, 525 bp, Cannabis sativa
gagagagagagagttggaaaaaataaaaaagagaaatagaaagagagaaagaaaaaaatctgacctaaaaaaatcactacaaaaatatatagaagagggagaaagcctttttttttttaagttttaatatgtaaaaaaacaataaaaaaaattactaatagaagtataaatataaaaaatttcttatcatagtataaaagtaaaattaaaaaaaaaattaatattttatgtaaatttctccattatttactaaataaaaaattagcattgagttattactttttatgaacataattgtgctctaccaacataatttgcactgttttttttttttaacgggaatggatgatattattaattcaaatctgcaatcacaattgatttgagagtactaggaagggtactctctgaaaaactactatcagaccaataacaagagccacgggccaaacaatgggcagccttgttagcagatcgcttaacatgagaaacagttacattaaataaagaggacaataaaacttt

SEQ ID NO: 133314 - DNA, 1752 bp, Cannabis sativa
tctaaatatcaaaattcaaaaataatttttaataaaaaaataaacaatatgaacaaatttattatcaattgcaatactttaggtggattaattatatttaggtttaactaacttgatggatgcggaccctttacgtggaaacatctaataatttgttttttttttatttaaaaaaaaagtcacccaataatttttcataaaccaagaattctgttatatggccacattttatatagaatagatatttttagtgacttgtccatgccagcaaaacaaattaatgaaactgtgcttacctttttcactatttctcgtatactatttttcactatttctgttgtgttttgcatgaaccccatcattgacatcgagtctggagctctattactccattaaagaacaaatcatgagctgttctaatcaatctgaaggggatattgagctgagaatcaagctagttgattcagattttcaagggaacttgaaacaccaattattataaaattggggaagcagtttttcgaacatatagcgttagttttgaagaaattcacgaccgttgttgttctaagggtcgctaacccgtagccttgaagaactctatggcgacgattattatgtaataagcgctgtcatataaggcccctatgacaacatgttatttcatagaagtctcctatgactttttttcagctttaccattttgtgtaataaccaatttttaaaatttttatttaaaatctaagttttatttttgcacttttaaaagttttttttgcttttttgttttttttttttttttgcatttttacggaattccacatagaaacatttatagcaactaacaactaacggagcaacctaaatcactatcaaaatccgtatatagcaacccacatagaaactactggagcaaccctaaccataaatttgaaaaaaaaacaaagactactacaaacaaaggcctttaatcccagtttttaaggccttttatcatagttttcgttaaaatgaaaactggaatatatgcctgcagtgggataaaaagtctttgaaaaaatcgggataaaaggtaccatcccaatttttataaaaaaaaactgggataagaggtcttaaaagacgtgaccttttatccaatgtaggtgtttcacatttttttttaaaaaaaaaattattacatttcattcattttttttttttttgcaataattaataaatctaatttttatatttataattatattgaatatgtataaaaactttaactaaaaaataaataattaaaataatttttaaaaacaacaatgataattagtaacttgaattaataaataatattttacattgtatacaaatctctaaaatactacacataacaaatcactacaacaatttggattaataccagcggacacaataccggtaggccacatctgcccctaataatgggattaataccggcggatgtgggggcccgccgggattattgtgtatttctgtattatttcttttaaaaaaataaatataaaactcattagcggcgggcatttattaataccggcggatggcccgccgcttatagggcagggatattaagtgcgggaaaagtcttgcctatcccattcaaaactcattagcggcagaccaataccggtgaagagttgctagctttagcatgtgggtcagatcacttagtaacatattatgaaggggttgtagtgaacggtgttcgttacatggtagctgaac

SEQ ID NO: 133315 - DNA, 696 bp, Cannabis sativa
tttttttgttaaaaacttttttttgtaatttttttttcaatcgatggaacaatctcagcccatatgatgtaaaagtgagagatttttctatttagatagaaaagttaagcataaaaacttgtaggaatttattccctaatttaatctacacacagcagtacactaatcagaaaaaccaaggtcaattaagacctttctcacccagtcaaagccccttttgactccctgtagatgaaccaaaaaacgacagcctttaagttctgctacaggtcgttttaatcacacccatgaaaccctaaacatcagaccatatataaatatatcttattttctcaaacacttattcagtaactaaagaaaaccctagccaaacttcaccttgagaaccctagcagagctgtcaccttcttcgttgttcttccctgaagaacatgaagaacagcagtgaacatagcccagaaaaacctactgccccgatcaaataaaccccaaaattgagcctccttctttgttgttcttctttaaagaacacgaagaacacaacaatgaaacccagaaagacctgagatgaataaacaccttaaatcgatttagaacccaacccagaaatcatatacacacataaacacaatattgagaaaatgcagaaaattaaaggaaagaatgcaccagagatttttatagaggttccccaaa

SEQ ID NO: 133316 - DNA, 564 bp, Cannabis sativa
agctcataaagaccagaaagaagtatttttcaagtagatgacactaatccatttgatctacagaaaatctttctttgctaaaatcgcccaaatatatttagcaagagtagtatggttccacttgataccatctttaaactgaagaccaccatacactttcagaagacacactttactccggaaagctacatgaattttaattctattgccattcataccccacaaaaagtctctacataacttctcaaccttcttggtaatattatggggaagaacgaaaaatactcatccaataattacggagaccaaataacattgaatgaatcagttggaccttcctagcgaaagacaaatgtctactcgcccaagtatgcaatctttctttgatcttcttgatgattataccacaatcctcaactttctacttggtaggccttaaaggaactcctaaatacttgaatgtatagtataagcatttcaagattaaaagggttatagttgaaattaatggtaaaaaacaaatataaattgaataaatattaaagtactaaataatattttttt

SEQ ID NO: 133317 - DNA, 1048 bp, Cannabis sativa
tttagaattattgtaaattatttattttatttcataaattaattatgaaaaatacttaggttactcagaaaaatctaagtttactttatatgattagttatgagatataaactattacaaaatcaatagatttcattttcagtcaattttgtatttttcatgaattatttattttatttctaaatttaattatgaaaaatacctagcttcctcaaaaaattcaaagcaaatttttgtggcgtagtacagactataaaccgtggtaaatgggtagattttttttttttacatttttatatttttcatgaatttatttagttaatacttaaaataattatgaaaaataattaaatgtgctaaaacagtaaaatatatttttttaatactatttactacctatgatacgaaacaaaaaaggattttataatttattgttgctataaatatttattataattatctgtaagtaattaactattaaattgagttttaaatagaataaatagtaaaaaaatttattcactgtttagggaaccttaaatataatgctaaaatataattatagtgtctgaaattaattggaggctatgttgagatgtttcgctattttttttgttaattatttagagttttatacatttttaacatataaatttatgcataatcatgggtagtatttcgtacatatttctaagcaaattgaatatgttttatgatctgtataaatgctgaaagaatttgatatcttctgaattcggtaaataattacataatggcatattttgttaataaataatattttagtaaaatttcacataaaaagtatttgtatgaatttatgttttacgttaaaaatattctatgagtacatgcaatgtgtttgtgtgaatcaaaatgataaatgattaggtatattgtggcatgcaagtgaaattagcttatgtagtgttaagtatttacgtaagtttatgtataagtataaagattcatacttgaatgtattttgagtgtattgttatgttaatgaatgtttaggatcttgttctca

SEQ ID NO: 133318 - DNA, 663 bp, Cannabis sativa
taagagtgtagagacactcgactggtgcagagcaccaagaaccaaagaaaacagagtgaaattgaattgagagtaaaaatgcagtagttacttgcatcctctcatgaacaaagcctttatttataggtgctagaaagttgttacagtataactgaaataacagaaaaagacagctaaccaacataacagaaatactactgtacactaactacaatgactgttaacagaaataatcagttagcttatactcttttcctcatttttttatttttttctaaaaattttttataaaatattttttttttttgagaaaaagtcatatttttgttaacttgtaccttaaaaattataaaaatgaaaattccacggaaaaaaatttggatttttatattacataactattttttttttctataagagtttatatgtgcatttgtaaatattttggactcggaattttggtggactctaaacccttagtttaaaatcaaacctgaatttatattacacatagtttataaatttgaataaaactgacttatggattggattggaaggatcggttgttttaactttgtttatttaagactagggaactaagccgcgctttgcgcggtgttacccaatttttgtaatatctttatattttgaaaattttatatt

SEQ ID NO: 133319 - DNA, 521 bp, Cannabis sativa
cttttagctaaagccgacttcttccttattccccggttttattttttcattattattttttacgatggggctatttaaacctccttttcttatcattcttttacataatctcacattgatagtgtgtgggaacataataatgtatgagctacttttagctatgagttttgaaatggaactccatgcgttttaccatactcgcattcattttaaattctaacacagtattagagcaaaataaaaatctaatgagcagtcgatttaaatccaataactagtccaaaaagacaactaaaatagccgcttagattattgagcggaaaagagtcgttttgagctaagtgttgccggtctttaaagatgagccaaaacagtcatgatttgatgagccaaatgtaaagttgtgtattgtagccttttttaaaagctcatgcttttatgtagtgaaaattacatgaaatatgggatttcataacaaagttagaaaaatatggcatttttaagtttgccactcttctatg

SEQ ID NO: 133320 - DNA, 599 bp, Cannabis sativa
tatattattttataataaatcttaattaattgtacgatttgactgagctacataggctttggacgggacaaaaataaatgtcaatagtaatagttttcagtgacatttggttaaaaaaaatcaccatgatttaaccatccttttagttggcgaatatatacatttttccaaaaacattttacatattattgttaatgattgtgtgctttcattaaaaaaaaacaagttaggattaaaagtaaaaaatatcgtgacaaaaagttttagtcataattttttttttgtaacgagattgtgattaaaaagttcatgactaaaagttttagtcacaataaaaataataatcaataaaaattatttttagtcacaattaatttttgtgacaaatagttgttaaaatatcactacaattagtcacaaccaccctttagaacaaattatttatctttgatgacaagatttattatcactactatttatttagtaacaatttttattatcactaatagtactttgttggtgttatgctcagtctaatcggtttgaacccttgttggtgtccaaaaataatcatcacaaggaggagcattggtctaaac

SEQ ID NO: 133321 - DNA, 1468 bp, Cannabis sativa
cctcctttcccgcacgagataaaagacgcactttcccacccttgaattctctttcgaagcttatccttaagaaaaccaagaatagcattcttatttctccccaccgaacacggaagacccaggtaatagccattttcatcagcctcataaatttccaacatagcacaaatggaatccctcaccgcgcttccagtattgttgctgaaaaacatggaagacttagagaagttgattctttgccccgaagccaccgcagaagtatgcaatagctcattcacattgtacacttctttctcagttgccttgcagtaaatgtagttgtcgtcagcaaagatcatatgagagattaccggcgcgccttgagcaattttacaccccgtaagtaagccactttgttcatagctacgcaacaatctagagaagccttcagcacaaagaataaacagatattgtgacaaagggtcaccttggtgcaaccctctttcatatttttattttaaaattgataattttataaaaataaccaactggtattttattgaaatcataactaataggtccaaaaaatatcgtatttgtaattatttaaaagttatttgtaacttcattctttatttaactaatcataatgcatatattagtttatatttaaaaaatacagatgacttaaacatttatgatatatattttttttaaaatacagtttactaaaattgtagcttactagatgacaactcattattttcaaaaataaacttgaaagttaactcaaaatttattaatataacctaaataattaattaattattaaagtgtaatataaaaataaaaaaagctacttgttggtttatcatcaacatcataagcaaccaaaaggttacttttgaaacgcaagaaattttttttaaaaaaaaaaatcgagattaatttcaagcatattattttagaattgaagtattttttaataatagagtaagatattattgtaattgagtgttgttaagttatttttataattattttatattttacatatatttttgacaaaatccctaatttatatagggaaatttgattaattatgcatatattaaactaaattttttttaaacttaaactattcaatattggtagaatctctctctctctccctctccctctctatacaatcgacccataacccacccaatgacccacaaactcaatgaccaccacggacccaacgatttctccatcaatcacggcttcactatcgacaatgttatcaaatgaataaattgtatgattaatgtttcttatctatgagtagtaggggttttcataaaatatttgatccaatccaatcggcatgatccaatccaatctaattcacaaagtacggatatctgcatttgtgcggattggattggattggaaaattcaaaatccgcacttgtgcagattggatattgattgacatgtaaaagta

SEQ ID NO: 133322 - DNA, 656 bp, Cannabis sativa
gtagtatatatcaaaataaccacctcgacgagtagatcacacccatgccaaccatttgtcaaaacggtacacgatatcgccagaaagttgccaaaaaggggtagagctaccaaagtatcaccggaaaaagtagtgagctgggaaaaatagcttagtgtaggttgttctcctcgtcgagctgagtctagtggtgaaaacggctagtcaaacggacactggaggtgaccggagaatcggttcaaagtttgaaccgccaaactttggcttgcgttcccgagctaacgacggtgaaagaagcggtcccgcttgggggttcaggtcaccaccacctggaggttcaagtggtccagcttgtgcggctagattgtggccggagatgggtcatcggagagtggtggtgatggtggtttgtgggttttctttttgtgttttgaagagagagaaaaagagagaaagagagggacgatcaggaatgggagggaatttattattatttttttatatgtacatatattattatatataaggtttgactcgatcaaatcgagtcttcacagctgatcatagatatagaatctatagcttgtataagtatttagaagtgaaacgatgatttccttcgagcttggctcgatagagataaatgattgagatct

SEQ ID NO: 133323 - DNA, 764 bp, Cannabis sativa
catgcttttatatgctccaaccttgttcttaggaaagaccatcaagatgaagtgagtgaacttgatcaaatgatcctatacaatatcatcttgaaagacaactaaatcaacttaggctaccttatcctaaaagccatcaatgaagtgtataagtctaccctaaaaagagccttaccttatggttatcttcttagctacttgttcccactcctaggaatcccatttgaagatgaaacagacatttatgaacccaaagatttcgacactcttggtgagattacattcaagtgtatgtgctacaagttcaatggagtgaaaaagaagtggatttccaccaaacaagatccacatgcccatgaggaagcacctttggtctcaagtgaaagtgaagaggtggagcaagaagcccaagctcaaagcaatgaggtagccgaagaagaagtgtctccaataccacaagttccccacttcaatattgaagaggcttttgctaaccttcacacttctattactttaaatttcaacaacttgagaggcaaaatgaacactcaatttccactctccaaaatgagatgactaccataatgagtgacattgccaccttaaggggagacatggagcaaggttttgacaacatccaagacgaaatggcacaatggagagcttacatggatcgatttggacctccaccaaattagctctcttgcattttttctcatgtttatttgtttttagtttgtttgcaaaggcttagtgccttttga

SEQ ID NO: 133324 - DNA, 1140 bp, Cannabis sativa
agtggaaggaggaaaacactcataacatatgtggggagcgattggacaacagttttcaagaggatttctttgccggcatgagaaagaagtttaccatcccaactattaattcttgttattaccttggtctttagaaatcctagtacaacatttttatttctcccaataatgtttggaagtcccagatagaggcttccttcaaaggcttcaggcatatggagaatatcacaaatctggacacgagttgcaggacatgtactaggactgaagaacacagtagacttagaaaagttcaccttttgtccaaatgcagtttcaaattgattgagcaagtttgagacactgtcagcaacactagtagttgattgacaaaacaaatagctatcgtctgcaaagaacatatgagtgataggtggtgcctcatgagtaaggtaagtgaaggtaagtaaggtacgtgataaaaaaataaatttaaaagagaaaaataaataaaaattgaaaaacagaaaaaaaaaaaattaaatagagtggtgtagaaaaaattagagtgctattattatttaattaaacatattttaaataaatttggatggtatgttccttggaccttagtttaaaatattttagtatatttttgtttacgaatttttttgtacagctttacaatttattaataaaagtgggtatattttaataaaatttaatatgatagtatttttgattaaaagatgaaaaaaaaaaattcctccaccataaattactttatttattttgcatactctgacattatggcagttatacctgggccacgtgcttctactaagttacttagaatgggttgcccccaatttgatgggctccattatgacaaatttcatgacaggaaggacattcgggcccaaaatttcggcctatattttcttgtccctaattttcgttcaaaggtacacttacaaacactaataaatcgtcgatacaccaaaagaaattattttttttcacaatattttttttcaaaatgaatcatgcaatctatctatctatttatcttctaataaggagaaacataaagagtgacatgacaacttaattattttttttttttttgaataacccgcccaaatcaaattgaaaaaacta

SEQ ID NO: 133325 - DNA, 718 bp, Cannabis sativa
tatcggttagtatccaattctttaatgaacatacccttactcggttgccaaagagaggccatcaaatggtgcataacaacaaaatgtatggatctttttgtcaagaaccttccaacaatacaccctcgatcataataatcattcccgtagtattactagcatcataggacaataccgcctcttcttcatcatcaatggttatagtcgccatgttctcttcttcctccatctactgataactactagaagccatgaaataccgaacaaatcaaaaaccagtaatacaaacccaatgagagaaaactaaagaactacgtcaaaagacaagacttgttaatttataaaaaattaatactttttttttatttttgaaaaaaaaaatgcaaatatgtaaaattcattaatacgttattattaatatatatgtatatatgtcaaaaaatggaaaaaaaattggaaaagaatgcatttggtgcgggtatgcattgcataccatccgcgcacgtgggatggtggccctgaccgagagaacacggcgcaagaggctacatgcagcctttccgcgagagaacggccccttgttcagacaaaaaatgcccaaacgggtgaggaacctcgcacagatgtctgtccaaaatcgcgtgcacccctaaaaacaaggacatccgcgcgtgtatggaggtgtcacacctcttgattttttctgattttcaaaaat

SEQ ID NO: 133326 - DNA, 1073 bp, Cannabis sativa
  modified_base (34)..(39): a, c, t, g, unknown or other
cgctcttccgatctgattatattgaaatgagttnnnnnnagggcataaaacccaacattggtgcaattctcttaaagtcttaatgtttcctaggcttaggcaattgagaataagaccaatgtatttagggtttaatgcaactgtttctaagtcctaatgtctcctaggcttaggcacttgagaataaaaacaatgccctgtggacttgatgcaattctctccaagtcctaatgttgcctaggctacctgtcaatccaaaagcttgattctacttctttgagatgggattgaaactgatcccaggaattcgagcaacaaaatccttgaatgattttttgaagcgaagaaaatcttggcaactaagaggaatttcaaaaaaatcaaagaaaaacaaaaataagggaaatgaaactcttatctttatacatagggtttttataagtgtcgacatctcccgttgagatcatgacacatggcaaaaggaggctagaggttgccccatcgaaaggttcacaaggagcattggtaaacatcccttaaataggaaaacaccaaagggtttttgatgatgtggcaccttagaaatcgaaaataatgataaccaatcacccttcataaacctcaagaaggaaattcaaatttcactcgcaacatgacaactcgactgtccttgaggataatttcgatgcttgataaacaacagccattgcaaaattaaaggcatgtgctataggatgattttttcacctaaaataatgagttcatactcatatttgattgacatgtggacctagttccctaatggaaaagaataacgtgtcaacactaccaaccccagttgggttatccttgcatgatcgaaacttacgataaggtgtgaccaagatagggtctagtctcacactatgcaaggcatagtaagagaaagcaggacactgagagaagttagcatagtcaagacatatatcaattatatgtgatgaccaagtgtgttaattctatttttgacatatttaattgtgttaggttatttttagtattaattttagtatatttttaattgagttttaatc

SEQ ID NO: 133327 - DNA, 787 bp, Cannabis sativa
tttatggagacatcagcacttgagtccactaatgttgaaactgcatttttgactatattaacagagatatataggttaataagcaagaaaacacttacagctagtgatgaggttgattcaactggtacttcaggtcttttaaagggtactaaaatcattgttcctcttcaggaagagggtccaaggaaaggctgctgcttttcctcatcataattataacttgtttaattaaatcatttttttttgttttctcattttttggaaattaatatgtttcttttaggttgttttgtgtaattctttgtaggaaaatgatttatatatatatggtgtgagctttcattttgtgctcacttacttgaaattaataacaaggagagtattgtctcatgttttgaactcaccatctacctaaaatcttatttattgttttttttttcttaacaatgaatatttcattgaaaatgaaaaattaatagagaattgaatcataggtaataagaacataaaagttctatagtggtccggccccaaaattgaaaatgacacgttcaatttataagctcactgacccctgcaagcgttttcggctgactatttaactcataaattacatttaaatgtgtaagcactaaaactccataattatatcactctttacaagattagagatccaaaaatcttaaaccacaagtaattaatatatcgtttacgtgtatacaatataatatatgttatattattttataatataataataaagtagattaaaatgtgataaatatat

SEQ ID NO: 133328 - DNA, 1184 bp, Cannabis sativa
tctttatacaaactaagctctccaaaaaggaagcaaataactatacaatcactatttacaaattatcaaaccatctcctatcttccactttgattttctttggtagaacacaagatattcttgttttgatgtgccatttaagctcctgaatattcaaagatatcgggttctgctgccatatatttccatttctctgctgccaaatgaagtaaactaaaccagcaatagaagccgaaaaaacctgctgctggaattttgaacgtttggacctgctaatgcttcggataagtgaattcagatcacaagcaggagccttccagccaatccaatctttcatttgttggagcaaattcctggttttgctgcattggaaaaataagtgcaatttgctttcgggttggctgctacagaaacaacattcttccataactgttatgtgcatccttttcaagcgatctcttgtcttaagtctgtccaacatagccatccacagtataaagctatgcttaggatgattgagcctagaccaaacttgattacaccagtgagttcgatcttgtgtcaactgaagcttcttgtatgcatctgctattttgaattcagtagctaagggctggtttgtatcccatgttcttctcatttcatcctttagatccacaagtttcctccaataccaactactatgtatggaagccttgtggttccaacaatcatcattcttcagatagacactatggatccatttgacccataagttatctttcttagcagctagtgtccatatgtttttcattaaggcagccttattccaagtattaacatttaagaaacctattccaccttcagctttggagaggcaaaccttattccaggctacggctccagctcctagcatattgttagagcctttccatagaaaactcctgcatattctttcaatttcagcaaccactttctttggcaaaactagaatctgactccagtatgtgtgaatggtgaggaggacagagttgatgagcacagccctacctgcaaaagagatgtgtctagagctccatattttgatgcgattcgtcattttgtcaaccaggatattacattcagcctgagaaattctttttgagcaaattgggatcccaagatacttaaaaggaactgaacttctggtaaaaccagaaatctga

SEQ ID NO: 133329 - DNA, 603 bp, Cannabis sativa
tgttagttaaattttcaacaagtaatttccagtgtacaaacttttgaaaagcttcatttttatgttttaacaagtaaacccacactttcctaaaatagtcgtcaacaatagataagaaataggcactacccccaaaagttagggttttctcaggaccccataaatttgaatgaacataatctagtatgccttgtgatttgtgtgtgtcagtttgaaatttaagcctatgatattttcctagcacacaaaatttacagaaattcacgttagttaccttatccttaccatgtagttttagttcacctattagttgtaagcccctttcactaatgtgttccaatctcctatgccatagaatagctttagtgtcttctatgacatgttctttggtgttgtggcaacaagctactggacttccttgcaagtagtataggctaccatttttttgtcttttaatgattttcatagagcccttagccaatttaattatacatgcctcaattttgctaacaatacccagatcatcatgtacactaatagatattaagtttctagataaatcaagaacatatctaacattagttaaggttctaataatgccat

SEQ ID NO: 133330 - DNA, 1317 bp, Cannabis sativa
cgagttttttggaaactaagtattcttagagcttaagaaagaaaaagtaatttaaataacagaataacaaatatgagatttttacgtggattaggcattaattattattagtccacgagtccattttattaggctcatcggtcggtaaccgcttttagaagtagagatacaatggactgaaattccttttcttcctgtgttccttttgaagaagaggaagcttagtaggaatattctggagttttttaggtgtaatactatctggtcttataaaagtgtgtttgcaaagtctggcaaagagtgagtcttgccctcaaaaaatatgtccctcccctcctcttgtgatttacaggggtatttataagcaaacttctcttcatgtgctggcttggattgatcatccttaggcgaaatcaaatcgttggattggtaggtggtatttttcccatatggcatttaagggtgtcagatcgtacaagttggacctcatacgtgtttcatcctagggcctttccttttagaatttcccttagccctggtcattggatcattcaatcagttacaatgagacacacatgctttgtacgatagcatgttgtgggagacaacctctgacatcgtacttgaaaaatcctggtcactaggtccgtagtctgacacgtacggagagagtctctgcgggctaaaggcatagcccggtttggcgcctctaaaaatgccaattatcaagtatctattaaatggggaacttcctacaaataaaactgaggtatacaaactcttatattggatacctcgctatacaatggttgaggagaaattgtagaggagaggttattcttgcctcttttgcgatctgtgttaccaacaaaagccaatgaaataatcaaagagattcatgaagacttctgtggagatcattcagtctggcagagcttatccaaaaagataattatacaacgatactattggccaactatcatcaaagacacacacaaatttgtcaagagatgtgataaatgccaaaggttttcacatatacctcgcataccaccaactgagttgaggatgatgaccttgccatacccatttgcaatatgggaattaatttgattggggctttacccacagggtgaggtggagcaaagtatgtagttgtggtagtcgacttcttcacaaaatggacaaaagccaaacttctagttaccatcacatgcaagaaggttcttgatttcgttatcaagaacatcatatgtaggttttgttgggaatattttaccaggatctagatttaaaacaagtatgttgaattaacat

SEQ ID NO: 133331 - DNA, 660 bp, Cannabis sativa
aaaaaaaaatcatatttgattttggtagagagaaaagaaaataggagagagagaaaatattgaaaacaaataaaatctaaaggaaaggagagaaaattattgtttgttattgagtttaaaaatggaacaaaaaagaaaatttacaatttatgttatttattattttctcaatattatttattttattttaaataaatgatctcttagtaaatttctataaatatttctattcacttctctctctaatttagtagaatttttttttatgggacccactaatatttttccttttttttttttctcttttctcatatatataccaatctcaaaatttccttttatccattctctcattttctttcgttcctctctcacttttctcctctactagactaccaaaagtaaggtaagggctactttaataatgctggctacctgattttgtatgtaagaaaaatttaaattatccaatcaaaaattagaaaaaacaagtatcacagttgctcaacaggagggaagctacttgtatttgaagttgaaaagtcaataatttttgggattttttcataaatatgcaaaaatgacaaaattaaaaatgataaattttttacattttttcggatatattgtttttaattttaatagattttatgttttttt

SEQ ID NO: 133332 - DNA, 700 bp, Cannabis sativa
aaataatttccaacagtaaccaatcaatctttaagcccccataacctactcaatcttccccaaacactcccaaactttccagagcatcattatataacatattaaacatattctacaactcaaacacaataatttcaccaagaatcaaaaagtgccattaaagctccatggaactcaagcttgctttacacaacaaaagtcaaaacctacaatcagatttcaaacaagaaaaacaccctaaaatctcatctaagttcatcaagaacatactccatcactcaacaatatacacaaaccaagaacatcaagatcaaagaaaatcctatatacatgcatacataagctaaagcatgaacaaagcttaatccttcaatcttgtttcagcaacaaatcacataaaaacagtaggaagaactaccttaaattccttccaaactcaagtgcccaaaatcaccacaacacaagcttgatccaaagtaatttttccaacaattagcaagttaaaaagatgagacaaggagagggataggaggttggttcaaaggggctgagaaaacaatccagaaaattcattttattttccaaaatcccatactttatcaaatgtaaaaaataaaggtcaaaaaaccattttgcccctagggccaattctcacatattcatacatacaatggcataattgtcatttcacactcaatta

SEQ ID NO: 133333 - DNA, 791 bp, Cannabis sativa
ggaggttatgccgcaaattacccaacatatatatatatatatatatgaagtcataccaagagctccctagatccaattgataaaattggcagaagggtcatcaaaaacaattgataggccctttgataaaaaagaacatattcttccgatccttatgagatgattccaagttaataatgagacatgttgctttttaggacgtagatgataatgtccttgctcgctttccatcaaagagtagaagtgaagaatgtcatatacctcctgtttattccccgctttatctcctaggactatcacccccagaaggataacccaaatgttaggaagaagctgagttagagtaatcacgttgtgcaaaagaaattctttcattagttaaagaatggatagccttaagttgacattctgctcaaaccaataagaatacacacaaacccattaaccttgaggagaatcaactttcttgttagctccaggaaccctaacttccactcttccaagaatctgcaagtagataccagagaatctaattttgctcaggttaggattaaagagcagcttaatttatgatccaaaaaggatttactcagggtaggttatttcctctttaattttctttgtggaggaactgcaactgtagccccttctgaggaagtaccatcaccagaatgggagggagggattaaagatatgcttgttgaggattattttactaggatctagatactaccatgtatgttgtttgacatcctaaatatgaatttctaaaacaatagaatttaaacaca

SEQ ID NO: 133334 - DNA, 1480 bp, Cannabis sativa
ggtaaaatatatccaacaagaagtccttgaattcaataatctcaataatttggaagaatttttaacgacctaaaaaatccaaaaaacataatttgatacatattaaaaattcagagactgaaatcttaattaccttcaaatatatattctcttctttatgattatttagcccatggtatcacattatatatgtaattaacttttcataaaccttctaatactactctaaggtctaaaatacctattggggtttttaaaatgagcaagatcatcacaattatgtgtctaataataaaaaaaaaagttgataaatttattttaattagcattatatacctcagtaataaacaaggcatggaatccatatggaactctacaaggcaaatcaattatagcaattggattagctgacattgtttttgcatcaataacatgcactttcgttaactgacattgtttctgcaaaaggtaacaaaagtaactattaataataaattatattttcatcactatatgttgatttttgactttgttaatgattatttatataatatatagagattgttattgggtattagtggtgcctaacactttctagatgtgtcgctttgtgattaactagcggtactttctaaaaattattgcattaagttatataagactcgatactgtaccaacaacgatattaacacataaaaaaatgttaaacaatactggtaccctttaacatttctcaaatatataaaaaaaaattaacaaaatttagaaacactaccacaccattacgatctctttatatgcaggctcgacattgagctgaggttggttaggctcgtgcttaaaatcccatccaaactcaagacccacaatttttatataatatatttagggacttttttaataatatactatattatcaaattatttacaaaaataacgttgtttaaatgactgaaacattctgtcgtgtcatgtcatcctcatcacaacgtaacgttcttattaaatgcctgaaactaataaaagggaaacgatggcttaaccagcttgaaacccaagaataccgtgcatggatcacacactaaaacaataacatataaattggaaaccctttgctgaaattaataaaaactttactcaccaaaaattacacttaagaccttcgacaaactttattgcagagaaattccattgtcggaaaagctctattatcgagacttcatcagaccttaaaccttcgacaaaataacaattattaccacaattatacaaaaatgatacataaaaatacatcaatgaagatccagcactaaggatagacacgaacggagcattctaaaattggaaaaaataaaatttgaaaaaagaaatataaaaacagaactaaaaatagattaaagtctcgacaatataatgaatcaaaactagtagcaaaactagatatcaccaaaaatgaaacaaactagtaacaaatagaaga

SEQ ID NO: 133335 - DNA, 1202 bp, Cannabis sativa
  modified_base (1110)..(1110): a, c, t, g, unknown or other
aagtaaaaacagttttatagaacgtgtttttgaaaaatatttgactttttcaattttaaaaaaagaaaacagattaaaaaaatgttaccaaacaacacctatatgtatgtatacgcgatatgaatatatggatagaaataccttcagccattgattctttgagcttcactcccccacacgatctttggatctgcaaaagaaaataaaacttagctagtgtgtgtattcaggcttccaagctctctttactctctttaaatagaatttattattttcacagaatgagtgaggagttcggggaccggtaagctatatttataggtgatatattccatcagtatctgtgctacattaattgtcagaatattttgacaactaattcgggaaataaattaattagtaaatcgtaatctgatgatatttaaaagatttactcttatcctattttaatttgtgataatatacaatcagcgagtagtcagtgagataaagcaaaattaatttaaatgattttgtattaatattaaaaatattctaatattaaatgaaaatattctaataaaacacgctaggatctaatgtgctaaatcagttttctgttaaccatataagataaaaaataagagaaagatcacaacttagatggcgtttgatttactggaatgtaattgtaatggtaataggaatagtaatgaaatgtaatggtaatagtaatgggattactatttccatgtttggtttattttgtaataaacattgtaatcattttttttatttggtttagtataaaaataaaattgaataattaatatattgaccaaaatatccttattttatttattgcgaactacatttggtaaagaagtaataaagagaagggtagaaaagtctttttgcagtatattggtaattgtaatcctcattcatttgtcatactcatgtaatgagaattcatccaagtagtgtaatactcattacaacgtaaagttaaaagccccaaccaaatattgtaattgtaatctccattccattccaatcttaattacaccaaagcaaacataccattaatatcatgaatatttagcatcaaccacttgaggctagctcaantggccataggtgggtgtgtgtgtcttggaggtcttgggttcgagtcccaggtaaaacatggttgtaatatacaaacgcttaaatcaaaaaaa

SEQ ID NO: 133336 - DNA, 546 bp, Cannabis sativa
ttaattaaatataatgcacgtatacaaaagtaattttgtaataaattaaccaaatatgccttctttttactaaacaaactatgtaatatattctttattatgtcaattctttacactttaccaaacataatgtaagtttgatatgtgtgtggtggaaagtatgcctatcaaatgaaaatgtgtactttatgtaaagtatagtaacatgagatgatatgactacaaactaacttgttttaaaaataaaataaaataaaatgatcaacttgcattaataaacaaataaaagtgaaggataaggtaggaaataatggtgaattttttcactttagttttccatacattttttgtccataaataattatcatataaaaagaaatgtaaagtaaaatagagttaaccctttcaaattttatatgaaaagaaaaagagaacttaaaattggtaaaatcaaaattattattaaatagtattttgaaaatagtttttaaagccacaatgttggcccagtacatcctcttgtgcctcgcctctaaacgggtgttg

SEQ ID NO: 133337 - DNA, 679 bp, Cannabis sativa
taaaggtccttggcccccaaaagcaaccttagcctgggcaatgttttggttgatggagcccataattgacttcagcattgttgcctctagtgcctctacaacatgaaaaatccataatattgttagaaaacaataactaaatattgaaaccaagtatatgtaattaggcgtaagcataagataggactctggcagattcaaccattaggagagctattatatggctttatgtgagcaaataaaactacgtcctctcgattcataaagattccatgctctctaaaacccgagaaagacattgactaaaaaggatctacgtttaccatttcgggcgatattgggattacttggccttttaaagatttcatctatcctatcaacgtaactcttcataggatacttaagaggacctgaagtgcaaaaaataataatcaaagcccccttgatccactcgagccatttggtccaaaatgggggtacaaagtaagaggaagggcctattacctcttccggaggttctggctataggggtgcccttgtccaagtatgcgacatcaaacctttttgcaatttcttcttctttggtcatatagtttggatggcgacgtgctcagtctgccatcatacgtacgtcctctttaagggcccccttcatgatctgagagatcccaacgacgat

SEQ ID NO: 133338 - DNA, 1442 bp, Cannabis sativa
  modified_base (159)..(160): a, c, t, g, unknown or other
agagagagagagagagttgctaaagggcacctatggtgcctagctccttatgagctataatattaatgttatttaatatcgacttctaattattttattttaataatgattataaaaaaactgccatatatttatttggagaaatgctaaagggcaccnntggtgcctaacaccctcctatgtgtcaatatcgctattggtctaactaagtatcgggtcccatataatttaatgtaatagcttttagggagtatcgctagccaatcgcaacgcgacatgtcgagaaggtgctaggcaccactggtgcctaataacaatgctcatttatttggcaccacctcatggtggtactaggcaacaccatagtgcctaaaagaaatcatcttacaaaaataaccactcattttgaacaaaatgtaacaaaaatattcattgatcttaagtatattctaatagtttcacactttttttcataaggacagtaaaaaggaaaatcctaagtcgaaacctcactccgccaataaaaaaagctttttagttttttgacatataaaaaacttttattttaattaaatgtatcgccaaagagaatacaacaataaattaaagagaataaattaataacgcaacctaaaaaataataatacactctacagcaacaacattacagcagagcaactaactacaaacaaacaaaaacaaagagaatgctaaaagttttagtgtgcttggattattacattgttagcccttacatgtgtttgaacaaagagttttaacaaaatatttatcatcatcttctccaaagcatccttaaactgaaatgttcatcaataaaatattaattttctccaaaacatctcaaagaattaaccaaatcagatttgcattgaaaaaaaaaatagttctatatgagatcccttgctcacgaagagtttagcacactttcccccatcgtcatcctcttccttcagcggcttgctagaaggtctaaatctcaaatctagttccatcatctctaacctacattctcaaatttagtcatcttcgagcctgccgtctccatctcctatgacaaccacccttgaaaaaagaggaggaagatgaagaggacccaaagatgagagaggggatgctttcaaatcattttttttaaaaaaaaacaaaaacaaaaatgagatattcaataaaggataattacataaagtattaattttttaaaatttatattttacgtttaaagatttttttaaatttttacagcattttataaaaacaatacaaaaataacaaaaaaactacttaaaagtaacagaaaaataacatctaaacaacatcataataacaattaaatataacatataaataacaaaaattcaccaacaaattaacaagagtacaacataaaaatacataaaaagactgtattttcagtaaataaa

SEQ ID NO: 133339 - DNA, 1397 bp, Cannabis sativa
  modified_base (56)..(57): a, c, t, g, unknown or other
  modified_base (395)..(406): a, c, t, g, unknown or other
atagagaataaaataatgctgaaaactctctgtagaatgcctccagtattgacttnngtctctgaaattcgtactccttttgtcctctaaattgcttccctcaactcaactccagttgttcaccatttttattataggaggctttcaaggaggactaaaaaaaataataaaacgcacatgttaaatgcctatttgaattaggaaacaaccaaaacgcacgtaagacaaaaatacggtatttgtcctgtttaggggggcgggccgcggcccgtgttggagtttcaccagatggctttgtttcgacggtaatttttctattgtgttggctgctagtatttgggccataactctttcgatatttcttgaaattggatgattcaagatgttccggaaannnnnnnnnnnnatctagaacttttatgttttgaccatttcgaaaatctaatcagaagactgtcgaattcaggcttgaattttcagctttattttttgcataattttctctattttaaatatcatctttttgtgagatattttcaacttttttttttatcttattgctttgatattttctaatattcttctattttaagtctgcaaaaataaaagataaaaattataaaattgcttcaaacacgatttaaactaaataaaaaatatactaaaattaatttaaatttaatactaaaaataatctaacatggccctgtcactaccttagcctctgcactctccctggccgaccccgagtggcagcgcaagctctaggccgaggaggttggggtgttgacaaggaggttgtgagagagtacttcaacaattccgagtttcaaagatggaagaagatttacggagagaccgatgatgtgaacagagttcagaaggacattagactcgaccatgttaaccgatgatggtccggttagtggagtcattgtatgggatgctggttgtggaactggcttgctttcgaatcctctcgcaaaggagggtgccattgtctctgcaagtgatatctccattggcatggttgctaaggcttcaatgaagaacaataataagaaagagagaaagatgttaaaaatagataacttaactgagagaactcatattaatataattaaagaattattatctaatactaaaatattattaaaaaataaatttgtgaataatctgatacattatgaataataattatttatgtacactcattcatttatcaccattagattaaatatcgatgattgtaaaaatatttccaccatagggacaaaactaatgtgtctattatagatatgtcctatatatacaaagataaaaaaaatagtttgagaaaaaaaaaaagagacacaaaaacaaattaaaaacaataaaaaagataaatatatatattt

SEQ ID NO: 133340 - DNA, 594 bp, Cannabis sativa
  modified_base (560)..(564): a, c, t, g, unknown or other
ggcgcacaaagacttatcaaatgtttacaggttatctgatccacgtgtcctaattcgactagtccacgtattttgggcgaatttaggggcaacagttttcaatacagaggaagcttataaattctgtgttcattgatttatcttttcagctttaattcatcaagattcatactttattcaattacttagctttcagaataacttggactttcaataatatacataccaaaaaaatattaactaatttattaaaaaaaaattattttaatttattaaattagaaagtaatacacatttcaaaactaaataaaatatctcatatttttattttctaaattaataattaaattataaaaacacactcaataaaattcgaaactagaacttaacacacacatcagaataaaaattaaactataaatgagaatttgtgttactattttttcgaatttcggtgtttattagcaacaaatttatttttttaagtattaattatgtcacaaattttttaatattaaagttaaaattttaatacaattttattaagtaattattattannnnnaatacacaatttatttttttatatataatt

SEQ ID NO: 133341 - DNA, 1262 bp, Cannabis sativa
ttaacgccaacgagaagttctttttttttttttttgatattctgccatggcagcaggatcaccgtggggagatctctacgaagccgacgagaaaggatcaacaatcaaggaggagatctagtggaataattgaatatcagcgattgagggaggtctccttgaattttcatacccacacattttggaaaaaaaaaaaattgattttttttgaataaaaaaaattgatgttgttttgtgtgtttttttaataactttgatacttattttttgttgtttagttgatttacatatatttttactattttttttttataattttcgaaaatctgaagaaaaaactactgcattgaatttctgggaaatataataagaacaatgagtgtgtgttaaaatttcaatacaaaaatatgttgcgttcacgttgttttagtttcatttacgttgttttttttttatcattctaaaattaaaagttaaatgtacaggcaatataataacaacaaaaataaaacaatgaatgtgacaagaagatattgaaaatatgaagaaaatttatatgtattgatgcaataataacttcaatagctatacttactattcattaatgagacaaaggagaaaagccataattttgtataaattatgtaaaaactcataaacaagtaaactaacaactgtcagatttaaagattattctatacagcatcatgtagtagtggtgttataaaattatcaataggaaaagagaatggtcatctaccactctctcctagctaacttccttatcccttctttcttttcttcctcttgtgtaagtttctttttggggttgttggctgtgtcgttgattacccttggtagagtgtgttttgggtctattttctgctttgggtcataggtttctctggccttttctttgggtttctttttctttagttccttttgttgtcttgtttgtggggtactcctggttgtggggtaggggttggttgagggtttgagggatttggtgaggttggtttgtttggtagcttgtcctttctttgtttgctttcaatggctttagttaatgccaccaactcctctactaatggaaagtgttattcttatgaggaagcttcaatcaagatcagtctgtgtgcctcttctcagtaggctttatccaccttttgtcttcttgggaaagttgtggccccaatggtagttaatgaggccactattattgactttgtggaaaaagtttggaagtttaatgtgactgt

SEQ ID NO: 133342 - DNA, 577 bp, Cannabis sativa
cagcatggatgtagataatgttttccatatgactggaggaactggccatactagctatacaaataattcctctcttcaggtcaagctcaaatcttctctctcaatttttatttttctcaaatatatatttatatatatttacaagattttgtttttgtttatgtttttatgtagaagaaggcatcagatatggtgaaacatataaccctagaaacagtggaagaagtttatctgaaaacaactccaaaagtgttgggaatagctgatctgggctgttcttctggaccaaacaccttatctattatcaaagatatagtagaaactgttcaaacgacaagtcgtatgatgaatatggtttcaccaccacagtttcaagtttacctaaatgatcttccaacaaatgacttcaactccatctttaagtctttaccagatttctcaaaacaattaacacaccatattccttctatcttcataggagcttatcctggctccttctatggaagactctttcccaataactgccttcactttgtctattcttcctatagtttgcactggctctctaaggtaatta

SEQ ID NO: 133343 - DNA, 655 bp, Cannabis sativa
  modified_base (373)..(375): a, c, t, g, unknown or other
  modified_base (518)..(538): a, c, t, g, unknown or other
  modified_base (588)..(599): a, c, t, g, unknown or other
tctaaaaaataccaaacaaactatacaccacaaaaaaaaaatctgaaattaattccatgaaaaatcatgaaaaattgaagaaaatttaaaaaattgcaagttgtacggagctaagaaaatttgaaaaataaggtcaattttttaaaaattgcgttgcataccatccgcgcgctgagctagggatgcacgaccgagaaatctcagtaagagccgcgcccttaccctggcgttcagaaaaaaatggagacacccgactgagaaaactcggacatctccttgtctaaagtgcgcgtgaccgagtgatcactcggatccgcgcgcgtatggggtgtttccacccctatctttattcaaaacttcaaaaaatcataannnattcaaataaaatcaaaattaagttctgtaaaatagtaaattgcttaatttttcccaaactatccaacaaaaataatttcagaatgaaaattcaattatttttcatcaaaaattttaataacatcaatcaatcatcaaataannnnnnnnnnnnnnnnnnnnnatccaaatcacacacaaatcgtttgaagtccaaatttcttgaaagtaaannnnnnnnnnnngctctgagaccagttgttggaattattttaccaggatcttagagatcggaagagcg

SEQ ID NO: 133344 - DNA, 2578 bp, Cannabis sativa
  modified_base (48)..(57): a, c, t, g, unknown or other
  modified_base (2447)..(2449): a, c, t, g, unknown or other
ttttagaattcatattaggatgctaatgaaacatacatggtagtaaannnnnnnnnnggtaaaatatttccaacagttcttccttgacagaacggccttaactgagtaaagatacgcggtctataatggtgtgggacacatccagtttagaattttgtataagactttcaaactagcgaaaatcatgtaggagatgggagtcgattggaatgggaaaaccccattgtggtttatgtattctttgaaatagtcccgaagaggaagggtggcccctgcactgatgtgctcaaggctccacgcccccatactagtctcaccactggtgctagtctcaccattgatccctgggttattacttgcaaatcgcggaggaggatgacagctaaactcaccctcctgtactgatctaaattggcatgattgtccaagtttgcctccacaggtcttcagcatctcgcccgtgtagcctgagattgactgcacctttgattctatcaactcagcctcaaaggtgacattaaggtcctgaggagtctttgatgtacgtggcttgggggcataatctcaaaatccaagttacctggttcaaaagcaatcgtgacattggataaaaacaaaggcttttccataagaataaaggacacgctggatggttccagccaggctgcttctcgcaagaatcggcgtttgccttcggagatttcttgcaagaaacgcctgtagcgactaccaatatattcttattgggttctcactaagtgttccctaaccctagcatcgttcaactctaatttaaatgtgggttttgaaagcttgggtttatacaggatggctgattctattgggaactccaactctaaaacttatggacgataaattcctgaaccagagtgggacattgctgcaagcaaaaagcaggcccaatccctggaaagaatttcatcaaaccagaaggtaatgagttggagatcttaaaacaacctacatattgcctgaaccctagtatgaatctagaaacagtttgaaccctaaaaactaccaaaactagatgagatgacaacgatacaagcaaactaagtaacacatccacacaatgtaacaaacatgagaaggaagaaatcaacttactgtttgaagttagggcttggggcaatgcctggttactccgtctgcaactcttcgaacgaagcaaggatcgctttgagaggatgaagtcgaaaaaactcacagaaaaaaggtcaacggcagagatggcatgcaaatcctcggataaacttaatggtgatccttgacgaagaagtttaagggttttttcagattttctgaaatggagaaaatgatgcaaaggtggttccttttttttactttataccaatgatagtggcctcgctagataagagaaagatttgatcctacagacatgatccaaagtggaagtgaaaaagatggtcatttaattctgatgtacttcgaaaccgctcaaccgccaaaatcagagggtatgcatcttttcaaaaaagaggaacatgatggaaataccctttgtaatcattaaaaagctctttttattaaaaagaactttttaagcggcaattgtttacctaaaattcggtgagcacatcagaggaaagcacgtgtcgagctgggaagaatgaagagctcaaacacacaatcgtaagtacacttggcattgaacaactcgttagaaacgtgattagcagagtatgtttataactcggttggctgaatagtcttccgtgagacaagaatgtacaaactacaactcatgtatcgacgagaaaccatgtgagtataagtgtgcatgacgaggcttcaaactcgttgcgtgaaagagaaacaaaacttagcatatattgtatgatatacaaactaagtaaaacagagtttggtgaatcaagataacagacagcaagacgtctatctccctggaagatggcatgcatgcgaagaaggtcatctcgacaccagagaatatagatatcagagttaaaacaatattaatctcgggaagttagatgacaagcaactgctcgccatcaaagttaactcagctccattcccagagaggcatccccatgagataaggcttaccgtatatccttaattatgcgttcatctcggcccaataaaagcgggatactcacacctgtgtgaattctaaatgaaactgcatttacatagtgtgatttttaatcaaattccatgatttgagggaataattactgtaaagattacggtcaacttttgtaatttactgcccactatgtaattataaatagtggtagaaaagataaagaaggggacggatacaggagagttcttaaaaaaacaacaataaaaaatctgaataacattgactcgtggactatgcagaattttaactacaaaaccacgtaaaaaaaccttgtgttcatatattatttttnnntagcttttattttttctgtgtgaggtcaataaagtgaggctcaattttagttaacaaaaatctgcgttaacagatgattttagaaataccagagtattttagggtactcgaagttggtcaaatacctta

SEQ ID NO: 133345 - DNA, 1391 bp, Cannabis sativa
  modified_base (1049)..(1049): a, c, t, g, unknown or other
gtataaagtttaccccacacatagagatgtatttttgtggctgtagggattagactaagattgaggtgtatttagggtatgtttttgagtatgttggggattgttttaagtggtttctatggctgcttgaattgagtatggtttgatgaagccaaagttgagttttcttcacttcaatgtgtgatttttattcaattattgaattgttgtgttttgaagcttgagatatgttgtattatagttattatactattttgaaaagtttggttaggtttggaggagttttgggtcaaaattgaaggagagaacccaagaaattctggtctaccaaaaccaatcgactgaatggttctggtgcaccagaactgccagaacggtcgaccggttgccctacagggagaattctcgagttttcttcaggttcagtttttggccccaagagttaagtagcatttgttttaggttgtttatgggatgcttgacctattttggagttgttgagagttatgttattcttggttttgagttaggattttattttagaattttggattacggtattcattaagtttcaattgtcgtgacataggaccgggatcgcccagcttgttttccactcaggttggcccgcacgcttgagttctgaattgaggtaagaaaagtggtaagcacggtatgtggctaaatgttagcggttgaatggttatagtcttgattattatcaagattgtgattaaatgtttgttgagcctcggttatgacctagggttggaaacgattattaccgttatgagtaattactcctgaaactgtggataggtttcttacttatcatttgcttcatcgggcgacaatagtaacatattcaactcgtggttaacgagtggtaaaggcgtactttgggtactttataaagtactaggattgtgtgtttatgatattgtgtaaatgtgtatgcatgttaatttgagattgaattgctgaacattattggttattgttttattcacttttcttgctgagtctttgtgactcacgggtgctttatngtgcaggtaaagggaaggcaaaggttgagcagccatgagttcgaggtcgtagcagcaatgtacatatcagtcaagtggcacggcccagtgaacaggatgctctttttgaatgtattttgggaatgcaaagtttatgttgtaaaagcactattaaaccagtttgataatattttgaaaatagggggaccccgtaattaatattacttttcttttgttacaaagaagttttatatatctgattttaattatcaaaatttaattacctacacttttggtataattatatagtatataaataagaatttacaaaagcacacacgtggcgtccctgttggacagggc

SEQ ID NO: 133346 - DNA, 1244 bp, Cannabis sativa
ttttgaaaattttcgaatactagaaataggtttgaagttgttgaacacgcttggtacttgtaaactattttacattttttaaaaatttacaagaatgatatagtaaatatatataatgaatacaactatgaaaaaaaaaattattctgacttgtgatttcgggtgtaaagattgattaaaagattgtaataaaaaatttaacactcctcttaataatatacctttgaattgccttagtgaagaattttaaatcagtgaatagagagcctttcatatcaaaaaaatcatcagcaaccgttactattatagcaccctttgtaatcatcaatcgaattggagaatcataaggcaaataacagcaagcacaagctactgcaaaataattgtatgtacttttttctctaccaaatcccatttcactaagtccccattctttagaccacctataaaaaatacacaaatacatataaatatatttaattttaattttttaagaaaatatatatatagcaacaaaataaatattattgtatatataacaatatttatgtatttcaatgtggtgattatataccttgttaactgttcaagttcagtcttgtaaatatactgtttgaactcgtagtttaaagtggctagacgaattaatttatcattgtaaaactttgataacctgttaaattaaataaaatgttaaaaaatataaatataatttcgatggacttctttataattttgttgaaaagattaaaagttattatgacctacttaactttcttttttcccacttttgtaaaatgcaataattttgaaaattattattattgttgttgttgttgttgttgttgttatatatctacaattgtatctattgaccctttcaaaattaattaaaaaaatatatatgattaatctccattttttaaattaacattaaccatttaataaactttcttcatattaatatatatatttaaatataattatacctttgtgaagatgtctttcccatccataaagctttattagtttgttcgataaaaaacctatgttcgaggtgatctagtcgagccatccatggaagacttaactcatgctcaatctaattaatataattaaatacataacaataaaattacaaattaatatatctttatatattaaaagtgccacggaaattcttggtttaattcttggattaacttaacagaccgttaacgttaacaaataaataaacccaataa

SEQ ID NO: 133347 - DNA, 1231 bp, Cannabis sativa
gaattgggacctgggcaacggagctaggactgggacccaagacttgagcccagacccggacttgaacctaggacccaactcgtgacccggcaccaaaaatggaaccagaccagaacgcgagatcagggtctggatcaggacccggggcttggactgaacccgttgtcggtgtttggatctgggacccagccccaaacccaaacctagagcaagaagcaaacccggaccaggacttgaactcattcccaaacccaaaccttgatccaaagccataccctgtgacctgaaattggaacaaaaatcagaagtagaccgagacccgggaccgggaccggaaccaggacttggaactggacctagacccgaaactgtaaccggacaaggacccagttttctacccagacctagatccgaactgggacgcggacctgaatcttaatcaagacctagactcggtgccgaaccttgacccaaacatggaaccagactcgggacacagaattggggccgagacctagaagtgcaccctagtcacggtccggaacgcaaacttagacatgggacccaagacctgaaccagaaccagaaccagaccgagacacgtgatagggatctagatctgggactcaaaccaggaccctaacccaaactaggaccaaaacttggaccctaaccaagacctgagacttgcaactggaacctgaataagaacttccaaacgagaatactcgaacaagactaggaccatgatcacgaccaaaacctagaccttgaaccaaactcggacctagccccagacccaaatcgagaccggaactctggcccaggcacggtcatatacacagatcaggaccaagacacggacccaaacttggacccagacctagacctaggactttatctaagacccagacatgggcccagactcggactcacatcgggattaaaactcgggacctagatttggaccgagaccctgacccagacctagacttggacccacacccgggatctgaactcaaacctagacccgaacgcagacttagaccaggatcagaacctggacccaaacccagacccagactcggaccaggacttcgactaaaacccagacccggacaataacccgaaccgagacactgaatcgaaatcaaaattgggactaggacccaaacccaaacatggacccaaatcgggacctaggacgcggacctggattggggacttagac

SEQ ID NO: 133348 - DNA, 674 bp, Cannabis sativa
  modified_base (626)..(632): a, c, t, g, unknown or other
aagtgacatttcttgtagtgtaattcataattgttacctgtgaaagctccacattttgtgtatccacggccacctccatgaggtgtggaaacatgttgctttgatttggatagttctggtaagcaatattgacttcaaaggattgatcaaaatcaaccaaggcaagattaacactcagatcagaatcttgatcaagatcagtcttctattcgattgttagaagagatgatgaaagtgtaatactcactgggtaaacctttgaagattatagcaatatgatccctgggacttagaatttctccaacagacgcaagaagatcaaatcattgagagacattgatcctttttgaagcttctgtaacttggtttgaaactccaagatattggaagaaacctgcaacgtaaagtgtttttcaagagcattccagatctgtcgtgctgtattacaccccactatgcgtgtaagaagactttcagtcatcgatgagaatagccaagacaccagaagttgatcctagacttcccaatccagaaattctagaatgaatgtattcgaagcttgatctgttggaatttattttaccaagatcttagatctactcatatgttgtttaacatcctaaatnnnnnnnttctaaaacgataataaacacataaagtttagaaaaccttac

SEQ ID NO: 133349 - DNA, 1992 bp, Cannabis sativa
gagagcaatcgataaataaacacatgaatttctcagattgataatatttttgtgatattaatgggatttgttttatttttgttttttattatatataaataaaaagtcattcatgaatttctcataaaccaagaattcagttttatagacacattttatgtagaatagatatattattgctaagcagaaaacataatgtaaattagaaaaccatatgaaccaaaacgtcataattaatcaagctccaataatgatcagacactttttctatcttcagtgtctttttcttaatttaaagaaactaaaagcacctaaaggaacaaagtgaaaccatgtaaacaaagaaaaacttctaactattactattatatatttaattaaagaggtcaacctatataaaattataaaaatcagtaacgaaatttggagcacaactatttgttggttattctcaagtcaattttcattcatatatttatgtaaggaattattggaaaaagttgactttgtaaactaattttgtttgaatgaaaagttagtggattttaatcccacatcaattttgaagtaaaaattagcaaaattaaacgctataaataatgtcctttagctttgattttaattacacaaaataaatccttaaaatgaagttaatcccccaaataaaatttcatttcttacaatgctttataaaatcctttttataggtagatagaaattaaatggattgtatattatgtacatcaacaaatcaaatcaagcactaataacaggtgccaaaaatttgaccctgattagttgagtacaaatttcgactaaaagttggaaatttcagctgtaaagaacccgtctcatctagttgttgtcatcactcccataattttgacacaaagactgcaatacgctgtcactgtaccagttgggtttcttcttctccggttttgacttctttactataattgttgaagacttggtaacaagtctaattggagcctccgattttgacttcttcactataattgttgaagacttggtaacaagtaaaaattggcaaaattaaacgctataaataatgtcctttaggttttgattttaattacacaaaataaatccttaaaataaagttaatcccccaattaaaatttcatttcttacaatgctgtataaaatcctttttataggtagatagaaattaaaggggttgtatattatgtacatgacattggtatttaacaaatcaaatcaagcaataataacaggtgccaaaaatttgaccctgattacttgactacaaatttcgactaaaagttggaaatttcagctgcaaagaacccatctcatctagtcgttgtcatcactcccataattttgacacaaagactgcagtacgctgccactacaccagtcgagtttcttctcctcccggttttgacttgaagacttggtaacaagtctaattggagcctcgagatcttttcgttttcctacaaataacaaacaacacatttcacaattcaaattggtattattatttattattgtatggatagcaaaaacatggtctatggtttgttttctaaaagtctaaagaaataagaaaaatcttgcaaaattcaagaattaattaattagctctggaaactccattggaaaccagaatgacactcgaagcctcaatactgctagttggaggacgaattagaccgttaacattgttgtttctttccttgccaaacatagggttagggttaaggaacacaaggactaaaattcgaacaacaaaccaactcatcttagtaatgcacaatgtatatatagctaagtagatttttacccaaaacttaacttatataattattaatgtatcaattattctaacaaatattattcgtaatgactataaggtctaactttttattttagtaatgcactgttaagtaaaaatttcacatttagaatattaaaaataaatgcaaaatacaatttcaccta

SEQ ID NO: 133350 - DNA, 563 bp, Cannabis sativa
tagttgcttaacataaaatattttatataatttttatttaaaataacaataataataataacaaatgatattatactatttaaaaagtatatttttttaacaaaaattattatgttatttattataatatttttttttttgacattataatacaaattggaattagcttatttttagtacctagtaatttaattaaaataaatatattttcaaaataaaatatcaaattaaatcctactaaatgagtatgagtaatactacaggcacaaaagttgcacatatttttaacatataaataattatttaatttctaccatagataattatatattagataattgagattaattattctatgtagataatgtgtgaaatttgagtgtcacaatcattatttattcattgagtacatgttcaatttttttatgttatataggtgattaatataagaatattttatgtatggaaataaattttttatttaaggaaatgattttctatttaaagaaataaaataaataattgattttctaataaatgaatattttatattcattgagtct

SEQ ID NO: 133351 - DNA, 763 bp, Cannabis sativa
attgtaagggcacaaaacccaacagtctagccatagatggcaagctaaaagactaagagagagtgtctttttcttgagacaagataaactcttggatgaaagtggctgcccgagtctctgtgtctgcaacaggaaaggttttagagttaaaaatagcattattctggtcattccatataacccaccgaatggcaatgaggagggataggtcttctttgttgaaagtatcaaaccctgttagaataaaatctttaatgtcacagggaaagtttgaattgtaaaatccagattaaatagatgtttgccaaaaggaagcaactctagaacactaagagagcatctgtgaccgtatccaactagttaagacaaacagagcaataaggggtatccagaactttgcgtttttgaagattataggagttttgtatggaatatgagttttgtattctttgaccaggatccacttggactattctaagaactctttataataactaaacactttttcatcaaaaaaaccacaaccacagtaatatatttatggcatttgcatcttgttcatagtagttttgacaatatcattctctgcaaagagtcaatatgccaatatccacttgaaagtaaaatcatcgatattcaaaaatatggatgtacattcaggggtggatatgagtaatctttggattctttagacgatcactctagattttacctagtgcaaagaaatttaaaatgtttatgaaatttcatgaatttctagcaa

SEQ ID NO: 133352 - DNA, 549 bp, Cannabis sativa
  modified_base (37)..(54): a, c, t, g, unknown or other
  modified_base (100)..(101): a, c, t, g, unknown or other
tgcacccaatggaaggtttctcatactttatatgtgnnnnnnnnnnnnnnnnnntagaagttcatatttagggtgtttgtgagtagatctaagatcctgnnaaaataatttccaacacatacttcatgttgcacttactgccatggcttaccacatttggagggtccgaaatgatgttctttagaatcaaaaagtgtggtgtattcggcatattgtacagaaaattaagagagatttgcaatatagaatttatcatgtaatgccaaaaaaggctaaggctatagatagagaatggtttatggaaagatgtacaaaatagaaatgcaagaggaataggtgaaaagcaattgtttgagttgaaattgatgtatgtaattggtgattgagcaatacaatgatccttattcatcaaaaattatatttatcttattttaataaactttttaaatttaatttaaacatagtatattttaacttgaaatataaataatatattttttatttttcttaatctatttaatatactagaaattaacaataataattata

SEQ ID NO: 133353 - DNA, 551 bp, Cannabis sativa
  modified_base (71)..(71): a, c, t, g, unknown or other
aaaatacagtaaaaaaagtaaaaaataccgcctggcagtatttttgtaaaaaaaaatgacaaaagttagtntaccatgtaaatttcccaaaaataaacttagtatgtatttgcaactgagagttaaacttagttatttataccgcaaattactctaaatataattggtttctaagtctcagattgtccaactccaacgtccaacactggtgataactctgatgtctaactccaaaaaattttcagtaatgacgacaattccatatagtaaactagaatacaaagcatatgaaatttatatgagttttggtacgggtttcttcattaagaaataatttatttcttagttttgatttcatagaagtaactggttgtttaattcattgtcttaacaaaattatatatttaactggttttttcaccaagaaactaattttttatcaagaaactagatttcatcatcacgaaactagttttgattacatagagaagtaaaatttatatatgagtttttaagttttttatggtatttctttctttttcttttttttt

SEQ ID NO: 133354 - DNA, 620 bp, Cannabis sativa
  modified_base (66)..(66): a, c, t, g, unknown or other
  modified_base (93)..(98): a, c, t, g, unknown or other
ttaacgggagatcaaacctaatcgttaaatttaacagaatattttttttatttttaagtatattcngttaaaccaagaaatgccgttagatannnnnntttaatatataaagatatatatccatttcatatatatttgaacctcatattaacaactgttaattattcaaaaaaaaaaattaaaccaaaaagctcaatcatacattttttatatttttaaaggagaaatcagcaaaaatacagcaaacaaaggattagaattacgcccattaaaccaaagtgttatctaactctagtgacatttgggctaaattatgggttgctgtactccttagctagcttgtgagaatgggataaggacacagttgagaaggtaggcatcacctcttgcagggagtctataagcgcgccatacttagaaaaaatattgtcgtgtgcttgtaagtctctgactaagttcaaagcagactatttttacttggtgtattattatttgggggtctttacaccaagttaagggaaacttacaaaaatactaaaatttgggttaacttttacaaaaatactgccacacggaaattttttcaaaaatactgtgtttttataaaacaccagtaaaac

SEQ ID NO: 133355 - DNA, 1320 bp, Cannabis sativa
tatcatgtcaacaaaagtataatagaaaatagaacttaaatattattttaaaaaataatataccgtataacaaaaaatacatatatcatttaccagaacataaatagtaacaataataaaaaaaattatatattactaatatatattatactaactaaattatatactacaattaaaatatatatatatatactatgacaataaaactatatatcaccattatatataataaaatagataaataaataatatatcatacaagtaaaatatataaatataattgttatacccaaaattcggctacacttcagaaagtgacacgtgtcaattagtggaatatgaaccacctaatataacaacgttatgtcattcaatgcaaaaaaagaataactcatcaaatataaaattaatagagcatattcataactcgctgaccgtatagtctcaagcgagacaagaataaaaaactaaaatatttatatttgacaagacaccatcctgccccgaagtacgcaggcccaataacaagattcatttattttaaaagaataagtgaagtaattcgaatcaaccacgaacaatatacaacgaggcatctacctcgccataaataagagaatattgacgaggcgaatcaatttttaaaacacttagcgtattttctacattataataactaagtgtatcaacttagaaatatgcaagacatgattgtccagtctgcgaggccttatagtcaaagagcagttcttaagtttgctcagtacactggtactcatgtcattgctagaaggcatatgatcaatcaagtcagcattgatcatctataggcaaagcgagataccgctgttcaaattagcatcaaccgtttgtaaagataagaatgataagcagttatgcggttatcaattgttattcacacgttgttaaatgaaacgtgatcaattttcgcgtttcattaaatagttatgtaattcaaatttaaatgtaaataactgtcaacctatattcctataaatatgagtagattctacaaaaaacagtgacagaaaatctttgacaaaaagattattaattgtatattgtaataaatacttagaaatatcttgaataagatagactcgtagagtatgtgaatttaactgcaaaaccacgcaaaatgcttggtgttattattatatttattatactttatttattttcataatatctgtgttaattttatcacgaaaaagactcattattagttaacaaaaatctgcgttaacaataataattaaatatatgtagcatgccaaaaaattatatacatatattaaa

SEQ ID NO: 133356 - DNA, 586 bp, Cannabis sativa
ttgccaattgccatgggccaagctagccagtaaagtaagtagcataacatggcaccaaaagaggtgaaggtgacgtgacatttatatttatatataaatataaaaaatagaaaataaataaataaataaaaaagaatagcagcttctacacattgcgatttatagcagcagcaagcagtggtagttctattaacttttgcccatgcttttgggtaagtaggagtagtgggaaatgaactatgtaatatgacactattgtatatcagtcttcaagagtgacattattgatgagagagatttatttttttgacttttaatttcacgtaattcacaaaggggttaatcaattatatattggattaacccaaatgtgctttctagatctctttatgattttggtgtgaaaaaaaaaaatctctttatgatttatcatgtgatgatgagtgttggattaaattgagaattggtatttatgtcattacccgtaattaaaaagaaaatataaagtgtagttagtggagtttgaacctttaccctttaacctatttaccaactaccttaaccattacaccaaagttactattat

SEQ ID NO: 133357 - DNA, 686 bp, Cannabis sativa
agaacaactaccgccaaacccgcatagccgtccttccaagaggcatcaacaaagagtataaactctgaactctcgttgagtctctgctcattagccaacaacccagtcttctcaataggagaactcagcttattgcaatttgtaagtccaagctcatgtcccttagctcctggagaactaggtgcacttgaggctttcctcctttaaatctgaccctgtttctccacttccaaatcaactgaaacacgcaaccagcatagctaacaatctcacttctcgaaaaaccagagagagaactgatcaatacctccaggaattgcatcagattagtgcacgacaacaattcaaccaccactggaaatgggccattgaaccaaattggtttggcaaacgcacactcttcgaacaaatgtatgcagtcctcattctcattgtcacagaaacaacaaccgaattttgaaaaggctgcaagtctattaccagttggtaaggcctcactaatactcatccacaacataactgaaatccggggatacaaccctgtctcccatatccatttccaaatgagtggactataactcaataggccaattatagttatataggtgctctcatgtgcctttaaaataattaatatttattaaccatcccattgtggatgttgacaaatattagacacatggtta

SEQ ID NO: 133358 - DNA, 684 bp, Cannabis sativa
ttttcctttcttttgtccaagtcatgaaacaatcaaattgccaactaatagacaaaactttcagcaaactattttaagtaacagcaaaaatacctgctgaagagaagctgcttttgctctgaaagatgcctccagaaattcagcctcttttttaagttttcttattttctcaagatcagaacaagcagcttttaaatgttctcttccagagttagaacttgaaacatgcaaatcttgaagcaacttttcaagccttgtgagagcttcttcaacacttgccaatgcctgagaccaaatgcaaataacactgcattatcagaaccgctagcaaatttcaaatgaaatggctcagcaacaattttgaaaagcatcagaagataagtaaatgtttccaaattagatgagaagaacaacaaagtccacgaaaaaaaaaacctaaatatacccaaggagttagatagttacacacaaacttacaatcatacaatatcagagcaccttcttgttttgaaaattttacaacaaaatttcaataactctggatgacaaacatggtagaccaaaacatcgtgattctgtatgagtatatactccgcacattagtgaattacaaaagatttattttttgaaactagatccctacctaacactacaatatttggggactaggaaactatagcaatt

SEQ ID NO: 133359 - DNA, 781 bp, Cannabis sativa
tcaagttgtgtgttaggtcaagcacatttttttgccaagaaacttttctcttttattatttcctccattgtcaatgtattggaagatgacattttggttccttttgttgcaaagtttactttaattgaatttagtgttgtactttcttccaaaaatcatatgtacacatatatgccaaaattaattaatgctttcgctttgtgtaaattgttttgaactttcaataatttcttgaccatgtgttcaaaacttttagattatataaggtttgaacatgaatatacacatggccacatgggtaggatcatatttcaccaaagaaaatgaaagaaattatgcctactttcattcaaagataattatgtggttctttaatcttgaaattgtaacatccataaagcaaaaaaaaaaaaaaaaaaaaatctactacatatggatatatttgatgtcaatcatgtcaaattttcttttagggttggtacgtagaactgaactgaagtaaacagactaatttgtccagtccaatatttgagaatgttggaaatctggataattaatccaattaatctcatctgtatgggattatttatcccatccagcaggatgatataaataatctcatacaaataatttttttttttatcatttcatttttttttttaaattttgattttgtcaatatattttaaatttaatatgaatttaaataaaataattattacaaatttatttatagatttttttatcaaaaacttattcattaaaattagtgaaaatgtat

SEQ ID NO: 133360 - DNA, 824 bp, Cannabis sativa
  modified_base (93)..(94): a, c, t, g, unknown or other
ttaatgggatttcttttatttttattttattatatataaataaaaagtgacctataaatttctcataaatcaagaattctgttatataggcannctttatatagaatagatattgatattgttttttttttttttcagaaacgtgattgatatagtttttgatattttaagtgattatatgcaagaattttttttttattttttttatatattttagatgatcttaatttggaagattattaatttaaaaaaaattccaaaaacgttattgatgtggttttaaaatttaagtatgcatgacttttttcttttaatttattattgttctttctataatttggaagattttaatttaaaaaattagaaaataaaaatgtaaaggttaatagttctatattatattatgtaatttttttaaaaaaaatattaataatagtatgaaaaaaatagaaaagaaatatgagattaattaactaattaaaagattaaaaaattgagagaattaaggagaaaaaaaaaaaaagaaaaatgactttcaagtaattgtagagtgtcatgtcaccgcttcatacttctctttcaaaaaaaattattaataatagtattaaaaaattagaaaagaaatatgagattaataaactaattaaaaaattaaaaaattgagagaattaaggagaaaaaagaaaaatgactttcaagtaattgtagagtgtcatgtcaccgtctcatacttctcgtttatatgtatatattatactagcaaaaattacgtgccaggcacgtatactaaattttatgttagtttttttctatgttatttgaaa

SEQ ID NO: 133361 - DNA, 1101 bp, Cannabis sativa
tatactgccataaaggcagggttttgaggggaaaggtcaagtgtgaccttggttttttgactgttggggtgttggtgtaggggcattttcggaatgcttttatttcctacaagaagttaagtttttaagttagtcaggacttaataaccttaacaaactctcctctaatcgagatctccatgttagctcaagtataggtgcttccgaaagcgtgtatgagggcttccaaaatcacggaccaaagcactcgcaggaggagcttctcgaatagagccagctggagtcgactatctggaactcctttttaggaagagccatccggaactcctttttggagaaaggttagatttcttgaggacccttcttggaaggacaagaaagccttccaggatctaattttgctagtcaataactttccaggaataatttttagagacttttttatttgggggaattattccacaaatgagatagggagtgtatatataattttgaagtaataagtgaaatttatctttttttgttgcacttgaagtttattatttttctcaatacttcatatgtaatagaatgaaacgaacattgttagtaatacttcataatgcaagtgaataacaagaaaaataaataatgaaaatgtgtatacgtatgatcattatctcaatttttatagtaatataataatatatatacatgaaggaataatagaataagatattataaaaattaaataatgaaatataagttaatgtgtaaagacatcttcataatactatgaaagtgtgtcttactagacaataatataatttgttcattttttattagttttaaaaatatttataaatatttgaaattaaatatgtgatctgattagagatattttagtctgattatttacataatttttgttaataaaataaaaaataaaagattgtggaacttattaggtgggttgagaggaatgaaaaggtagaaattaaaatgagaatgagaatatgaataaaaatagaatgaaataaaatttaaaatatatataaaataaattaataaaaaaattattaatttttttttatattacattaaaatggttttttttttttt

SEQ ID NO: 133362 - DNA, 1173 bp, Cannabis sativa
acggtctttttatgttgtactcttgttgattttttgttatctgtatgttattttttgttgtttttttttttttgatgaagtgaggggtgttcaagaacaccctttcattaaaaggcaaaagcttgccgagttcaaaacaaacaacagggaaagtacaaacagaggaaaaaaaaaagcagcaaataggaaaactccccaaccaaacaaagaacagagtaaaaaaccagaaaaaattacaaagggattacaggagcccgggtcccaatcattgaagtcatccaacacatttccatggatatcttcaattccaattctctcggttttttgatgcatcattgcccactttgcaatgttgtgcgccatgtagttgcacaaacgacaaatgtgcgcgatttccatggatattttttgttgttattttcatgttactttaatgtagttttcttgttgttttcatgttatttctatagaaaatcgtaaaaatgtaaaaaaaaaattcaaacgtaaaattgtaatttttttttacaaaaaatagtaccttatgtaattattcctttaaatttagttgaaaaaacaacctctaaagactcacattgtagtaatttgtaggaccaaaccacaaatgatttaggaccgactcaagggtgggacaacttcgacccatgtccaaggctcaacaaattttttaatataaaagcctacaatttgatctttaaatatgttatattttgtatttttactattatattttgttaaaaaatataggaaaattcttcaatagacactccttttatgggctcactagtgtgtccaatatcacaaaatataattggtgacagctattaaatgaaagatttttgtggtaaggcttgttgtagagaatcaaaccttagtaaaattgggtccacctatacaacctttaaattattatttgattggccatataactctaatacacagtaaataatatccctaaaaataacaatccatctctctctcttcatcttcttcactctcttcttcttcactccaagttttcgccgacggttcctccctcctccctctgttccgacaccctctctccttctccctcagttccggcaccaccgacgactccctttcccctcaaccccacagtccaacgggagattccctctccaaccctcagtccct

SEQ ID NO: 133363 - DNA, 538 bp, Cannabis sativa
ttaaaaataattaatgggtccaatttggctcctattaaagtgggttctaattctagaaatattagttttttttttcattgaagggttcctccctatgttcaaattggcttatacaatattgatcattattatataattgcgaatacgaattagattagagcatttggtgtgcttaattaaccatcaaggcatcaacaagtgatcttcccaactcttctatattcataaattattatttatgaaaaaaaaagaatattcataaaatatcaaaggcggacccaaaaacaatattatataaacatatacatagttacattaattgtacgtatataatattgttttagtgttttactccagccctacttgaataaaatcctgggtccactagtacgtaagattattgtttaatatattttagccatgaaaaaggagaaagcaaagtgtaattttaaaataataatatgcaagaatgcaaccagtgacgaagctagaaatttagttgagtgagggcttgaataaatattaagtcaaaactaat

SEQ ID NO: 133364 - DNA, 1512 bp, Cannabis sativa
ctttagagtatctttgagtgtctttttgactgctttgacttgaccatttgcttggggatgtgccactgcagagaaactttttatgatcccatgattttgcacaaaaattagtgaaggaccgactgtcaaactatttgccattgtccgagactatcttgcacggtaattcgaatcgaaaaattatgattttcataatgaagtcttgcactttcttagaggtaatggtggacaacaactcagcttccatccatttggtaaagtaatcaactgcaaccactgtgcactatactccgcctttgcccttgggcaactgtccgatcaagtcgattccccaaatgtcgaaaggccaaggactttgcatttgagttagtttgttgggtggtgcacaaggtatctttgaaaatctctagaatttatcacatttcttaacgtaggccttggagtcttcaatcctggtcggtcagaaataaccttggcttagaattttcttggataaactctgcccagccgcatggttgccgcagaatccatcatgtacctcggacagaagtcatgccgcttcttcttgtgtaacacatttgagtagtggcatggagaatcctcctctatacataactccctctacaatgatgtaccgtatggcctttctcctcatttttcgagcttcgtttctatcatttgggagctccccagtattgaggtaggctgctattggcatcatccagtttggggatgtgtcaatcatttcaatctcctccgtgccaccgatactaggttttttaaggaattggatggggatcagattagccttatcatttatgttgctgctcgcaagtcgggctagtgcatctgcagttgtgttttcttcccttagaattttcttgagagcatagcttttgaattgtatgagcagatcgtgtattttgcttagataggctatcatttttcccccgagcctcgtactccccagacacatgatttaccactaactgtgagtcactacagatcttaatgtgttcggcgtgcaattcccgagcaagttttaggccggcaataaggacttcatatttggcttcattgttggatgctttaaacccgaatttgactgctccgtgcagatgttgccccctaggtatgacaagggcaatccctacgccaaacagttgatctgtagccgacccatctacatggagtttccaggttggttcgtctttgctgttgctcagctgaggttcctgtattggctccaggttttttttttaaattgctctcttctttgcccgtacacttaactacaaaatttgctaaagtctgccccttaatcgttgtttggggctgaaatatgatttcatactagcccaactccaccgcccatttaagcaaccgtccagaggcatcaggtttttgcaatacttgatgtagtggttggtcggtgtacacttgaacaggatgagcttgaaagtaaggtcttagctttcttgttgctaggatgaggcagtaggcgagcttttc

SEQ ID NO: 133365 - DNA, 685 bp, Cannabis sativa
ggtagcgaatttcgcgaaaaccgacgcctaaagggcttaaaaaccgcctctaaagggtgtttttgtagtagtgaactaataaaaataatataatatactatgattaaaaaattgtttaggtaaatttaaaagtattttgttcttaaaattttccaaatttagattcttattttaaatataataaaaaaaaaaatgaaaattgaacataggcaccaagaatttaaagtaagggggcctaatttttgtttgtaagactagaataaaagtaaattaaaaagaaaaaaaaatactctgagaattgaatcctttaattacctctattttatatgctatctagataatcattatactaaaaataatattatttataatattattttttattataagtatatattgtaactaattaaaatacatatataattttgggtgattttacaatgcaccatcttaaaagggatgtactgatgcaccttctacttgtttcggtatctagaaaaaaattttagtctaatttttttttcatattcatatacgttatagctatttaagatattctacaaaattttaagaaattcagaataatttacaatgtagaaaaaaaatttcaatcagtctattttacaagcgtataaaataaaatagtcacgcgtgcaatacactgtttgaacgcaatttttggtgt

SEQ ID NO: 133366 - DNA, 709 bp, Cannabis sativa
gtaagcattcatcaaccaagttaatagccgaaaattgtgcaaaagtataaaagatagaagatgatgaactagaatgaaaaccttttggagcaaaaatgaagaacgagccttgtatttctatttcttaatgcatgattacaccaaaatttgaacccttttccaaatagaaggggtaaatataggtgagctttaatagcactatgtacaacatggtctccaccatatcaccttaaaaatcaagtgtcagggtagtgatttttttttgttagatataaaggtagtggttgtatctgtggacgatgaaaactcatcaaccacattattaccggaaaatcaacacttagatgctacacctaggattaagatggagatatggaagtatgaaaacttaaagaaaaatgtagagtagctatggagaaagatagaagtgtatatttctttaagtcaagtgtatgattttccaatctcttgtcacatttgagaaaggggtatttatagactctaatggtctaggatgcattggtggtcccaagggacatggtgacatcaatgttttgaaggcggtgggttgcaaatagtggtctagtgccttgtacctgtgtctcgttttaggtggtcccgaattgtaggagtagtggttcttgtacatccttggttgggatgtcaggccttgcaagtgtggtgacttcgctacttgtacctttttgcc

SEQ ID NO: 133367 - DNA, 904 bp, Cannabis sativa
  modified_base (864)..(867): a, c, t, g, unknown or other
tttttaaaaaaagaacagtttcttaaaaaaacataaagaaaaaaaatacaatacaaaaagaaaaatttatcaaaaatagtaacaactttaaaaaaaaaaatagtttcaatgtgataataaattatagtaaagattaattacatataaaaattaaaagaaactaataattttgttaatataaacaataataaaggatttacctctctatcagaagcaccaaacaaatcggctgtgtccatcttttcatgatttttggagtctatcttttcaatcatcccactcaacttaggcaaattcccagaaaaactcatctctcaagattgccatctcattacaaatgcatacttgagaatcttttataaatgataaacttctggaaatattctcaaacttcttctcaaaatcctccagatgaaacaaaaaatattaaaaaaaagaatatgaaatcttagcaaaacaatttgtaaaaaaaatgtttaaaaaccggtttcttaccttctcatcatccacacacataagaagatacacgggttgaaacttaaaattcttcaaaagacgataacgtctctcagcatcagtaagtcaaaaatcatttataatgacctgttacaaaaaaaaacagtttcaatactataaaacaagccaaataagaaaatcaaatagcaaaacttgttacaaacactattatacctcagggttattgaaaaccttttcgagtaaagtcacaaaaccaggaacatcgaaactttgtcgattaagtattcgacgaaactcaaaaccttttgtcacacaatattcaggggacaagctaggaataatctcataaagccaaacatgtaataccctaactaacataggcgtatnnnntgatttttaaacatgctgtgcaactcgttgctaatca

SEQ ID NO: 133368 - DNA, 506 bp, Cannabis sativa
aaagaagtcttttattgtctttatcttaaatggttttaaacagattagctagtatgacgtctcgggaaatcggggcattacaaactgtacgctggatgtcccaaggttcgagattgaagacttgaccttctttgcgctaggacctagaatagcctttaatcccttgcgcttagacttgacgggagtcccttttgggggaaagacaagcccatcaaaattgtcatcagaaccccctgtgtttggtgcggtgtttgagattattccttctgggaggggaatgccctataaagcctgctcccctagagtagcaagggcttcagaggccttccgagaggtgacaaattccttctccctgccaactgcaatagagttgtaggtctagtcttggtgggaggaggaatctgttggaattaattttaccaggatcttagcgtttggttgggaggaatgaaaatataggaatgggaatgggaatgggaataagaataggaatggaatggaataaa

SEQ ID NO: 133369 - DNA, 908 bp, Cannabis sativa
agttattttctaaacaaaatagaaaaaattcataaaattttaaaaatagaataaaaaaaaatctaagatgccacctaaacttattttgtgctttactttatattatatatgaataatattttttaacaaagtaatttaaaattctatatacatatattaatagtataaaatttaaaattttaataaataactctaaataataattcatgaaattaaataatgtaattttattattattactaattagcattatttttgaatgattatttttatattaataaatattttttttattataatattaaaaataattatattagctacgcaaaccttccattgaactgtgtggccgatctcctcacagattctagctcatgggacatttcaaagctaaaaaggttgttcgataatgacacggtctctactattttgaaagggggtaatccttcgggctaggacgtggatagatggggttggatcctagagtctaatgagaggtttacgagtaaatctgcttaccttgcgcaagctctagaaagagccagccattgtgaggtggccccttcgctatggaataaactatggaatagtaaagttctagaacgacataagattctttggtggtgcatcctctctaaggcactccctgtcagagcaatcgttggcagaagatttcaaatagaggataccagatgtcttctatgtggtagggggaggaatctgttgaacacctttttcttacgtgtgatgtggcgttacacatttggcgctcctctccttggggcatatatcccgtttgtggcactgggattcgtgtttgggactgggtgaaatttctgtggagtcttaaaaacaagggtatccgagaggaggaggtttttctttatgcttcgattgcagttgatacc

SEQ ID NO: 133370 - DNA, 941 bp, Cannabis sativa
ccccttaattgcttcttttagaggactaatacttaccttactcgtactgcaagtaaactaaggttgttattaacagtcttctttctctttaaaagtagttcaaattttattacacgttgtgttaaacaggtagttttttcaacgtaccccggcctgaaggtcctcttgaataacatcaacacaccagagccttcttgtctgaacttcgttgcatcaagtatttcagtgcagttcttaacaaggtccctcaggactcatacccatgagtccctcggtcccggcccgaaggtcctcttgaataacatcaagctctttttattttttggcttactattcccgaatcacaagtgacttttttgactttggctcttggatcaatttttcttttttttgaatttttggtggctcatttttttggctctacttagatcagtttttttttgggtcggatagtcatgagtttttttttttttgttctgataccatgttagaatttaggaaaaagatgaatgaggttctatctcaaaaccaattggcaatgagaggattagtccattcctcttatatatttcattatctttccaaacattagcgatgtgggactatctaacaagatggactatagatatcgtgaataaacatcttggttaagtgtgatgttatagtggtagaagctaaaggcttatacagagacagtaagagcataagaagatgctggtgtgggatccaaaatatagagaccattagtggaatcacctctgccaatcatcctcttgttggtggtgtcctgaatacaaaaattattagtgtgaaagataattttaatagaatcattattagttggacagcttactgagatgatattgtatttgaaagttggcacataaagaacatctgttagaatcagattgtaacgccctaatgctaaggcacgctacagt

SEQ ID NO: 133371 - DNA, 623 bp, Cannabis sativa
cgctcttccaatttattaaatgtaaattaattttataaaataataatatttttaattaaaataccatttaaaaaattattaaaaaaatagaaatataaaaacttcttatctatttttttattataaagctttatttttgtacgtaataaacatatttagagagtacaactgaaaatattgtaaaattataaaagttgggatatgattttgtcctgtcatataaattcacggaatgtattatatagtacattagatgggtcttagggtacattaaatgagtatcaatgtatgtttctactttttaactctaattacctctaaatcaatctcagccgtcaaatcgaataatttcctcatctgacagctgccgtacatcacgaattacaattcgtaaaagtacaataacacaacaaaatcatatcccaaaatcatatccctataaaagtttttaagattataaaaatggtgaggtcctttggttggataatcattgaagaaagtctccttttgcggtggcggtcagtcagaactaaattagtatttcgtcactgatgatcacatttcacatcaaaaagatatttcaagtagaataaacaacagttttatccaaaaaaaaaaaaaaa

SEQ ID NO: 133372 - DNA, 505 bp, Cannabis sativa
aagcatgtttttacatgaatctttgattatatgttggtatggattttgattgagcttagatgagatttttggagtgtttttctagcttgggttcatgtgattttaaggtgatatgttgctggaattgtttgtgttggcttaaagttcaagttctcaaacttggaattttgctagtttgaagcatgattttatgattgttgtgcaatctgaattttgagagtttgttgttgatgtttaatgcatgaaatggtgttttagactctctgtttaatgattgaaaacctatgtgatggttctaagttttggtttaggtttggttgtgttttgggcaaaattttcgtagctgaaaattgagttttctgggtttttaaacccactggtctcgactatcataggtctgatcgcgaccatgataataacagtttattaatttttttaagcttttgtttttgccataacttttgactcgggactccgtttgggacgttctttataccgttggaaa

SEQ ID NO: 133373 - DNA, 604 bp, Cannabis sativa
gactcgtcatcgcctcctccatacgttcaaattcagacatggtatatccttgatcaattagcatctttgagagacgactgacctctgctgcaatctggcagccaacaaaaaaggaaagggacattagaaccttgtataaaaaataaaagagacttgaggaatctaaaagataagaactcactgtagtgagggccaagctcatgtccttgatttggtacacaaggttggtagaagcgcaggccgcatatctcttcatggggagttgggtcaggctggcagcaaagtggctcatcatctctgaggcagaaagagtcaggctaggtcccacgaagcgtttaaaccagtcggtcaagggatccaaattcaaatcccagatgtttctggcgtattcactttgaacagatccatcctgggtgttccttttgtattttcttcagagctttcaccttcgcgttccccttggtgtactcccccaaggcacagttgtacatagcaatctgaagctgagccctttcctcatcaggatggacgggagtcaagataatgcctaaaggcataggatactcatccacttgggaaggaaccccttgttggaaattatttt

SEQ ID NO: 133374 - DNA, 705 bp, Cannabis sativa
  modified_base (48)..(69): a, c, t, g, unknown or other
caacataaaatgttatttctgatgtttattaataagtaaatctgattnnnnnnnnnnnnnnnnnnnnnnggcataaaacccaacacacttttcgaccaccatccaacctcacgcgacgcaccattcagaccttcgactatcaatgatgtcaattcccaagcggcatctcctcactcgctaccattaacgagaaatctcaagtcaaagttttgccacccaactttaaacgcattttttgttcacctccagtgtccattcgatgatccgtcttcaccactatagacaaagctcatctaagaaaacaatctacactgagtcattttccccaacttgttatttttttttgtgacgtttttgtagctccgtcccttctcgacggctttgcggcaatatcgtgtactgttttgacaaatagttgacatgggtgtgatctactcatcgagtttgtcattttgatatatactatcccattttcggtgacgtttccagtacaccaatttctattgtcatcaattgttgttatgcaccgcttatgtaagattttaaaccgtagcctataatatagttggcggttttagacggtcagatacacaaaaaaaaaaaaaaaaaaaaaaactatatcaaaatctgaaattatcttagatctacaacaacaacaacaataatttattgttgggttttatgccgtaaataaaactcatttca

SEQ ID NO: 133375 - DNA, 1327 bp, Cannabis sativa
atcaacccctatggaactagtaactgactttgctagtgcatgggccacaccattcgcaacacacggaatggcacaacaagaaccaccaccaacagcagcttagagagatacaatctcctcaacaattggtttgtacagaaaaatagaattcgggaaagtaatccaagaattaacaacaaaagaatctgtctccactttcaccaactcatagcccaacatggacgcccaccgcaacccaacacgcatagtcaaaagctcgaccaccgccacctgaaactccccaacaccacccactgcccaggccgcccacacctcaccatgccctccccgaatgactcccccgaacccagcaaacccctactcggagtaaccgccgcatcaacagacaacacaaactcgccccgcaaaagaggccaccatctacgtcgcacgaccgaactagcaagcccacacctcactacagccccccatcatccataccagccccttgaaactcaaccaaagcctcctttgcaagctcgacaaccccacacaacctcaattgttttttcccgaacaagacagaattcctatcataccacacccaccaccacaccattgaaagcaactcaaactcatcctttctaagcacatcaaataaataaacaagcaactccaccaaggaacccactcgaccttggtataaatgatgccaaacccgaagcttagtccaaagaggaagtaaagatgagcaatacactaaaggatgctccggatgatggaaacggggaggaaatggaaggttcacagcttattagacacaaggttcttgttcagccgacttgttgacaggtaagacacttagcaacatacttagcgatgtcatttttcatacccggccaccagaacatggctttgaggtcttgatacatcttcgttgaccttggatgaactgagtaaggagtcgtatgagactcattcataatctctcttttaatatcatcatccataggcacacaaacacgattcaaaaattgtaacactccgtttcatccactgtaaagtcactaatcttcccaaccgaaaccctatctcgggatttcactaactctggatcttgcaattgtgcttccctgatttgctctaaaagagtatattgcagggtgatattagccaattgccctacagccaactcgatattagctcgggtcttttcatttgctaattactgggagatttgtttcacagtatttatctaactctatccctttctaatcaaggaatcggcaaccacgttggccttactagggtgataaaggatctcacaatcataatccttcacaaactc

SEQ ID NO: 133376 - DNA, 814 bp, Cannabis sativa
aaagtgttcaagtcttagtggctataccaaggtggatttgttaattttatggtctagtcacttagtcttgtacacttggcatcactttatttgttagttagattagtttagttggttatgttggttttcacataaatgtccaactctagcaactgtattaactaactctttcaattcaatttctgttttaatttttctttagagactagtggttagcattagaaggagctatgctcatcgtgtacatttagttcttattgctctaagttgtaaagctctcaagctactaatcaaagaagtggaatataaggctgagcctatttttgcaattctctcctcatctatttttcttgttttatttttctggtttaaattcgaattagttcttgctactgttgtgttgtttatgtttgatgtcttatgttcttgatcctctattgtgtgattattaatcacaacaaaatctgatgtaaaagaaaatgcaaaagtaatgatatcggaatggcgatggcgatggagaaatgatagcaataaagatcaacgcaccgacagtagtgatgacgatggagaagcaccggagtggcgacgaagatgttagggtttttcattttcttattactctgttaatccataaaggatagaagagaagtgaaaagagatatgggctagagtagaagtaataaaatggaccctaaatagaaagcccatttatggaggtattaaaaattaagggatttttcgaaaaatacctcttttattcatcaattaactaaatttacctttaattttatgtttaattgaaacatacctcttt

SEQ ID NO: 133377 - DNA, 924 bp, Cannabis sativa
gtattggattggatcggttggaggaatccaacatccaatgtgtaattggattggatctggatgagtccaaaaacattggatgtgatccaatgaacagccctaagcacaacagcctgttgattctggcgttacatccagtagcaacaatcctcaggctcatcaggggtctccacttgcgaagacaaggcctaaatggcatccacctgatgcaagatgcttcaaattaaatgtggacgcaacttgtaataatgcaggagcagtaattggttttggagctttaatttgagatcattacggcaatgtccttgctggtctctgaaagcctttccaagggtgtttttctcctaaagaaatggaagctgtaacattgtttcatagtgttcaatgggctcttcatcatcaactaccaattaatattattgagacagatgatcttgtggtagttaatgcacttaataagacatcttctactagatttgtatctcctttctttgatttagtagatgatatttcctatcttttatcctattttcctggagtgaaagtatctcatgttaaaagagatgctaatgaagcagttcatgctttagctaaatttgctcttcgattggatgaagataacatttggttgggggaaattccttctccaatttcttctgttgttattaatgactcttatatttaataataaaagtttcttctcaaaaaaaaataaataaataaataaaatatgaaaatgtctctaaactattggaggactttcaatttatatgtatagtagtaatttaaaaaaataaataaaaatatcacaaaattttaaaaatacaaaaactatataagcaactttaagtttgtatgtttagtggtaattttttttcaaaaaaaaaatatgaaaatgtaataaaattttaaaaatacaaaaaa

SEQ ID NO: 133378 - DNA, 2326 bp, Cannabis sativa
  modified_base (1575)..(1576): a, c, t, g, unknown or other
tctctctctctctctctttctatgttcggccactccaaactagaaggaactagctccaattcttgtgttttatgtgtattgagctaagattcaagtggttttaagcaaaggtaaccctatgtgttattgaagctttaattttggtttgaatatgcaaaattgtgaatttggggctgttagggttatatttgtttataattcagtttctaagtttaattttagttagaatggagttcttgcagctaatttggggttgtgggtgatggacgcacaagtttgagtttgaatttcaagcttggttcatccatggcactttttgattttgtgtgaatttttgggttctattgctttgattatgttggttgatgttattattggtgttctggaagtttttgtgaggtttggacatgggttgagtaggttttggattgtttcgggaaacctggtgcaaaccggttaacggtttgccaggtcctgtaaaactggttaaccggttctgggacaggtttctcgaacaatccatttcgtcgattcgtgtccattttagagccttggttgggtgattccttgttacttagggtgttgtagtttcagttgtctatggcagaacctttagttgaaggtttgggtttctcgaattaaagttttaggcgtgttgtttacctgtttttgttatgtgattagggcatccatccagcgtgaagttttctgtttaggtcagccaactcacttgaattcgaaaacgaggtatgaatagcgtagaacatatgatatatatgcgaatgtatgtatgtgtgatatatatatatgcatgcttgttatggttagtacactaccaacacttgtacggaaatggtacagagtgtattggtataatgtataatgtttagagagtacattatggtgttaccagggtacgaaacaaaccctaccaacactcatacagtgtcagtacgtagtgtatgtggtacagtggttgtaccctagtaaagaatgttcttactcatttgttaagccttgtaaataggtgtatgggcgtctagatacaagtcgatattatatgatttgttatatgcttttcttactgagtttttcgactcacagttttactttcatgtgtaggtaaaggaaaggcgaaggctgaacaggagtaagcttcgagctaagatgatgttgtacatgtcatggcgacgcgacctggattgttctgtctcaagacatttgggattttattttgtagttgttgtgcgacctgattaaatatattttgaatcttttgtgtaagtttaaatacgtgatcccagcttttgcaaataattatataaaagtttataaattttagtaattaaatctaaagttttaatttgacatgattttcaagaaattttctttgattagcaaagatggcaatgtaattgaaaaatcattgtagcgcgcttaagtatcagggcattacatacatcaaactggaccaatattgaacttggataagatatcataaacttactgtaatatctatctaagtcaatattacttagctgatcttagatcaatgatctcaatcctaagatggtnnggttctagttcaattgtattatttgtgctctttgatttattcattaaagttgaacaattggatcttcccgatacttacatattgagaacatggtagtccaattgagtgagagctctaatcatagatacataatccatatcttctataaatgcatagaagtgaaatggtaattttcttcgagcttggctcaatagagataaatggtggagtactcattttagtaattatattagtttactcaaatatcatttataggtagctaagtattttgaggataaaatacattaaagggaagaacagtaaatttatccctactccatgtagatcatctatagaggatcagtgattatttcaattataacaatggataattaatagcgtatctatatcttggaacatatagagcattctatataattaagagtgtaatttagaatctatagtggagtcaggagatattaataagatagaaaatttacttctacagctgcttattggaagcttgattatataagcacatggtccccacactaattgagataatactgcttgtagactcagttaattggtttcaattaatcaattataattctaaattacactatcttatttatgaattttcggtaagcaagtgtttaattgtgaagaaaagagattttaggatttttttttgttaattaagaaactttataaggtctaattaataaataagttaaatgacacttttatttgataattattataattatt

SEQ ID NO: 133379 - DNA, 977 bp, Cannabis sativa
  modified_base (36)..(42): a, c, t, g, unknown or other
agagagaaacattcatcaaactacgaagtattattnnnnnnnacaaatcaagtttaaggggggtgttgaaatattaaacttgatttaatattgttactttctagaattttcttgttgctactaaagtttctagactattcttaaagtgtctagtttactagtttgtttatgtactcttgaattttctagaattatctttcactagtgttagtcgagggaactatgtagaacaatatagaagctaggcatttaataatgtttctagattagtccatagagtcctatagatagagatgtaattctatcgtaccacaaatcacacaagttgagatataatatatagcttcttccattcaaatattctctccaaagttcttcttattttccaataggtaatatgaacttttgtgtttttcctttcttgctattaattataaaaaattcttcaatttttttcttttctttcttatatgacagatccaacagaaattgcgtgaagtcctcattgaacacaaaatattaaagactacttaccaaagatcattgccagtaaatcttaactatgaacaaagattaatggaccgtgaaaaaataaagaaagtggagagaaatgagtggaatgaaagaaaaaaagttgatcactccataaactaaatagtctgctctagttgcggctacattgattgcaatagtaacatttacagccagtttcactttgcccggtagttatttaagtaatgaggttggaaatcaacaacaacaacaagttattggcactgctgttctcaccaataacaaagcctttcaagctttcatcataacagacacaatagggtcgaatgaaactcagctctgagttttcgaggtagatttaggttttacaatctcagatctgtgatttttgcaaggtctgatggggtccgatagggtcgaatgaaactgtgagtttgcgaggtaggagacgtaggtccgatggg

SEQ ID NO: 133380 - DNA, 536 bp, Cannabis sativa
ctttatttatttattactcaatcacacaaaaataaataatactaaatatatagaatctttaaatttaacatttacaatagtatcacataaaaatgatatatataagatcttttaattattttatgtaattaataattttaaaaatattttcaaataaaaatattatctgtatttctagtaaggaacacgtggattctaaatactagcttagggcctatcagtggggccaaatgacataaactgggccaagcctaggatccatttcgccttccaggagaacaataacataacttgcctaggcgaggttttgtcaagcctacacagtctcagaatcatcacacatgaccttccctgggcgatgtgggattgtacagctccaagtctttccccttcagatcacggggctttgtaacgttcccgcttcaagcctctattgggcccttatacccataaaatgatgaatcttatacatgagtacgtcactttggctgcttcatggaatgatgactgatcctacaaatcaacacgagtgtttc

SEQ ID NO: 133381 - DNA, 1412 bp, Cannabis sativa
  modified_base (204)..(234): a, c, t, g, unknown or other
  modified_base (1345)..(1361): a, c, t, g, unknown or other
ttgcttagttactgaattcttaaacaaaaaccactagaacttatataaaactaatacttacgtggctcgccacgtaactctcatctagtgtattaataaatatgtatatttattaggtttttataaggaagttatttcaattttttgttgcttcatatcttttcgtatttattatgatattgcatttattattattattattannnnnnnnnnnnnnnnnnnnnnnnnnnnnnntattattattattatttatatttatatttttaactttctcctttttatgtgagttaaatacaattttttgttcttatatttgatttcttacttaaaagtatatatttttatattgtgtgatttgtgttcttcaatactattttattacttttgttgtgttgtgttaagttctgttcatgtattgttgcgttttgttattgagttagttgtgagtttttgaagatgtggagacttcgaaagatttttgaaaaatgattaaatctcacagctaagtttttcttcttttttcgattattattataatattttactttttaattttatttatttttatttagaaagaagatagattcttacctctatttattttattgtgtgtgtttttcaggttgttcatcatgttgcagtttgctaatgttagagttgcaggaaaaatttgttggggcccaaactatttttgagcagaatttgtggatccatcttcgtctccattttattttgaagtgtttgcttgtttagtgttgaatgttttctctattcattatactattttgttttttcaagtttgctatccaattttcctaaagtatccctagtccatgtcatctcatggattagttgtgcatacattcagggtggattaaaaacttgtttgatgggtttagtccatctttttttgtacgctctatttatttattttaatgatataatcattattcaaaaaaaagaaaaagcaagtgttgctacttggatagagaaaaaagaagtgatgaacattctcctcatgatttccacatacaacacacatagaattcgaaatggcacccatcttaaaaagctatgctttggaagacttagcatttcccagatctcttttctccattcaactttaaccattgggagacaaaacttatcataatttgcacttattttataagatgtagactggtattgtctagatggagtgaatggaattctgaaaacatccacaagctctttccataaattgatagacctaggagcaagcttgagataccaccgctgagctaggcttatcagcgtggcaggaaaaattctacaccgaatgtctgttggaatatattttaccagnnnnnnnnnnnnnnnnnaagtatgtttttaacatcctaatatgaatttctaaaacgatgaaaataaac

SEQ ID NO: 133382 - DNA, 622 bp, Cannabis sativa
  modified_base (31)..(31): a, c, t, g, unknown or other
tgaaatcgttactgtgaggctcaaatttggntaacaaaaatctgcgttaataattgtaagaccttattatctgttttgcgtaacgtatcttttcactttgtaaagagatcagcaaaatatagtggctcattccttcgttagagcctctatatcccaccttgatggccattttaatttagacaatgtccctattatgttgttactaaatttggtgactgagttaatcttttaataagatgatgattttcttttttttttttttaaaaaaaaaacaattaccttaacggaaattaaggagacataaaatgacttggaaaatttgtcacttgactcaatgagttggaaaaatgtggtcaagactaaagctatcctcagaaaaggcgcttgcaaactcatttctaatggggaggaaacaaacatttggtcggacccctggttggtccatgggacggatttctacccgaaacccatcccctcctaccctagaagcatcgagaaggtctcagagctgttgttggagaatggggactgggatatttccttgttaaggactatgtttgactctgccacgattacgagcatcctaaaagagggtagacctagcggccagggaagagataag

SEQ ID NO: 133383 - DNA, 2044 bp, Cannabis sativa
  modified_base (858)..(861): a, c, t, g, unknown or other
ggaaagattgcatattgaatacagaatacactaatcaagggattcagacaacttgccatatctctgtgatctgatcccaaaattataggcatttcttcggtgactcatgatgcaaaagatgaaattgctaagtgttggcgtgctcttcagattgctcactacccagttaagagggcttcgtccgagcgaatatatgttgtgctctgtttggcatatctcttgcgagcaggttcataaagttgattccacgtgtcaccatcgtgtaaagtcacgtcagagtgtaaaaattgggataacatttgccccccaagtctgtacgggacttccgaagttgtgtgtagacttcatctgagctgctcttgcgtttgaatgggtgacacgtgatagacgcgtcttttcatgattcaatgtcaggctaaccaggcgtcccttcaattttcagctaattaatgttctcactcaattaatgcctcgaaaccctactttctctctccacatttgacggttacacctgattatatttgattcccaatatttgctttttggggggaaccgatgcgtctaatgcatttgaaatgattacccttttttcatttttcggcttataaatagggttgagcatcattcacaaattcacttttaccaatttctccattaagcaaactcagagcaaaaaaggttttcacttcaattctgtcgtgagatttctaccaaaagcatccaagcagcttcgtttggactgaactcagacaccgaacattgattaatttttcaatctcttcctcttttactttgcatgtttaatgtctgggtttcatacatgcgttcttgactttgctgtagaagataggtagaaannnnaggtttaaaactttgcgattttctttgtaataatttgtaatacttcaccgttcatgatgtcggcctttgatcacacattgtctgtctttcaccttgcttattcaaagcttcatgaaatttagccttgaacccaaaaatttcaaacttcggggttttgacttatttttgaatattttcattcttttaatctgttgagtactcttggtcggtatattttcttgtttatggttcgatatccctaccaaacactcatctcgtgtgttgtcttttgtagatgaaccatggtgagttttggggaagagaacaccgaattgaccaggacctgcttcaacttctgtacgaggatcatccacgtcttcgttccagtccgtcctcttcaagttacggactctccaattcaagctttgaagagtgggaggtgagtagtgaacggtgttctactctagaactcgaagtgcaacaccactactactccgagtagatcactggagaggggtaaagctgcttcatttgggagttgaaaaaagtttggaggtgctatttgccgtcaacctggacatacattgtccaaccaggtattgctgacactctgcctgtttgccgtccaagttcggggaactttggcattcccattgctggtcttgctgttacggtagctcggcattcaccccagtatctgtccagcagagggatgatggctcgaacaaagaaaacgatggaaagggtcaatgcatccgatcctcacgtggcctagcttgccacactacccagtgtcgagcaggatccgcccgtccaggaggagggggatcacgaaggggacatttaggtctaggaaattgagcaacaggacaaagtccatccgggtagtccttctgaggctaaggaagaggaggaggctgaacctccaaattttggggccggggagccaatgtttgcagagggcgaactcttagtcgaaggggtagactacgtcaccgaggagcttactgttgcagttcctcatagaaggcaaggtgccttaggtgccagatgggtgggtcctccgtccaaaaatcaaaaaatcactaggcacgcctaagggatttggaccagtctgactatctaggcaaacttgaatgttatgtccctgcctcaaatcaccgagccacaaacccaaagaaggggatgtgtgcctggtcgggtg

SEQ ID NO: 133384 - DNA, 746 bp, Cannabis sativa
aaataagtaataaaaataaatatgtttctttattgataattgaatagaaaaaattacattgaaatggagttttttttagggcacaaagcccaacattacctacttagggtttcttcctccacacgttattaagggctgtactacaaaaaggatgatctaacaatccactagggggaaccttcttcatcatgcggtgtagtgactgacaaggacctttatatgacctttgacacgtgtcaggcaaaggtctctcctttatgaaatactctctacattggtcgttgggaaaaaatcgtgcttgagggtgcgtacgcgcactaccatgggctagcacaggggacaatatctgatcttgtgtcaaaaaaaggtgtaccaatctttggagtgccattttgttaggagccgacgtgtcgaaggtctccagaacttgtatcactctctgggttccttaccgaaggaagctactcttagaagccattacttgccacctttttggttcgagagtcatttcatttaattctctcagatgccttatgtggaaactattcccttactttgatcgtgccacgtgtctaattaaggaaaatttggatatcacattcacatggagtaacaaaaggttttctactacaatgactagaaaggaaattttcaaaataagtatattcaatggacttaacaaaacttcttgatcctagtattataggtttgagattatctaaatctatggcttgtggtatgcctgg

SEQ ID NO: 133385 - DNA, 701 bp, Cannabis sativa
ttatatttatgtggtcttggccatcttaggctcataatcatcttcgttcaagaagtaaggagcatagcaagcattacaatcaaaatgatcattatcttattccaattccaccccacaaagaatctagctggatttatatttaaataaattattttaaagagaagcagttattatgtaaagattttttttcaaaggactaagaaatatgttataatgctttattaaaaaaatttattaattacataaataatttaatatggtataatgtctatagaacacaaaaatgtatgcaaggttcaacttcagaaaatgaagcccccactttagcgtcgacagctggtttggaataatcctttaatcggcgtacgctatatattaaatgtgaaaaatgtgttatcttttaaaattaaaaaaattatttaatttacacaaaaatgaaaaattcggcctacagccacaggtttttttttgcttacctaaccaactaatattgtttggattcgtttatttaatttattgaaaatttgaatctattagatttgaaatatcctacgattgtctatactagaaaaatcttgactgtaaaaatccattttggaaaaataaaagaagatccacagtaaaactttattcaattctaattctttaatcactaaagaataaaatagcgtagaactagttatgtttagtttttcttcggc

SEQ ID NO: 133386 - DNA, 2207 bp, Cannabis sativa
  modified_base (1934)..(1934): a, c, t, g, unknown or other
tatttattggtgaaaaatctatgcttaatgaatgttctccaccccattaggcaactttactaaagatagatttcattgctctttaatataatcattttttcattcatgatatattgtaccataatttcaattctgtgcattccagtgtttaatttgtgtctcaaattaatattatagttgaattcttattgtacaaaatgtaatcactagaaaatattgatcttattgttctaataagtcatcttaaagatggaccaacaaactctaaaagagaaaatggtttaatatgcatgttgtttagaaattgtaagtaattactaaataacataacttattagaattttattaatgaattgtggatttataatgattaattatggattctcaataaccattaaaattaaatgttgttgtgaatcataattaatctaatacttgaggtataagtttgagaaaataaatgatcttttctagaaactaggttcctagatcgatcgttcccactgatcaagttaattcttaattcaacaattctggtattgtgagatggataataaaatatataacccttgaaccttatagcttttttgatgaaatgctcatttacaaggtctatattgtaatttaacaaaacaaagggtctaatcgataatttttgcaaaacacagggttcaaaatggtatttacctaaaaaaaaataataatgactgaaacaaaatatttatattttatttttggcactgtattttttaaaaaaaaacaatcaactggtggtcctaaataattacaaacgtatacgatcatgaaaataaaattgactaaaaaattattttggatgttgaaacagagagaagtgtactagaacaacctttttgggggtatgtatattataaaaaattatttttatatgtattacatgttactaaaaatattagttaattatattgcacatattttaatatagtcattttgatccattttttatcggttatttcatttagtaaacctttttaatccagtttttatttcataattatgtacgttgtatttttttttttatagaatcacatgtaaattttcaaaagattcagaataatttataatgtcaaaaataagtttcaaatataatattacactcgcgactatttttttaagtatggtaatcaactattcaaactttatttttgcactataaactattcagaaatctctgaaaaatttataggtgatcttaaaatattataacatatgcgatcataaaaaaatagactaaaaagctctcataaatgttaaaatagataggggtgaactgaaatagtcttttaagaagtgcactatagatttatttttttaaaaaaaaaaaaattaatagtttgccacttggccccctagtaattaggtcctagccccaccttaggtgaaagtctaatttttgtaaaagaaataaaattttactataaatattatagttaaatggtttaacggttaaaaatataaaaataaaattatttataaacattaattgctaaaaaggttattgttcaatatttaaattaaaatttaattattttaaaaaaaataattaattataattaatttttacctattagtaacctgacataaaaaaaaatgtaactatcatagttataaaaaataatataatacttttcttctatttggtaaccgtgaaaaaaattgtaaatatattttatttatttatctaaatcaataaactatataacttataaagttataaataaaaagtaggagaattaccttatatactattttttaatttatagtttgggttgctccaataatttttatgtaggttgctatacggattttggttgcgaattaagttgctccgttagttgttataaaattttttgtgtgaaatttcgtaaaaatacaaaaaaaaatattttaaaatntaaaaataaaaaaacccctaaaaagtattaaataaacaccataattagaaaaacaaacaaaaagtgaggggttcaagagtagttgtctgagagtggttcgggtcggttcaacgacgtcctccgtttcagatttttgttttcatttattaatttactatgattagtttaattcaaattaatgtttttatggagttagaattataaggagttcattccttaattaattttaatgctgtgatcgtatttatgtgttgaaactaatttagttttttc

SEQ ID NO: 133387 - DNA, 545 bp, Cannabis sativa
ttgcgtagtaattaataattttcgcaacatataggtccaatttactccaaaagcttagtattttcgtgtataagatagtgaaatagtgacttgaaaagctcataaaaattgtggaaaatagcaaatgcttcagcaaaaatgtattggtgagtggcttcagccaatggttggagatttcatgcgcagtcttgttgagaaagaaatggtgtcgagggttgggaacttatgccgcattttatattaacacgaggcattttaggaaggaattaacatatctattaaaagaggaccaacggacttataagaatgtcaaacttgaggattattgtcgttatttttcaaggttacaaacttatctgcatcaaagtaaactttttagaaatttttgccgtaattttccctttgggaaataactcacgtgtgtgatgatattaagaatgaattgggccttcatgatggacttttgagttagggcttctctttgtataaaaaataatgaggaaattacattctataccctttttatattgtcctctttcattttt

SEQ ID NO: 133388 - DNA, 668 bp, Cannabis sativa
tttagggtataactaatattgaacaatatactactagtggaaagggtataactaataacaccctaactccctaactatgtaagagagaatgagacaatgtaagaaaaagaggatactaaagaaaaacaagagggaaaccaaactccattggtgggcacaaaaaaggctagagctacatgcagtcatgtggagacacatgatcccacttaatttttactaaattttatttttttataagttgtaaatatttttttactttggttctagtaaaattatttttttattttatttttgtaatcatatttttttattttattttcataaaatttatatttatgtagttttcatcctgattattctcattaaatttatatattttatttttatttttatttttgtaatttttcctccaataatttttttggagagtgaagacagtaaagtgagaggtgaaactaaatggattaaggttagggcaggagtaaaaatgaaaactaaatatggatattaaaaaaaatcaaatttcagttagaaatttatcgaacaactacctataatttaatttaaagagctttgttatgaggtattagtagtgtttagtatcttctagatatgttacgttacgattggttagcgataatctctaaaattattacattaaattatat

SEQ ID NO: 133389 - DNA, 1060 bp, Cannabis sativa
gacaaagctgctcccaggaaattattgaatgacgagtgaacttgttaaaccagctactcattgctccaacaagcaaggtggggaacaaaatacaacgtaaatagtttgtcgcgttactcactcgcattatcgtgttaaagttattcaaatgcaagactggatctgtggttctatcataggacgagacatgccaatttttgaatcccaaaggaaaaggggtatccataatatatgggtgatacggcttaagctcctcatcagagtcgtatccagatgatttccctaattctcccacttgatatctcctgaacttgtcctccagcttgtttagccgcaattggatttgatgctcttgctttggaccaaactgttgacgaaggttgggtttcttccgattcaagtgctctcacagatctagttgggagtaatcgctggtagatctcgtattactcatagaccgcgtcctacccatagactttgtatttaagtggcttgaaaatttacttgttcccatactttcctgatcattagctcattgagtactttctcctcttcgagttgatcggctatgggttctggatcgccttaaagtcacacttacttctttatgctctgttctttcctccaacgagcgctttgtcatatttccctcttcaaggtacgtactagtcctcactttatgggcttgggaagaacgttggtgattcttagtaggtgatctccgttctctcgactgagttccaagatcctcctcattttcatgagggatttctcgttcatcaatttccagttgtctcctttctggttgttcatcccgattctcagggggtgtctcattttccccgagttgttcttcctgggccttttcctatctcctggttcatgagccacgaggtctgccttgtggtcttctcactccaagttcaggttaattttgagcgttcgtcccctgcgccgccctagccgaggttgcctctcgttctaactcagtgtttcgacgctgcacctcttctagacgacgtctcaggtggcggctttccatttcataagttctttctcc

SEQ ID NO: 133390 - DNA, 566 bp, Cannabis sativa
taagatcctggtaaaataaattccaacacttagttcaaaggctctatccctcgggtcctcactttcaatagcagcagtgagtaactcaatctctatgacttttctaccacgattcttgtttaattctttggacttgggtagcgtgagttttattcaaataaattgagcagtatctcggtcatattattcagtttttcttgtaattcttctcacacgaggcatgtctactcttaacttgactttcctcaacttggaacaactgaatatcaaattaattcagctcaaaacaactttttccaagcaaattaaaaaaaattgcaccttgcacgaaggaaaaagtacagctcaaacgactcacataaaaatcatatttttaatttttgaagggcttcccattgaagtttaaaaatttccaacaagatccaaaatccttaaactaagcttcaaaaaggagaagaagaaataaataattctgtaaaaaataatgaatcgaattgtgcatgtatttcatagaataatacatatttatatacaaagctaggagactaaatgggaaactactaaat

SEQ ID NO: 133391 - DNA, 906 bp, Cannabis sativa
tgaactgcatattattcttaatttcttccacccctatcagatcaaaagattcttgtgtgtcatagagtactatggtgtattgagtatactcttgattcttgtgtctttcattttgctacagtttgagattattggggtcatagaccaaatcctcctaagctttaataaaagctttttttccctgcttgaaaattaacactacgtcaccaatttcttcattgttaaacctcttcaaagcttgtcttaactctcaacagatttttgctatatcaacacccgatctttaaaaccaccgtggaaagacaaatggttgcaatatctaaatgatttattcttactttatacagccttattgatagttattatattaagacctccgtactcttccacgttttactttcattttaccaaatcacacattaaacattgcctttataatcatgtttatgttatggtttagagaaatgttggcataacaaatatttaattttattttattataaattaattttttattaataaaattataacaactattgttaattaaaaaaatatataatttattctacaatgcaccctttataagggatgtacagatgtatccctatctatttttatatctgaaataattttttagtccattttttctcatggtcgtgtacgttatagttatttaagacatcctacaaaataaaactttaagaaatacaaaaaaaactttaacacgccaaaaatatagttcaaatattgtgttgcacgcgttactattttattttacacgcttgtgaaatagactttttgaacactgtttctatatggtaaattattttaaatttctcaaaattttgtaggatatcttaaataactataatgtaggggtgttcatccaatccaatccgcactatt

SEQ ID NO: 133392 - DNA, 649 bp, Cannabis sativa
caaaataagtattaaaattaacatgtgaagaaaaaaaattaaaaaaaaaattaagagtaattttttaaaaattatttaattttttttttcaataatataatatagaactccccaataaataaacaaatatagaataaagagacataaataaaaaaaaaagtagaaatggacaagattttttaacttgttaagatcattctcttgttttgttacttaataggagaatatgcaaatatatactaatacagaagaatatgcaagagtgtaactttgataataatgatccatttgccagagattgtatggtagcatgtcgatgttgaatatatttctgctatccttcttctggtttcaatctcaatattgctatgcaatttataacataacttcatcccaagccttatctcaaacacaaactctactctcatccaaccagacttttgagttaggtttctttaatccaaataattccgcaaatcagtatgtgggcatttggtataaggatatttcaccccgcactgttgtctgggtcgccaacagagagaaaccgctaaaagttgcagattctgcttcggcaagtctcacgattggcagtaacggaaatctggagctggtgagtggtaagaacaagtctgttatctggtcaact

SEQ ID NO: 133393 - DNA, 788 bp, Cannabis sativa
gcgctaattttatttgtaatcccgtttaggggattagggtttcttaagtatcttgggtagcgtacctaattatttagggcattacacatttggcctcaacaagagaagcagaattactcgaagtaattccaattgatgtgttggctcatccgactattcttcgcaaagagatcatgcaagtcaacgtaactgagcaaatcacttagatgaccccaatcgttacttatttaacaatgggcaaactccctgaagataaacttgaggctaaaaagttacgatgtcgagctgctcgatatgtcatttatgacatcgagctatatcatagaagttttagccaactgtggctcaaatgtatcgatggagacgaatgcgattacatacttcgagaagtacatggtggtatttgtggaaatcacactggaggtaatttccttaccttgaagatcatgcaacaaggatattactagccgaccttacgggtagatgcaaccaatttcgctaaataatgtgataaatgtcaacaaattgtgacctgtgtcaacaggccaccaagccagtgaaactctatcactagtccctagccatttgcagtctggggcatagatttaattggcaatcaccgaaaggaaagggaggaataaaatatgcagtggtcgcagtagactatttcaccaagtgggttgaagctgaggctctagagacaataacaactgcaaagttacgcgagtttttctatcgagttattatttgcaggtttggcattccctataaattaatctctaataaca

SEQ ID NO: 133394 - DNA, 955 bp, Cannabis sativa
attatgatgtttagtttatttttgaaatgataattagaatgaatggtatatattaaaacaaaacaaaaaaatacattttactttaaagtcttttttagtagaggcatgttatctaataagtatgagaataattttttttatataaatattatattgataattatatcaatatagatttgtaatattataattcatgtaaatagtataattaatagtaattatattataaatgcatcacaattttttaaaaaaactaaaccaaaaaatacaattattataacgataattctgttcatttttttaaaaaaaatgataattctgttataattatgattaggtcaaactttgatattatttatgagatcaaaacgctggaaacacaaaccaaataaaactaaaattttatttatttattttttaattttttttcaaaaaaaagagtactaaactcaaatttaggcggtagtaaaaaaaaacgtcctagtactggaaagttgtgtcttttcctacgctccacgtaaagcgcgtgggccctagactaagacaagttaaaagaagcttgataaattgaagagattattagtgagaaataaaaagttattggtcttatcgcgataagatggtgaggttgtagtcacgcgttttaagtggtgtctctatcaaatatcaggtccatcaactttggtttttttggtacatcatttgagcgataaataagcttttagttagctctaatttccggcttaaacacttaccaatatagaaattgttatatatatatatatataaaagaagtataattgtcaaaaagaaaattttattacactcaacaaattgttaaagataatttattttaataatttttactttatatgaaattcatatatttatttatattgtttttttttaattttttcttttaatttatattcttacaaaatatatctatcaaata

SEQ ID NO: 133395 - DNA, 510 bp, Cannabis sativa
agagttttaaggatcagaagaatgttggagtgaaatgtggaaacgtctcccattgactgctttcagttacacaacgttatattcaaaccctcgaaatatgttgactaccacatgcatcatttgggcgacatgtcgcctgattcatattttcagctccaatttggagttttgaatctcctctctgagatgttctccaatccatcgttcacatgtgaaaatgaataatcatttgaccgtttctaatggctataaacttctctcacatgctttcataattttcaaatgtaattaaccttttaattacatattatcaaagtttgattcatatgttacaatcttaatttagaatgtaactcctctaatgttacattttatgtgttttattatactatatacctataatataacctctaatatataatatatatttcatctcaaaaaacatataatatatattaattttatattaatatataatagggaaatttgacatttaatgctaaaaggtta

SEQ ID NO: 133396 - DNA, 728 bp, Cannabis sativa
ttttttttttgaaaaaaaacatctctttccccctttttttttttaactattagaagatcatttcaattccttgttttctttaatcacttcaatcccaaaaaaagtaaaattccttaaagttttgtttatattccatttacatccaaatttcatacattgccttaattttgatattattgagtttatttaaagtatttgaatcatgtgaatgattgattgcaattacaatattactttaggatattatccgaagaagttttttgtatctatatagacacatccattaagaattgaggtccaaaacataatattgtaaacttaattagcttcctcttagagcattttttatggagggttatgaaaatattttagtttatttatactatctttaataaaatgatgtaaattttgtgttaaattttagtcaaaaaaattacattaatattatatttgggctaaatttataattgtactctaatacactagggctaaaacaaattttattttaaaaaatatataaaaaaatcaacaaaaatattaaatttttattgaaattatataaaaactatattaaacatataaataaaaatataaaaaaccatgaattatattaatgagtgacaaaaaataaataaaaaagtggtatctattgtgatgtaaaatttgacctatgatatattttgggaaatttacacccactattgttttttcccaatttattactttta

SEQ ID NO: 133397 - DNA, 1133 bp, Cannabis sativa
tggtaataaataaaagatttggacatccacataattattaatatttataacataattagtatttttactttttaaactttcgacactacgtgattctatcgcttaaaatattaaaaaatttccctaaaatataagagtgacataattatgcttcttctgtcaagttttgtttcttttaccattaaaaaataatatttttacttatgtgaactttgaccaatacaaaattttggcacattttattaaaaaaattaattttaaaaattatattgttatattaattctgaaaacaaattaataaaaattattaaaagacccgataaaaatatcaaattaattaaaaatattaagtcacttaaaaacctaaattattcataaataaaaatattttttaaattttatttttatttataaacgcgtatcttaaaaaatccaactaaaattattgaaaatccaataaataatttaaaacaaattaagattttttgaagaaaaattcaagcttattatatttataaacttatatttttttaataaaaaaataattaaaaattcaataaaagaatgtaaaattattttgacaaaggttagaaattaaactaaaaaaaaatgttatgtttacttaaacaaatctagaatttttaagaaaaaaaataaactcaaacttattcccataaaatttagtttttacaaaaattaaattataatatattttttacatgtaaatagattttttaataaaaataaataattttttaaattgcttaattagttttaaaattttaatttatttttctattttctaatttgttcaaaataatgttttttaatatctaaattaacattttaagatttcctaaaaaaaatattgaatctttctcatttttattttacgggggtacaatttgatagttgtcaaagtttagtgtgcaaaattgctaatttagaaaaacacgcaagcattaaaatagaataatgagactaaacctaaaaagatgactaaaaatctgtaagggatattggcggctaaaccacctgaactttacggtttgtaacacttaaccacagaaatagaatttttggcagctaaactacctaaatcctggttccgttttgctctgcacacctccgtc

SEQ ID NO: 133398 - DNA, 685 bp, Cannabis sativa
  modified_base (625)..(634): a, c, t, g, unknown or other
aagctgatataaaaattaacttttttttcttaaatttataattatagaaggttattttttttttggctaggcccgtcgaccttttgtaagcataggtacatcttaatcaagttgtaatttactattgcgatttaatttttgctactgcgattagtcttgtctttgtgatatgattttgagtgttttaatcttgcttttgtgatatatatagttttgttttgttttgttttgttttgcttcgttgtttcttcgattgctcaccatcaaatcattgttagtagttagaaataacaagtggttgttattagtacagttacgtacctgcataatagttgagtgctcaagctacgaggttgaatgaacctactttaacagtttttacttttgtcttctgaacgtacggtaactaaaattgaatttaagtgttcttaaggttaactataatgctgtaatcttttttatctgttttacttttaatttttttgtcaaataatttgaaaattaggtgactgattattttactcgttttttttaatttaatcttagttcgggtctccaattagaaaaatgttccattagattgtaaactacagtagaacttctatttaagaatactctattcaannnnnnnnnntaatttgttataaaaaaaatcaagtcccgatttgggccagttataaataag

SEQ ID NO: 133399 - DNA, 615 bp, Cannabis sativa
atatttgagtttgacaggtgaaagtgaaaacatttacagagggtggtgatcctaaaatggctatttgtaaagctgttgaagaacacaatattgatttacttgttcttggtcaaaagtctaaaggaatcattgagaggttagtcaaactcacatagaaatattattattactatataattattacatgggttgtgattaaaaattagaattatttaatttattttacagggctttgctgggaagttctttaagtgactattgcttaagcaatgctaaatgtcctgttcttgtggtgaagaagacataatatatgacataataatagtcctatatcctatgtttgagaaaataaggattgtatgttttatgtttaatcctagttgatttgcttatttgaaaaagcttaaatgaaggacaatatttagtactaatcgatcaatcacctttgatgttattcattttaaagggatttaacctaatattcggttagagttcaagacaccctccatcctaggtaggatgttggccaaattggatctctcttacgcccaaaaaaaaaaagaggagtgataccggtaacccgtcccgctctttcatcccattaggttttttttt

SEQ ID NO: 133400 - DNA, 824 bp, Cannabis sativa
tatataattagtttgttatattgagaactatataatatttaattatgaaaaagttttatgcttgttactttttaaataaatgaaaatcttgggaagtttgatgaaaatagaataaggagttacaaacttacaatcgctcctacaaagtttacaacatgcatgagatcttgaattgtaaatgcatggaataaatgatatgaaaaattactaattaattagaaagtgtcacattaatatgataatgagcacctcaaatgcttaataataatgttcttacaattaactgagatataattttagtaaattagtaaatgatatatttggtgtaattatatttatcaataaaagttatgtcatgtgtcatattttactaattaaggtggtcatgttctcatatttgtttgattaaatttaacaatatgaatatgttattggtttttatctaatggatcttattataatgaatattgttttagcagtacttaatgcttttaaacactactacaaaaacctcctttagaggcgatttttaagccctttcagcttcgattttggcgaaattcccgacagacttcagggtgatgctaaagggtttttaaaaaccgacgccatttatacccctatgacgtcggttattatctaggaaccgacgccatagggtatatatggcgtcagttcctgtaaataaccgacgccataggtggcgtaggaaccgacaccaaaaacgagcatttttcaatttttttagttttatttaatttattttaattatatatttattaatttatatatatgatattatttaatttaaattacatacttat

SEQ ID NO: 133401 - DNA, 658 bp, Cannabis sativa
tgtatatcttttcttactgaaaatgcttcatcccatctccctgcatctgcatacaagttagacaagagaactctacttgctccatgagatggttctaacctagctaaattttctgcagccatttcccctattttgacatttttgtgagttcggcatgctgccaataatgtgccccatattacaatatctgcctccataggcatgctcttgatcaaatcttcagcttcttccaatctaccagctctgcctagaagatccaccatacagccataatgcttgatatcaggttctatgttgtaaacattcttcatgctcttgaaatgtctctctccggcctccaccaacccagcatggcagcaggcactcaagactccaatgaatgtgatagaattgagtttgatattgcgcctctgcaagtctgaaaatatttcaagagataatgttgcgtgcccgtgcatggcgagtccacatataatggcattccaaggtgagacagtggaaactctgtcacggatttgatgaaacatttctaaggcagtgtttatactcccacacttggcatacatgtcaactagggctgcactcaagttttcattaagagggattgagttactacgtatgtagtcatgcgcaaatcttccttctttcaatgagccta

SEQ ID NO: 133402 - DNA, 789 bp, Cannabis sativa
tatatctaagctaattatataaatatagtgaacatacatatatgtaccagatgctcaggtgttagacaactcgcaacaaattttacccaattttgttgatcaatttaaggatggtttttggggggaatagggagctccttcaacatattctctttggccaaagacattatgacgtcgcatgtcatttttgtcttaaaatctttcataactcgtcctgcaatcttaagacaatcttcttttccaatctgcacaaacattgaaaccacgctatatgtagaaagcaaataattagttaatagtttacaaaacatcataataagtatattttgtatattaacttacttacacgtccatccaaattctgtcattcaacgattgatccacatatctcctgtctttataattgatactgattgtttgtcgacatctaactccaagccacgatatcatctctccatacatctctccaaagtattcaactttgtcattaacttcaaggtctattttttcacctttatccattctttgacgtacacgcttcatccgtgtaggatctcgatggttgggaggttgcaaacaataacctaagttctcatctcttgagttctcatctactgagcaatcatgtgtcagcacatcatctgccatatctgcgtaataagcatatttactagatattaagatacaattacacatacaatggtagttatatatgtcaatcaatcacataaaatattaagaaacaattacacatacaatggtagttacatattgttgggttttatgccc

SEQ ID NO: 133403 - DNA, 744 bp, Cannabis sativa
tacaatacaatacaatacgacctagtacggcgttccaaacgagcccttaagtacctttcaaataaaaattaacacatttaaattacatttgaggaatttctttaatatttctcttatgtagctatctaacacaaattgtttggttaacaattttttttccctaaagttaatagttaaagctagctagcacagttaaatcaacaattaattatcttttttttagaaaaaaattaattttaaatatttaaatttaattttaaagtataaaaaaaattagataattatttttttttatttataagtttaatttaaatttaaattagacaataattcaattaaataatcataacttgtgccgaatttattagttatattatttaaaatatttaaatttattttcttattttattgtttaataaaattagttagatatattttttataaataaatttaaaattagattaaattttatatatttaaaaattataattaaattaatttattattatcatttaaatgaataattagataatatcatgtttgatacaactctaagcaatgtatatatgttactaatacttaatttatatatatttatatatggaacacatgggtattactatgaatggttactaaacaaatttaattattaatattaattttaagaatatcaaaccatcgaattttgatctaataacgaataattaaatcacaaatttgaatttttatgcttaatttaactac

SEQ ID NO: 133404 - DNA, 686 bp, Cannabis sativa
attaggcccatattattactaactgggccttcatgggttaggtcacagtgagtgggcctttgactatgacaaggagtctttagcccagagcctacaattccaaccccaactatactgaagcttcgaacatctctagcacatacgttcagacccgactgctcccctggcaccttcgtcgacagttgacggcgctacattttcgatgagaagtggaaagtgttccccacgtcaaccatgttgaggtttcgtgttggaatctatccctgcgagcttagaatttttacccaactcagagcaggtaaactgagaggatgtcggacacatttggtgtctaatggaaagaagaatgtcttctttggcaccgatcgacactgcaactcccatgagctggacgccagcggtccagaacgcagctcctccaccgttaaggggcgtcgtgtctcacccaaccaactaagaacctccgaccaacttggtaggacaaagaagataccagtgttattatcctctcgctgagcgccgatcatcttatttagctccggtgagctgcggttcgacttcaacggcgtatctcgaagagccatgtcgtaatgtttggctggaagtgttaacgagacacttcttagatctgaaatcttcgttgtttcacccttatcagcttcgtcacgtcgtttgtcctcctctat

SEQ ID NO: 133405 - DNA, 1328 bp, Cannabis sativa
  modified_base (1227)..(1237): a, c, t, g, unknown or other
cacgcatgccagctggcaagaccttatttttatgttagtctaattttgttagactaaccaaaacaaataaaaaaccaaaacaaaatttatatctttaattatactaaatttttgaaatttttttcattcaattcatattcttaaaaaaaaatatatctatcaaataaaaataaattatagtttaaatattatgataaaaaaataaaataaaaatttatataaaattttcttagaaaaaaataatatatgatttagaaaaaaaaatataaaaataaaataaatgaaattaacataaaataatgtgaagaaatttttttagaataatattaagagtaattttttaaaattatttaggtttattttttttttaataatggggtatacttattgttattttatagggtgcaaattgaaggcaactttttcatttaaatctaaaaatactcctctcataacttacccctcctctctcgcttcctctattctctatgtctctctcgctctcttcttctcacacacaaagaccctagcaacccacgactgccaaccaccgcgcctccaaccgaagaccaccaacccacagacaactaccaacccaagacccaaaatcttcgaaccatgaccactgccccatgaatgtaattaagtttttcattttatgctattgtattctgtgtgatttagggttgaaatgtatgattttatttataggtttattgatttaggaataaattgtatgattaatgtctgtaatatgtgagttgatgttagtttagggtcgacaacggtcggatttgagttttaggcaaaaaaattaatttttttgtcaggcctgatggtggcttgatgcctttctgacgagcttaacatctataaatgtagaatatggtccaatggtggcctaatgctacttttttttatgcacaaaaacataaaaaatttatatatatatataaaaaagaaataggtagtatcagaccaccatcggtatgaatgagaatagggagtatggatggtgaaattagaagagaaaaaaaacgaaagaagtataatgagtattaatataaagtgtgcttatatttttttaatttttaaaaaatttaatatacactaaatatatgcatattacaaattcaaatttctccattttaaatcatgcaaagtcatcaatcaataataatttataatagaggtttgtttatgataattttacaaatacacaaaaannnnnnnnnnnttacaaaaatacggtttcacagaattttaaacatttttacggttttttaattttatttacagaaaatacagtttttttatgttgttatctt

SEQ ID NO: 133406 - DNA, 1477 bp, Cannabis sativa
ggtagcgaatttcgcgaaaaccgacgcctaaagggcttaaaaaccgcctctaaagggtgtttttgtagtagtgccggtactcgaacagagatctagacaaggaccgtgatcggaaacccaaacccaaagtcggactcagacttaaaccataaccgggttctagactcggaccggcacctaggacccagacttggatgagggactatgacccgggacctgggcttcggaattggcatcgagacccagcacctaatcctagacccagaccatgaactaggacccagactaggaactgggatacgaagtggaactagactgggacccaaggctaggatgaagatctggacccaggggttggacctgacccatagtcaatgttttgatctgggacccatacctggactcaaacccacacccagacttagagccacacccgaaccaagacccggacctgtaccccatgacaaaaaactggaagcagatccaaaagtagaccaggaccgaggaacaagactaggggactaggacccggtctcggtcccagaactagaatctgactaggacccagacccaaacccagaccgggacgctgacccgaatcaaaactcggatcgggactcaggacatgaacccaaactcagacacggacttagacccaaacccggacgcagaacccagaccgagattagagactcggacctagaggtccctcacctagattggagatccaaacccaaaattagaactagaattgggacccaggatagggattgggactcaagaccggaaccgacccagtctcggtccttgacaaggacagggagagggactcaagatccgaatcagaatgagattgggacccaatattgggatctggatcatgacccatgacccgggcttggacccaaccagtagtcggtgtctagatcttggaatcgtacgaagatccgagcctggaaccatttccaaaacaagaaccccacctagacttgaattcaagacccgaaattgaaataagaactggaatcaggacattggaataggaatagattcaggaccaagaaccagatctagatgtggaatcgatcatgcatccggaccgagactgggatcgataccatgacctagacccgaacccagacctagacttgagcatgtacctgcgacctaaaacttagataccaggactcgcgacttggactagaatcatgaccagtacaagagctcgaacacagaccccgacccatacccaaacctaaactgacccaaaccaagacctagacccaaacctagacccaatccctaacctagagccagactcatacaactcagacttgaactcactactcggacatgaacccgagacttggacccggaccgagattaggactacgactcagacccaaacaaggaccgagccctgaacctagactgggacaagaaatcggattgggactgggacccaggacctgagatt

SEQ ID NO: 133407 - DNA, 1114 bp, Cannabis sativa
  modified_base (26)..(53): a, c, t, g, unknown or other
aagttcttatttaggatgttaataannnnnnnnnnnnnnnnnnnnnnnnnnnnggtaaaataatttccaacagcaccatcatggaatatacctgatataataaaaagatgttatagtactcctacgtaaacataaaagagcaacaggcaggccaaagaaacaacgatacaaaaatacattggacgaaaaaatacaagtgaaaaacgaacaatgccaccaaaaaggacacaacaaaagatcatgcaaattttattaaaagataatttttaaaagttgaaaaaattgaaaaatggcaaaaataccttttttcgtgcatgcttagggtttaaccctagccaaatttttaaaacttcaaaaaaatcatattttttcaattttaatccaaattaattttggtaaaaggctaatattcttaatttttttaccatcttttcaaataaaataattctggatcaaaaatcatattatttttcacaaaaattttgtaatacacaatcaatcatcaattaatcatataaataaacatgaacacatcgaaatttatcagaacacatcgaaatttatcaaacaccgttttaaatccaaaacaccgttttaaatccatattcaccgttttaaatccatatttcatgaaagtaaattattaccatagctctgaggccagttgttggaacttattttaccaatagctagatttaaaacatgtatattgattatagaactataatctaacaccctaaatatgaatcttctaaataatgaaataaacacatataaaattatagaaaactttatattggtggcagcagaatataatgtctctttccgtttagatctctaacccttgatcctttctgtcgcagagtatgatcaaaatctaaacctagatcttcttctattgttagaattcttcaaatcttccacaaaggcttgagtattggcttgaattgtgtggaaaattcctcaactcaataaaggttcaaaaattttagaagaggaagaagaaggtttcaaaatttgagaggctcttttctattttccaagttgtctgacaaagtagcctgatgatggattaggaaaataagagtcatctctttctatttataggatttca

SEQ ID NO: 133408 - DNA, 812 bp, Cannabis sativa
ccagcccctaactcattaataaaaaaaaaggaattaacttcaaagaaaaaagaccatttcactcataacttaacacttagaaaactctaacctaggagtaatctggtcataatcaattaaaattagacatatccccgccgtaaaatttgtgtcatatattcgtgttcgtgtgccgtacgttgaaacctattttgccgcctctacccctaagaaaaactctagaaggctttaagcaaggcatttcatttcaatatatggaaaagaagcctcacataataaagtattgctatacaactttcaaagttagatttcaatctattacaatccaccacattataaaaataggctttagtgacctatgttgagggattctaatagtttttagtgaccctccaccgtgcgtcactaagtgactggaaagattgcattttgtgacacttcaagttaggtcactaaatctttttagagtctttcacaacacgttattgtacctttttgaagtcccacattatctgaatgtaaagatatgagtcacccttatagtgtgccaatatatacacttttttttttttcaattttttaattttggttgaataaattaaaatgtgtatgattataataattagtcacaattattttacttttagtcacaatattttgttttgactaaaactaagattttttgtagtgataagttaggtatgtatttgaattttgagatgtacacatttctatctttaagaaatatgacaataaattgctatgggaaactgagatatttagctatgaatgacatttattttcttgaaatg

SEQ ID NO: 133409 - DNA, 1012 bp, Cannabis sativa
  modified_base (379)..(387): a, c, t, g, unknown or other
atttttatttcatttaattagtaattataacaaattgaaaaaaataataataaaaaagaaagaatatatagtttataaatcttaaatctttcctttcaaaaatatgtaatcgaaaactgtgaaaattgcaaagaaatatgtaatatttttttaacaaaaaaattaatgaattatataagatttattttcaaagaatatacaataaataagttttaagtaaaaaaaatagtttggttgctattggaggagttttgagcagtttggggggcttagaattgattttttttttttttagttttttttatccagacaaccggaagtcccactaccaaaaaaaagactacctttagtgacaaatttttagtcacaacataaattnnnnnnnnntaaatgtgacttttagtcacaaaaaaaaaggttatttttgactaaaatatagtatttagatacaagatgtcactaatttagttttagtcacacaaatattgtgactaaaaacatatttactcacaataaattgtacttttaatttgaaactaatacctttatagtcatggatcttttagtcacaacataaggataataatttataattagtcacaattttttaacttttaatcacaagttttattgtgactaataataagattttttatagtgtccgattgatacatggccataccaatcagaagtccggttggacagttttgaggaaatgttgatttttcgtattttggctataatttcactttgatgttcgttttggacgttctataaatagttaagaagctcgtgaaatgctctacaacatggtaaataaattagagccaaaatatgtattttattttaggatattttcaccacgtagttgggtagaaaaatcctagattttaaatacaagtattagaaagtgttttagaattgacacttaccagtttaatactgatatgacttagagtctctgatcgatgagtaaaattctactcaggttttccggcacacatgattatgg

SEQ ID NO: 133410 - DNA, 628 bp, Cannabis sativa
taaaaaaagcacaaagatttataaagattcagctcctttatatatggctaatgacctattctcctttaattgtattacttgtgagataatactggacatatcactaaggaatataaagtgatttctagttttggttctcaaagtatttatagaggaaacctttcagcaaattgttcttagatgtgtaaatatgagtatagctcttagtttctcggtctagcccccttccccttgtgaatgccttcattatttataggagagggttgctacatttggctccgtaaaatgagtaaacaaataataaatatccttatattattgagtgcaattaggatctattgaagttcctttatttcgagtagatttattggatctgagtttatagaattcaattggagatatttgtagaagcttgttgagaatgaaatcaatgcttgcatatctttgttcagtattcctggtagaaattcatataacaattatcataacaactaacaaaacaacttaaattgtaattaaaatccacatagaaaccactagaacaattcaaactttaaatttacaaaacaaaaaaaaaagtaaaaaaaaaataatatataaagtaattctgctattttttttttttttt

SEQ ID NO: 133411 - DNA, 1880 bp, Cannabis sativa
  modified_base (1661)..(1671): a, c, t, g, unknown or other
tttttttttttaatgtaaaagtaattaattagtttcttaagtaaccaaaatgttacttttgaaaaggtataatttttttttaaaagaatcaaatccggaattaattttattttaggcatattagtttagaattaaagtatcttttaataatgtaataaggtattattgtaattgagatttttttaaagtattttattaatttgcattttatgtatatttttgaaaaatgccatgtacatatgggctagaattctcatggatccaaagtccactaactgtagaatgtggactttgatccaaagttacatacactacaactacgttcgctttacaattgactcaattgtccgacttttcgcttcggaacaagtcctggtaaatttgcatgtgactatatttctcaaaatgtagtagaggactcatacttataaattatttaggcaaaattacaccgtatattatttttttgggataagttgaaaaatatttttttttatatctattaattaaaaatactctcatgttattttttttattaaaatatacccattttctaggtggattgcctaatatactcccactctctacttaactttagcatataatttacataatttaaggggtctaatgggacatcatctacaaaagtgggtatatttaaaaaaatatgaaaatagaggtaaaaattaaaacaagtaaagtaaattaggtatacaatgtaatttcttcctatttttttgcttattttttatttttatattgccatgcagtataattttaatacttttatacggtagtatattatattttttaaaagttttgatgttaacgtgggctgttatttttagtgacattttaattatttatttttttattttttttacttaaaattaataatgataaaaataaatacatatatatatatactaagttgatgttacgtgcaaaatgcacgtataattagtttttttttttaattaagtttaataaagtgatattaagtgcaatacatgtatatttaattttttttaattaggtactgttttttttttaaattattgaaatagagtttgaataaggtgatattaagtgcaatacatgtatgtttaatttattttaattaggtactgtatatttttttttttaatttttgaaatagagttgggattttgatctttaagaaatttttttagctattgctacattgatgtatcatttgaatgtgattatatatttttaaatttttatatttttttaattaggtaacgtatttgataatgtatatattgtaatttatttattcttaataagaactcacaaaaccaaatttgagtgtgtctatatataaattgaatttgtaaatttgatataaaggttttttatttgcaaactttacgaaaaatatggtgtgcgaattcaatttaaaatattaaataaataataataaagttaaaaatatagttaaaaatatttataaaattttaaatttaaatttctttatataaaatatttacatagttttttattttattttaatttaaagttaaactaatatatttaaaaataaaaattaaaaatattaataatattttaagtattttaaattaaaataaaaatttatttataaaaaatattaatataattttatttttaaatatatnnnnnnnnnnnataaaattaataaaaaatattctcgtaagtaatagaatagaaacctaaaaagcatcgttaaaccaagaattttattacatagccacattttatgtagaatagatatgtgtagtagttaatattttaaatttaaatttctttatataaaatagagaaatttgcggccaaacctccttatgtttcatttgtttaacacttaaccccctttt

SEQ ID NO: 133412 - DNA, 834 bp, Cannabis sativa
tcagtattcaggtatatgttcttatgtttttctataaatatgttttcattaatctgtttatgcacatttggtctgctaagaaatttacaaatgtattcaaccttacataaattcatcatcattatcgattattaatacgatgaaaaacatgtaactaatatataattattagttcttgatcgaataaatgtttattatagtgtgtgtatattaattggtttatgtttttataatgcaataattccaattagtattgaaaaaaaaactacatttattacagtattaatgactcatagttgcttgttcatttactaatacaggataagaaaaacccccatagctgagattcttgtagataatgatctgagtgtgacaatctggcttcaatctacataaattcactcttatttcacacattgttgttctgtgtgtgtgatataaaaataaattgcattacatattgaaactattttgttagagctactttgggactaggatatgctttgcagctgccattattgtattggtgctgcaatagttactacaggaatgaaatgaatgtagttttctcttacaagaagctgttttgtaaaagaactgccactctaaagctttattgtaaaagaataccgatagaaaattatgataacatttctctatggttagttttatttttcataagattttctatattaaaattttaactaataattctttttccctattttaaaatgacattttttcattcatttttgttacataatatttcttttaaattccaaaacgcatatattgatccttttaatttttccgaaacaaagagtaaatgttgaa

SEQ ID NO: 133413 - DNA, 633 bp, Cannabis sativa
gtagctcaacaagttggatgaacgagacccaacaagtgattttaaagccaaatatttaggagttgggattgtgggctaagctctcagtgtgatgacttcgcaattgaaaattgcatgatgtcttatattaaaagtttttgatattgtggttgtcaaggagcatgttgagatggagatatgtgtttactgtgttatgtcaaaagtcttcatgataatgtagaaggtcaagctacgagttctattagtgatagtggcaatacaaagatgattttgccaaaagagaagctaccgtccttaatttgaaaagattgattgggtatcaattgaagtctgatattaaaagaatgtgcaaaactttattattatgaaatttgttggggagtgttcaaaaataaatccattgagaacatatcatatgttagtgggagcagacaaattttccatcacctaatcttctatctagttttttcttttcctttattttttgacaaatacttttatctggtgaatttgaaggttatttaacaacttttttgaaaaagaaataaatagaaaattgggaaatttataaaaatactgaaatttaagctaatttttacaaaaatactgtcacacaaattttttttcaaaaat

SEQ ID NO: 133414 - DNA, 1164 bp, Cannabis sativa
tgccatttaagggtatggcaaaacacagctcagtttgaacatcagttagaagttttgatgggtaaacaagctcataaataaaccaaattctttgccaattaaaagaaaaaaacaaaggtgagaggaaacaaacctggacagaaattgtgcttatgtagatatagattgcatatctgtaagagtaaagataaagcatcattaagcatgtatgtaagtgactgttgcttaacaatttaagggaacataaaagcaagaaatatatgcttgaagcgagtacattattcggtgaatgggagaagaactaaccctgtgaagtaatccctaactgaaaggataaggttgaccaccacagcatctgctaccaacacataaatgactccaaatctcacataccaccggaattcacgaatgtaaactttagtttcaagtccaagcataaccaacaaggagccccaagcaagaaattcaataatcaaagatgttatctgtgaacaaagaggtaagttatattgcaagtttcagactctactagaaatgaaacaactcagaatttgaagtacattcttatgtataagacaaaataattcaccaaaatgagtgaaaacccacctcaaaaggagccagatcagtcttaccatccagattaaagagtgaaatattcatcacccatcttagtaatggattggcagtgttgtatgcagccaacaaacacaacaaataattgaagtaatttgacctcaaacgaaacctttgtgctttggaattgttcatgatcaaccatattcgataaaaacagaggcccaaaagaaccaaatgagaaaaggaaaccaccagagagtcaattgcacaaggtgtatacgaaccaaaagcactgtctactagtcttccccaaaatccataagcttttggctgacaataccaacttagtggcttaaaccccatatttgtttctcttggaaacttcacttatgcttgctaatcactatgtgttcttccacacataatgcacttcctacaacataaatttgacaccatactctcagacccatttccactaataacatatagaaaccaatcaaagtaaatatattcagctccaaaaacactttcaaatttgtttacattttcccatcataattctcagtatctaaacagtgaaaacta

SEQ ID NO: 133415 - DNA, 848 bp, Cannabis sativa
agtgactcctcaccttctaaattaatgttatttttatattataagtgttattaggatgatatatacatatatctatatacttatataatcctgttgttaaaccctattatatggtagtttaactatttagatttttattttttctattttgtgagtttttataattttgtttcattgttaaaaaatatactttatattacataaattattaaaaattagataaaatttaaaattagaaaagaagcttgtagtatcatcgctctaaagctcttactctctcatacattttatatatatacatacatataaatatatatatatacatgtcctttgaatttttttatctacaatattaatatattcatatgttttttttttattattatcaacaattataaacatgattaattagtgcatgctttttaaacttctttcttcaatgaataattccacaatttaaatattaacattaacattaaagtttgggtttaattgattaattggaacaattacatataattttggtatataatgaacacggattaattattattattatattaaaataatatagaaaagtagattaaatcacaaattttaaaaaaatcgaatattcataggagaagataacttggtacaaatgatctattaaaaaattatacacacatatataaataaaataattttatgatagagacatacatatattattttttttaatttttatcatgacaacgtttcgttatagttattaagctcttagagaattttatatagattgattaatttgttattttaataattttccgttaattttttttttttttttgtaaaaatatttatgttac

SEQ ID NO: 133416 - DNA, 1847 bp, Cannabis sativa
tcccattaagagtattgataactaatttcgagtcactctccaccaaaacaaacttataacccagctctagggccaacgaaagagctaaacaataggtcgctgcttctccacataagacatccgagaagtccgaccgagctgtatgaatccgaaccactctacccagattgttcctttctaccactgctatgcacatgctttctaagccaaccctgacatcacaattcaattttatccaatcctgaggtggaggcctccaggtccccttcaaaggtggtgtcgggcaagccaagaaaacatcatgaagctctgtataagaagtacaaatctgatcaatacatttcaaaacatccgaatgacagttattatgtataaaatcgtttcgcattttccagatagtttcaacaataatcgaagcatacaaaaagacttcttccactcgtatccccctagtattgagattccatataaatttgacctagtcccaaactcgaatcccagtattacagataggatagatgccccacggtgaagatctcataaatgcaacccactcaggacaagaaaagatgttccatggattcctcccctaatccacacaaagggcagcaggtgtcctcaatgtggaatcttctaccaatcacggatctaacagggagggcattagagaggatgcaccaccataggatcttatgtctctccaaaattttgctattccataacttattccagagtgctggagcaacctcacattgaggagctctttccaaagcttgagacaggtaagccgatttactcgtaaattgcccatttttctccaatgtccacacccatctaccttcaccttgacctgaaggtttaccacctttaacgattgcagacaccgtttccttgtcaaaaaggccatttagctttaggatatccaagtctccattagcaagcaagagatcagccacatagttattattggttaaaacaccaccatttggtttcggaatgaaacctttatagtgaggaatccagggatccctccaaatactagtcgcccttccattcgtcacgactttaagcccctttccttagaattgctttggctttcacaatatttttccaaaatcaggaatctgaatctttgtatctacagctgagaaaatccttccctttaagatacttgacttccaatattttacagcataaagcctgagaacccttcaaccaattccacccccacttggctaggaaagccagattcatttccttagttttcctaaagcgtaacccacccaaagacttaggaaggcacagcttatcccatgctttgagatggagaccttggttccctttttcaaatccccaccaaaaattcctgactaaaccatctatcctcgtgaccatacgactagagagtttcgtggtctgtatggcataactcacccatatatttcttgagtgttttataaatcctaacaagtggtagcagagccatcttttgctaaattgattgaagacctgatgattttgtttatgaaatttagagatttcgaaaattaaagttttattttttgtttgaataattcagccgatatattattttatatatcaaattctcttttggtttatatacgatatgtgatttgtactgtgtttaatattttatggtttctgtatatatatatcgtaaatttaaatatatgtttcgatttatgtatttgttcagtaccatcatatcggcttcaatcgtgtattcagtgcatgccgatttttttttaaatatgcgctagttgtgtttaatatatatatatatatatatatagggtaatattatggtaggacctagcaaaagttcc

SEQ ID NO: 133417 - DNA, 777 bp, Cannabis sativa
cccttgagagtgtgtagcaacctatgttagctagaagggcaaatgagtcttttggcaaggattttatttgtcttatcctagttgtgttatgtgctgaatataacattaattataaaaaaagaaagaaagacaaaacttggtttatcttaggttagaaggaattaaaagaaacctagaaaagttatctctctctcccttttcctctcgatttggcaagaaccagcatcaagctggaattttttctcagttctaccagcgggttttagcaagatttagtgtgtgatttaaggtatggaaccctagtctttctctttcgcttattctttagtaaagaggggttttgatatatgattttggaatttctgatgttgtgctattagttcatgtttatttaggctctggaacttgtttatgtttgtttaggattgatttaggttatctttgtggattgtttcaaggttttggcaaggattgagtttgaaaactcaaacctagctctctaatggtggattgagattttatgtgatttaatgagttttgttgcttgggattggtttaatatagtgtatgcaggtgttttagaaagttgtggaaagtttgggattgaattgaggagtggggatcagttttgaggttcccagctatgaaccggtcgaccggttctgggaagcctatagtaaccggtcgaccggttggtacccaggaaatggggttccggttgggaaccggtctgccggttggggctttttcccaagccctagttttttccgtttttaa

SEQ ID NO: 133418 - DNA, 2094 bp, Cannabis sativa
atttttgtaaaagttaactcaaattccagtatttttgtaaatttccctaaaaaatatgatgtgttattctgtgtttttgttttttttattttttttttttctctttgcagaatgatttagatcgtggatgaaatttcattatgtggataaacacacctgacggagaaatagggatgatttaggagggttgttaagaaggttgtggattaaagttaagaaaagaatgatgaatttgacatattgtcaaaacaattgagaaatgtcaaatttagtctatatatttgtattggagttattacttttcttatgtagttatttgccactttacattttgatgttgtctcttttgtaaattgtgaaattgaatataagattattacttttgtttgattattgctcatttattataagctcatatcggaatttttatctaaattgtgtaaatgggatttcggttggttcagagaataaaattttaccaaattttggtgtaaaaaaaatataatggttttacataattttagaatgtataatctaatatattattgaaataaataccttcatttgtcattaattagaattaaattttaatgtttattgcatctggttctgatccttactaatcatacttaagttatataaacatctatgatgaaaaataaaatgaacgtgatatgttatggtaattttttgcttaaatgaagaacttaatatctgatgcatattcagaacaataccaacttaagaagtaatatacatggaatatgttctagttgtgattcatgacatatactaatcaaaataacagccataaattacaagtactgctatttaaatccacatagaaagtcttctcaaaatgggacatataaacaactaatactcggtacataaatccaactctaaaactaatataaactccatacgtaaactatcaaaccaacattcaaaatgatgcataattcctgtattcctaaagaaaaaaaaaaattgagttcctcctggtattcaaaatgatgtataattcagcagcatgaactttgtattttttgtctttcatttttcattgattccaagcctactgattttcctgcaattccctccatccatagttgttctattctgtataattaaaaatagattgtaagcagtaaccttggtaaatattgtccataatttcaagatttaaaataaattcatttttaatatatgttacctgaaattgttcattagtttcttgtgaacttctttgttgggttgaagaactaacggaagcttgaggtgtaggattgttgtttctttcataagttccgggatcccttggttcgattttctttgcctataatagcatagaatataaatattagaatgaatcagaaggtcaatagtatggatgcatagaagataaatattaagaacatatataatctattaaataaaaaaacaacttcaaaagtgaggagaaatagatacatactgaagtaggattgtttctagcacatgtcctcaagttgtgtccctttgcaccacaagaagaacacttcattgttacatattttctcttcagtttcttccccgaaacaacttcatcaagctcaagtttcctgcttttctttggcctacctggctgtttttttgttaattgggctttgcattccaatcttgccacttctaggccactcctcttgattcctaagcggaaaaatttggtgagagtacgctttcatgtagaattcttttgtgtaccacttgctaacatacaactctggttgttgtttgttgtgccatactgcagtcacaacatggctacacggaatgccagtaagctcccatcgcctacatgaacacacccatgagttcaaatcaacagagtacatacttctgtacatgttatggacctgccaaatcaattctcctgatttggtgggcaagtgggatccagcttctatcttgttcttttcaataatttttactgcttttgttctactttcttcttgttaaatgccaaaatattacatattttatagtgtaaaaatacaaaataaaattaattctttataatatttttatgaaattaatgcaatatatttttat

SEQ ID NO: 133419 - DNA, 704 bp, Cannabis sativa
tatttgtaagagtattttcaacaaaaatgcttctaagaatatttgatattatgaatatatttttagtatttttttaataaatatttactattaggataaaaaaatattaaaaaagatatcatacaataatactatttttttttaattattattttatcataaaataaaaaaaaaattaattatttatattaaataataatataatattattttaataattttaaaaaatacttaacattacaacattttagaataaaaaaatattaaaaatattattaaaaaaatattatatttttaaataataaaaaaatttgttaacaccataagagtttattttaaaatattagtggatttgatagctaagacacatggcatcacacggttggacccaaaagaataagctcacgtggtgttgataaccaacaaattctttttttcaaaaaaataaaaataaaatacataatattaatgaataatagtattagaaaaataaaacttttttttttttttgcaatgagaaaaataaaactttacctgtgcatggataagagaaatatttatagattatttacatcatatcttgaaattttaatttttttattctttttactgtgggctaaaatttttttcaaaaaaatattgtatatttttttaaaaatactgtgtactatgttaagtttttactgttgttctacggttatttt

SEQ ID NO: 133420 - DNA, 1055 bp, Cannabis sativa
  modified_base (1005)..(1012): a, c, t, g, unknown or other
gggttatttcagtttgtaatttttatcggttttttcagttcggtttgggcggattattcggtttgggcggtttacgaatttttttatacaaccctaatcactagtgaagggtttaatttttttcaaaaaataataccctacttactacttcttagataattaattgcatacgaatgaagaataagattgtcaaagattattgctgcaaaagtatatttaatttagctacaaattgagtagaaaagtaaaagtaataaagtggtatgattaatgcaagatgaagatagcaactaccaatttgagtggccttaaatttgcatcctgtttcaatttggccctcatacattattgcatgcaaaggcaaactatgctttcttaagttattatgtcacttttactgattagacacaatataagcatgtgtgttgttcctcgtataacaagtaacaaaaattagtgtcgtggtaccataaagaatcaaattcgtgctttctaaggaaaaaaacaaagagatggagagatgtaaaaggaatttaaaataaatgatatatataaagttgttttatacaaaatattcattcctcatttatacatgtattttttttttaaacgataattgttgattgagatttttagtaactacttattaaatataaataatagtaatctgagaaaaataaaaaatatttttttatgtgatttcaatattaataagttgtagtcatggccggccaaagggtggggcagccggggttaggccccagacccctccatttccgaggccttcaaaaattaaaatttttatatttatgtatacaaaaaaataaaaatataatatatatatatattagtttaattaattttgtgaaagagttatagcccaattggtaaaaataagtggatgtattggttttaggtgttgggttcgattcttaactttctcatttttcgactattttaaaaattttagaattatatatatatataagggtaaataccattttnnnnnnnntgttttgtaaaagttacagattgaaccctgtgttttgttaaat

SEQ ID NO: 133421 - DNA, 1439 bp, Cannabis sativa
agtctagaacgttcgtatgacagtactattggcaacaatatcagcctatacgcggtacgctagtcataccctagccgtatcgtgtgatattgtcaagtagtacggtactatcaactataatatcagcttatgctcgatacgctagtcatactctaggcgtactgatgtgatactgccccaaccggtagagcggtttcccaagtagaatccagttctgtggggtttcttggggaccaacaagaatttagattcatacaggtcccactgaaccggttgaccgattcagtggaggaaaatttcaaaattccattactcactcaattcaactccaaatctaaccagaccatccagacatgatatttagaccataaagtacatattcaaggcattaaaacactacaacatgcacaaaatcaaaatccaccatgtgggagcaaagtttgagctcttaagctcaaaccttgaaaaaacctcaccaacaaccatcaacccctcaattcaactcaaataaacataatctaactccagaaaacaaactcaaacaccaacagcaactacaaaactctaaactcacaattcatgcataattttcaacttaaagcttaagaaactaaaggaagagatgttaggaaacttatcttgagctgagaccacttaaaacttgctggaatttatgaagaaaactcagaaccctagctggttctatggtgttcgaaaaagagagagagttttggagagagagtgtgttcttcttttatttgattttataaaatcaaaggataattaaaataggttttatctaattaaatcagcctaattatcagcatataaactcagttaaagtctacaaaaggacaaaactaaattagggcaaaaagaccattgtgcccccactcaagccaaaaagtcataaaatcacttaggggtattttggtcaattctaaaatcttgactaaacctgaaattcccaatatctaactatatttcttggctatactaaaatttgattataatagccaaactccgcgttccaatgttgccgggacaaacatgcaaaaatataaaattccatatctgacatataacatgcattctaaattcatataaatccccataaactgataattcataactaatatacaagtttcataaataaactctatttatctgctaattttcaaattaaagttaagcggtctttacaattattcccccttaaaaggatttcgtccttgaaatctaacctcaacaactttggatactgagccctcatgtcggactctaactcccaggtggcttcctccagcttcctccaccttgctatttctatagagtaccttgaccaaagctatggtcttgttttgaaggaccttatctttcttgtctaggatctaaactagctcttcttcataagataagtctgattgtagctcaagatt

SEQ ID NO: 133422 - DNA, 1050 bp, Cannabis sativa
  modified_base (1011)..(1017): a, c, t, g, unknown or other
aactaacttaactgtaaaaacagttaggttagttggacagttaccaactgtcaaaggtgacagtaacaccaaatttaagtggtcaaacctcaacagttataattataatctcttattacaatcttttaattaatttttatgttcaaaattatatgtcgattttttttttaattttccttttataacactattctttataattacataatcatcttgataaatttttgaaaatattttaaataatttacaataccgaaaataaagttactgatatttcagtttaccacacgagttcaaaaaagttcaaacgtatttttgacactgtaaactatttgaaaaattttaaaaatttacaggtatgatattgacaaaaaccgccatgagaaaaaatattccagcatgtgttttcaaatataaaagttaactaaaaggttacaatataagagattgacaataatactcctcatattataaataaatattgatcacgtaatataaattcaaaataaatatacatgttatgctgtgtaaccattatattcacttgagtattgtatagtataatttagggaaatttatacaaattatctaaaattgtatcattttttatttttttatgaatattttttacatttttaaaggaatgttgttttctcattttttttagaaaacaacattattttcatgttgtgaaaatataacatactatagtaacaatgtaaaattaatgtatttttaagaacaaccaaaataaaataatttatatttttgtaaaaaaataattcgtaaaaatataaattagctcttcatcatttttgtatatatttatgaaataatctttgtatgatatagtattatagtcattttttagggtaatgaagccctgaggacaactcttaagtagagcaaagggaatatgtgagagaacaaattttatctccaatccaacacataacttctaattttttaattttttaattttttgatttctaattttttaatcacaaaatnnnnnnnaaatttttgtttttaaaatttttgtttttgaaa

SEQ ID NO: 133423 - DNA, 744 bp, Cannabis sativa
ttcataacaatactaattgtattacatacaacgtactatgcagtacaatatacttttcttgcctcaagttctggttcaggtatttggccaacctactaagcgtaggattgaaaattacgggccctatgtcataacaatactaaaccaataagtgtttatcccaaaatactacttaatagttgcaaaggataatgtagggattcctagaaaatctggtagttcaaatagactaaaataaaacttatagtttgggtctaaaacatatatcatatggtagagctcgttgcaagcttcaaaacggtatatagaacgtctaaaatggacacccgagtgcaaagttatggtaaaaatacaattcccatgtttccgagactgcccagaactagttaaccgcttctacaagaatcgattgaccggttcccaattggttgactggttggttaggtacaaaaaatatgattttcaagtttactcactcaccgaaatgctattggaacctgtccaaaccaccctaaacttcataaggcacatgtataccatacatattgccatacttacgtaataaaaactaaaagcaagcccttaattggcaaacgttactaatgtttggacttaagctataaaaagttcaaaactcaatttctaatccaaaattaactcaaatctagcaagaaaatataataactagtcccatgactacccgagaacaattctataaggtcagaaccttcataactattctta

SEQ ID NO: 133424 - DNA, 822 bp, Cannabis sativa
ttaccgaacggcaccttagtttttacataaattaacaaaaatccaacattattgtagtatggactctctttgtatactctgcagtctgcagtgtcaatcaatgccaattggcaacgcaattagtaataataataaaatccttttacaagaaatttattcttcaacatttgataagagtaggtagttgatgaatgatgatctattctagattgtacatttaagtcaaaagaatgaaaatacaagttggtagattccaagataccatttctaaattattaattggatattaccaactaaaaacaaatgataaaataacattttcttaatgactaaattaataaattagaatccatttaaaaaaataaataaattagaatatagtatattttcatattaaaccttgtattttcttatcttaaaaactaacatatatatttattataaaactattatgaataatatataaaataaataaaaaaatgtaaatgaagaaagaaaaataaagtgaaagaatttttttcagtgttttattttgatcgaatgatctcttatttatacaaatattagtaaataattcgcgttttgcggcgaatatttaaaaaaaaaaattatacttataaaataattatatttttaatttatttaatgataactaagtaataatattatatcaaatttaaccttactaatttgtaatatattttttcttttttaatataagaagttagagtaatttgcgatataaatacttaagtttaactttcagttataaataaataactaagtttaatttttgacggttataattctggaacttttgta

SEQ ID NO: 133425 - DNA, 711 bp, Cannabis sativa
gataatgtgcaacacagatatttccttgggaaattatgaatcggcaggggcagctatatttcgtaatgacaaaggtgacacactaaagatttatactttccattcctattacatggactcacttgcaggggaagtttatgctttagttaaaggagctgaaatggcttctgagttgggcttcaacaaggtcattttccaaagtgactccattaatgcgatcaatgcgattcagtgcaaccagtcctccttaagaaccaatcaccacaacatccaaagccttctgctcaaattcgacagtgcagtgtctgctcaaattcgacagtgcagtgtctgctcaaattcgacagtgcagtgtctgctctcaacttgtgggaggctcattggatccgaagaaacttaaatggtgtggcccatgatgcggctcgctgggcaaatcgacacggaatgtttgggtgcttcgatttggtcaattttggtggttccctgtacccttgggatgcagatggccatgtgttatcctagtttgttagtttcttgtttttttagaagttagactctattgctggttttttttgttttgttggcttagttttttgttgtttgctttctctggtcccctgctgtgtggggctttgttgtttgctcttgccttaatggctcttaatcaaaaaaaaaaaaaaaaaacatttttcgaaaatgctttaaaataaa

SEQ ID NO: 133426 - DNA, 520 bp, Cannabis sativa
  modified_base (475)..(475): a, c, t, g, unknown or other
atacacgtttattaaattgtgatcgaaacaaaacaatcgattaatggcaaacaatagtttattatgtggtttactaaattgaccgtaaaaagtttagaatcaatttagcttgtttacatattagaaaatataattgtgaatgctttaatttgatttaaattgagatgtaattatttgttatttattgctttttaaggatatatttgtctttttatttttaattaataatattaaattaaaataaaataagttaggaaagaaattacaaaagaaaaataagttaggaaaggggatcacattccatatagaaatgggggagaatgtgttcttttcttttctcccaaatttatcttgccccactagtttctccattacaaaattttggattcttttaaaaagcttaagaggcgggagagctttgtttgtcttaagttggatggtacatcatggagcgtatgttgggttttatgccctnaataaaactcatttcaatatattcagatttacttattaatataga

SEQ ID NO: 133427 - DNA, 552 bp, Cannabis sativa
gaacatggaacgagctggtatagagtttatcacaaggaagcttgcaaaggtcacgctacaatcaaccttgttgaaagaattcaggaggggcaaatgacagatcaaaagctcagtgaattaaagcaagaaattttgatagcattctattttgtcgttcaaatatcaaagcatgcaatgctatcaaagaggcccttgcctagtatcagaaaatatcagggcaactagttaattttaaaaaattctctacttttttcccctaacactagcctcacttaccagacccttatccaggactacttacagattcctactaccaaccacatggataagtatcttggactgccccaatgctttggtagatcaaaaaaaccattctttcaatcccctcaaggacagaatttggtcttacctatcaaaatggcaggggaaatttttttccaagggaggaaaggaaatccttcttaaggctgttatccaagccattcccacctatgcgatgtctgttttcaaactccctgactctttctgcagctttgtgttgggttttatgcc

SEQ ID NO: 133428 - DNA, 589 bp, Cannabis sativa
aacatagcatacgtgcatcgcacgtaacaatatactagtatatatatatatatttttttcaatgacgatgttcttacaaaaaattaatatttattatgtattaatccttgaaatacatttttcttaacaaataatccttgaaatactccatgggcggaggattgcgcccttctccatgagtccatgagctttttctgcagttagaatatactcatatcaatatattctctgattacgtttgtgcctggtgaattctctttcaaacaagaaaaataattgcaatgagtatggtattgttcttattgatattttttacttttggaagtcttttctcatgtctctatttctcgtagtaatcgagctagttagtaaatactcttatctattctctagctagttagtaatcaggtttagtgacatttttattagtggcattttttaaaaaaatgtcacaataatgatgttttaatgacatttgttaaaaaatgtaactataataagaataaatgatattttaattagtgacattttttttaaagtgtaactattgatatattttagtgacattttgtaaaaagtgtcattaatt

SEQ ID NO: 133429 - DNA, 1086 bp, Cannabis sativa
gacaacttttgtattaaatgttttgaatcagttgtaaatattttaaactcggcatcctagatatataaaattagtttattttaatattgttagtaattaataaagttttaattattcacgatttttaataaactcgttgattagcaacgaactacacaattaatataaaatcacgataacacacctaaactagtagggtgttacaagtggggattgaggaagacaacctagtagaggtaaaagacatgtcagactacaacaactaggaggaaaacaaaatgtgaagttcaaagaaggaaataacactcacttgctatattgaagtccaaattgagtgtggaaactctcttcagtgtgaagccagaggtgtagaagtagtaatctcgaaagtcatatgtatactttgtgaaacttgttgggcaggcaatactctttgagtgtcgctccaacctatggaaacctatcttctccttatggcctctcataagttgagacttaatcttgtagaaatacaagatttcttttggtgtcggtgtaggtttcttgtgctgagcacaaaaaatatatcatcctgacattaggctatacgcctgaggtataagtaggaagggcactactccaaccatggcgcagaaggtggcaaaataacacctcaagggcagatgtgcacactcatttctacgtgagaccagctccaaatgtcgaagcctcctttcgtacacttgctaggaatctccccttgaagagagaacatgttccagaactgtccctgaacactttggaggcccctttgggtcccatatttccttaaactattgtaaatcctaaacttattaacgtattggtccatctcccatggactatcattcagaacaagctttggagcgttttcttgctctaggatttcctcttccaagtcaacttcatcttgatagaccttcctaagcataatttctatacaaaagaaacgaatgcaagtagttagccaccttaactacctagtataaaaagggagcaggggagtcggatctgatccgactctgatccgacctgatccagatcatatacggatctgccccgccccgc

SEQ ID NO: 133430 - DNA, 701 bp, Cannabis sativa
tctcagtttttacatcaaggattttccactcatcaattgccattatcgacaacaaccactactgctgatcacaacagctcctcctcctctctcaaaacaaaattcatctttgattttttcacctccgacactaccatctctcttaatacccaaacaaacggtgttttcgaatactatacttcttttcgtactacacctgctcgaattggtttgacggagtatttgaaaccgccgaatgtgggtcatgatatggatgatgatgagttgctttggagagcttccatgtccccgaaattacaaaaaaacccctttccgtttcaccccgaaaatcgccttcatgttcttggcgagaggagccttaccgttggctcccttttgggataggttctttaaaggacatgaagggctttactccatttatgttcattccgatcattctttcaacgacacagtgcaacaaaactccgccttctatgacagaaggattcctagtaaggttagtacatatcaccccgcttaattatttcttccatttgttttatatatatatatataaaggaattattaaaatgttttgtaatataaatggaatactacacaaagcaaacttgaattttttccctacataaaaaagagcaaggatttatttgtagtttttcaatgtgttctcaattaaaactatgacatatctgatttgtgca

SEQ ID NO: 133431 - DNA, 890 bp, Cannabis sativa
tctctctctctctctctacactagctagtcgcaccatggcatctctttctctgctctctttctcgacaaagccaagccatgccttagttatagcctaacacaagaggagagactgcactgccagtcgcacagcctaacgacgatatagcagagagaaaagtcaaaactaagttacgttatcgacgattattgcaagtaactctctctgtttctttttgttttttttcttctcgccgactgcttctctctcgcgtcggtgtccgtctctcatttttttacaaggttttttcttttcggtggtcctatcatcctcagatctatatcaactcccttatatatatatgtttatactaatttgtatatgtaaaatttatatataatatgatataatttctaaaatatatttgtatttatattattataatagattttggatttgaaatagatatattcagttggtattattgtcattcgaggttgtagttttttgtaaaaaaaattgatttcttgtataaaaatggtggtggtggtgtggtggctgttcaatttttttattattatttttttgcttcaaattataatcgaagtaaaaaactaattagcgtcgatgcactactgattgcttcagttatgaaccaaagtaaaaactctttttttttttgcttcggttcataactgaatcaaaaaaatatttggcatcggttctaaactgaagcaaaaaatatgactatgtgcgtctctggttattacgtcagttaccctaaccggcacaaatagtttatgtgtcacttgttaggatttataaaacactcaagaaatatatatatcacagatctaaacatattcctaaaagtgctttaatatagaaaaccctaaatcacaaatttata

SEQ ID NO: 133432 - DNA, 1065 bp, Cannabis sativa
  modified_base (50)..(50): a, c, t, g, unknown or other
tactggtgttttataaaaacacttttgaaaagatttccgtgtgacagtanttttgtaaaaattaactcaaattccagtatttttgtaagtttcccttttccaatagtttcattttctccaatagtattttttttttattttttcatactatctaaaaatgacaaaaaaaaaaaaataaataaaatacaaaatacggatgtataaccttttcgacattttgaatgatttaatttttttcatacaaaaatatgtatgctagttttcacaacaatattatattatgttatttttgttgggctttgtgccctaaataaaactctattgcaatgtaatcttttttattcaattatcaataaagaaacaatgtgtatttggacaaagatgaaattttggaaacaaagaagtcgtgctttatggctgaaggaaggggaccgtaatacaaaaattttccacaggaaagcgaactcaagaaagaagaagaactcaattacggggctgcttgatcacaatgctcgatgggtgtatggaaataaaatggtgggaagggtagcttgtaactacttccaacagttgtttactactcagccggcttctgcagaggagttaaaagagttccaaagcatcgtgccacacaaaatttcccgagaaatcaatgagtaccttattacctcttttacgaaggacgatgtgttacaagccatgcgagatatccatccacacaaagccccgggcaatgatggaatgccgggcctattttataggaaattttggtcgattgttggagacgaagttactacagtttgcttgggaattctcaatgagggaaagagtgttgaagctattaatgatacccttatttgtcttatcccgaaacttccaaaaccagtccaaatgtcagattttcgtcccattagcttgtgtaatgtggtatacaagatagtagcgaagtgtttagcggggcgtatgaaacatagtcttcattaagccatttctgaggttcaaagtgcgtttgtaggaggaaggctgatccaagacaatgctatcatcgggtatgaaagcctccat

SEQ ID NO: 133433 - DNA, 1939 bp, Cannabis sativa
ttcatcaaagaaagctcggctcattgttctgtaagcccgtacttgtttagtatttatttgaatattaaatcatgttaggaagcatattagattatggttacttaccttattggcattgccttagaatccataagtgttgtagtaagttacaattgggtcattgcctaacaagactggcttactaattgacaggtttgtcctatagaatggacacctggtgtaatttggagagtcagagtagtgtggtcagggccagtaacgattggagagaatggagtccaagttgtccccgtaaccaaggtgaaagcccttggaggacttctgatgggagtgatggttatccgtcacaggctccgttggatttggagcaaaggttcgcagaaatggaagctatgattcaacgacacgatgaggagattcagaggttgaaacaataaaggtctcatgtagtatctatacctcatatgccaatcattctcgattcggtattaccagtagagcatagtatggctggtaaccaagaggaatcattgcatgagaaaatttggatgcatgaacctacagtccttcagggagattcagatatgaagaatgctttttggactaaaagccctaaagaatttattttaagacctcaagaggttatgataggaggtcaggataccacttgccatattcctatatatggcggaattggcaggggctccatggttgagcagaagagaaaacctacatcagtagtggtgggtttaagaagaaacaagcagcttcgaaggtatcgaggtagaggtggacgccctggttattcctaccctgagtgctcacgatgaaagaaacatcatcccagagagtgcaaccggaaggcatgcttcctgtgtggcatggttgggcactttaagaaaaatttccctcaagcaaagaaagataagcagaagctggaagcaaagcctatacttgctcagataattgttatcacccaaactaatggtgcagccagtccttctatggtgacaggtcagtttcttatcaacaactcccattttaatgtactatttaactttgggactatacacttataggtggtatgaagagtaattaatcttttgggtaggacttatgattttcttgaaatagggtttggaactttagtgcctagcagaaaattggttatctccaatgagtgcattaggttattgccggttaagatcgaaagatagggagttgagtgctgaccttattgagctggaattaacataatttgacaccatacttgggatggattttctgtccaagtattctgctagtatagactgcaagtggaaaatggtgacttttcagctagaaggtgaagatccattgatttatgttggatcagctcaggggtctcggatcccagttatttcagtattaagagctagggatctactacacagtggatgtgtagcattttttttagcggttgtgattgactccagcagacccgaaatatttgggcttgaggtagtcagggatgctaaagattttctcgatgtatttcccgaggagttgttgggattactgctataacgagaaatagactttgtgattgatttggcacctggagctgaacctgtttcaaaagctccatatagaatggctccagcagaacaaggaggttaagttgcagcttcaagggatgtttgataatgggtttacccgacccagtgtatcgccctagggaggttcggttctgttggtgaaaaagaaggatggttcccacagaatgtgtattgattatcaagaaaaagtatttgttacccaaaatcgacgatttgctcgatcggcttcagggaaatacggtgtttttaaagattgaccagcaatccagttatcatcaacttagaattcgggaagaagatataccaaagactgccttccgaataagatatgggcactataa

SEQ ID NO: 133434 - DNA, 711 bp, Cannabis sativa
gtaacttttgcaacacacagaatctaaaatgatatttacccttaattaaaaatgaaaaagataaatataccctttaaaaatctataaacaaaaaataattgcatgttatagccatgacaattttgtcaaattaaatcattctgattacttttcttagctatgtaaataaaataatataattttaaattttttttcggacaatttaataaacagcataataaaatattatttttgattattttttattttaaatcgattcatttctcttattaattattctgattctaattacagtttagtaaacgcgctattagcgtaaaatcatctaaccaactataccaaacactcagtagtaaaatattatttttagttattactcaaattattttattttttaacacagtgattagaatcacttataaatttatgatgtaaatatccataaataatgtaagaacctaacttctttaaaaaaaaaaacgtaataaccttactttaatagctcatcgtctaaccgaaaaatatattttgtgaaaccatatactactttgagcaagcaaaaaactacccaaattttgataagatatttgtaaaaaagaaagaaggagagagagaggagcaggccactagtactatgagattgatagtgttcgatactattcgatgtttgcaaagaataactttaaaataattaaataaaaattattaatt

SEQ ID NO: 133435 - DNA, 501 bp, Cannabis sativa
ttagaggttattcttaaatagagtctttttagatagaggttctactgtacataataatatgtgataaaggaagcccaatcttagtcactctctttctctctctctcatcaaaacacgaaagaaaaactcacaagtaccaccttcggtgatcctacttcgggcactgccaaacccacgtgctgaagcattggaatccccacccaacgatgacctcaaccccaagcagtgccgcccctttcatcgctgttagcccatgatcacaagtcaaagtttggaggtacaaaatttgaacggattttttgaccactctcaatgtccgtttgacgagtcatcttcacctttagatttagcccgttgagaaaaacaacttacactaagacattttgctcatcctgctactttttctagtgacgtttttgtagctctatccttttttggaaactttttgccgatatcgtgtattattttgataaatggttggtatgggtgtgatctactagt

SEQ ID NO: 133436 - DNA, 1147 bp, Cannabis sativa
aaaaaaaaaaacccaaaatataattacataatttaatacaatacaattttaaaaaagaaaaacacttaactaaacaaaatcaaacaacattattattctaattgagaccattgataaaaatggaagcaaaaagatctatttgatgcttcttcaaaaccaaaccaacctcaattcctccgcttccatctccacattccgccattgaaatagctccattctctatagatacgaaaaccaccttctttggccgaccccatccaaaatctatgctgtaaagttccaacttcggcgacccagctactccgacatggcaacaattctccgacgaagtagctattatcctcgatatcacttcctctgtttcgctctgtaaatccttctctttccccacacttttcactaaatcactcaccttttccacaagaacagtgaatgtcgactcctcctctctcatgtcgtcgtaatttgccttgattaccacgcaattaccgaagtaattttccggcaccggaggtgttaaacgattccggtaatcgacggcgaaatctaaaaagactttacttttagttttatctccatctgttgctttgagaaaacaatcgaacatgtaagcgtaagtaagaacaaaagaagataaatgaaggttatttggatttgtcacccttcgacggagtttatctatatctgatcgacttagttcgaaaatggttctgtataattcatcaagatcagagctttgacttgattcagattgaaacagttttgggttgtttctacaatctgaggacgttgatccaggattccctatccaataattcaagaccttcatttcaaacccagatgggtcttttataacagtccgatcataaaacggtgtaagcttctccggtaacaatggcggattattctctttagttaagtaagcccaggattttataaacatagtcgcggatttcccatctccaacaccatgatgggtagtgaggccaatacaaaatcccttattaggaaaaacagtgatttgaagagccattacagaaacccctgtttccgaaacatgtaatggagaaaccaaaggtcgaacctttgaggcttggaagggttggtttgaggaaagggtgtcaaagtgttatattatttataataa

SEQ ID NO: 133437 - DNA, 1022 bp, Cannabis sativa
tatacagctgagatacaagatggtagttgtaacaaactaaccaactaacagtacaaataataacggtaataacaaactaatgaaacagtaagacatcctaacaatctctaatagttagtggaataaatggtgcaaagaattcgagtttgggaatcctagaatatctcattagctagtagggtcacattgataaattctggtctcatttcaattcactcttattgggcacaagttatggtaattccaaagagagtgctcaaaaagattaatgttatttgttggtcttttatatggcgaggcattgctgattcttacaccacagggtatatagcttgggagcagttgcataaatcaaaatgtaaagggggtttgggggtttagagattcgaaattcattgctatggaacacgactgcgatatcaaaatatgattgggctattgctttaaagcaagataatatatgggtgaaattgatacatagcgtctatttgaaagattataatttgtatgactatatttctcccattaatggcagttggtattggaagtagattgttcgagttaaggaaaaatacaaacttctttctaaataccaaactctaatgatagggaagtatagtgttgacatgagctacaagatgctttgtgaggagcaagagaaggtgacttggcatcgagaggtatggaatcactacaatgttcttaaacacagttttatcgacatggctagcaattcaaaatgaattacagaccaaagacaggttgttctcttttcattaatttttgtcaagatccaatctgttttttctatggaggacatgttgagacagcaacgcacttatttttttttagtgtgaattaagctctatatgcctattattagtgatcaagaattggttagaatggagagtgagaaataaacctgtaaaagtccctgcttcaagcctccattaggtccttattacacctacgaaataatggctcttatacacgagtatgccactctggctgcttcctagatt

SEQ ID NO: 133438 - DNA, 974 bp, Cannabis sativa
aatataattaatctatgttaaatctaattttgcagagaaatcaacaaagaattaggtaacactcaaattaagatacccgctgctgatgtagtccacaaggcctatatccacgtaagtacagatatattataagtattaacgttaataatgtatatatatagtaattaattggtggtgatatatgaataggttcatgatgagcagaatagtggacaagtggcagagataacaaagatacaatttcaaacaatcctgaaagagatactgaatataagtccaggattgaccggacttggaggagctaaggatacgctgatttacatctttggagttcctattgctactttgtttataaagcagtctttgatgccacgtgctattcgtaatgacttctttattccaggagtcacttctgctacagtctttgttcttgccaagctcaacaagctttgatttgatcatcatctacctattaatatattatatattctgttgataacaataataataattaaaattaatatagggatatatatacctgggttttttctatcgggctcataaaaaatgccctcttccttggaaacgaataatcatgatccaacgattatataaattcagacacttaaatataaattttctaaaaaaattagtatgacgactgtgtttattattgtactactaatagtaatttttttttttttttgcaaattttggagcaattagatgatttgtctttgactttttcttttactgttaattatatttagtttattgaatatggtattattttgtttgggttctttgtctttggttaattttattatagtatattatattgacagtattatataaaagtaagatatataattttttttaaatgaaaatataatttttattagacagaaatatccgctaatacaaagaactgaagagcaaggggaatatcactctcagaaaaaagacgacctgac

SEQ ID NO: 133439 - DNA, 769 bp, Cannabis sativa
  modified_base (704)..(713): a, c, t, g, unknown or other
aaataaatcatcataatttaataactccaagctaatatgcaagtttcataattaaactctaattatctactaatttctaaattaaagctaagcggtctttacattataaatacccaatgaatcttacaaattaagggttgaattctcttgaaatattttctctagtaatgtaacgtcctaaactataagaacgccacgtgtgaatttataaactagtttagtactaatagattaattaattattaaaatctgtgataatattaaaaactttactaaatgaaaacactagaaacagacatcataacgacgctaaaattgggtttcgaggatccctattataaaagttttacaaaaagactatatacaacgataaatcaaaatacacagtagatacaacccaaaataacttctggcaactcgacacacatgtaggtagagttagtatgtacattgttgaagaaggctatcacctcattactgctctaacttttctttacccttacccttacctgcaccacagagcacctgtgagtcacaaggacttagcaagaaaagtaataaaggaacatacatgaaataactaattattcattctaccattataaaataattaaacagtaatattcaacagtatataatataaccaaccatatgcatgtaaataaaaagggatcattttgtgctctaaataaaactcatttcannnnnnnnnnatttactaattaataaaagataagaaattattttgtgttgcatggttcacatgatt

SEQ ID NO: 133440 - DNA, 547 bp, Cannabis sativa
  modified_base (29)..(29): a, c, t, g, unknown or other
  modified_base (207)..(212): a, c, t, g, unknown or other
atataatttttaagaatatgaattggaanaaaaaagttaaaaaaaaaaaagattagtataattaaagatataaatataatataaaataaaaattattgaaacggggtgtccttagaaatttttatggtaaaaataaaatttccctttaaaattgtaatattcccaaattaccctcactttaatacactatattattattattattannnnnnttattattattatatacatatatacatttagctgattctagtataaattgtaattaatgaaaaataatttttataaaacaaataacttaaaaataaaataaaaattatttaaatgatagtaacaaatttaaaaaataatattggtgttataaaataatataaaatagataagaataaaataagaagaagaagatgatgaagaaataaagagaaagtgaatgggactttctcaagtgtttatttcaatggggtgaacccctattcatacaaaaacatgactaaaagaatgggaaactaaatcaatgtaataaaggaaaatacaaccaagcattaat

SEQ ID NO: 133441 - DNA, 3232 bp, Cannabis sativa
  modified_base (2717)..(2718): a, c, t, g, unknown or other
  modified_base (2999)..(3004): a, c, t, g, unknown or other
cctggtaaaataaatctccaacaatatcacaagtatactccttgtcagtaagaaggcccaccgatctcagattggcctcattcaagaggaagtcgcatgacctaaggtcatggggaagagtcaacaggcggctgtgccgactgaccatctcatgagtagggacaggtgttttcgagagggctgtaaaaaaaacgaacaaaacattcgtcagaaaactaaaaacgaaaagacaaggattagttcaactaagcatgaggaaaacaatcacttacgaattctacgaaaggtggttgtgtcgattggggaaaggctagttgtccaaaagaagtcgtctttgaaagacactttgtttggcaggtccacaataattttaggcttcctacagtgagcaccaagataatagaagccccctgtaccatttttcctcgctagaacagccttaaccgagtacagatactcgatttctactggtgtagggcactcccacttcaaaatttaatacaagaccttcaaactagcaagaatttcgtaagagataggagtcagctagaatggggcatccccaaggtggtttatgtaatcctttaagtagtcacgaagagggagtttggtccctgcactgatatgttcaaggctccaggtgcccatgccagtcaagccactggtactggtctcaccactagctcctagggtatcgcctgagagacacgcagggggtaacatctaaactcaccctctcgcactgacctaactgggcatgctcgcctaagttcgattcaacaggtctttagtatatcacatgcgtagcctgagatagatcgcactttcgattttattaattcagcttcaaaggtcacaatgggatcctagggagtctttgatgtacgtggcttgggagacattatttcaaagtccaagtcatctggttcaaaagcaatcgtgactttgtgtaaaaataaaggctttgccaaaggaataaaggacacactgggaggttctggccaggtcgcatctcgcaagaaatggcacttgcctttgatgatttcttgcaagaagcgcctgtggcgactagcattatcttcttggtgggttctcacgaaatgttccctaaccctagcatccttcaactctaatttggaggtgggttttgaagggttgggtttatacgggacagctgattctgtaggaaactcaagttctatatcttctggatgataaattcctgaaccagagtgggacactgctgcaagaagaaagcagtcccaatccctagaaagaatcttatcaaacctgaaggtggtgagttgaaggttctgaaaaaacctgtgtattgcctgaaccctaatgttgacccaaatacagttcaaccctaaaaactattaaaaccaaatgagatggcaacgatacaaacaaatgatgcatcaattaagcacaatgtagcacgcatataagatattaagaagataagttacttattgtttgaagttggggcttgggacgatatacaactcttcggcctgtgaacctttgaatgcagtaaagatctctttgaaaatatgaagtcggaggaaactcgcagaaaaaatgtcaaggacagggatggcatgcaaattcttcagcaaactcgatgttgtttcttaacaaagaagcttaagagtttatcaggatttctaaaatggaggaaatagcgcaaaggtggcccctttttcttactttatactcttgatatcagcttcgtcggatcagaaaaagtttgatcctacggacagaattcaaagtagaagtggaaaagatggtcatttaatgttgatgtatgccaaaatcagaggacatgcgggattatgacaaaaataccctttgtaatcattaaaaagcactttttattataaaagaactttttaagggacaattgttatacccgaaatttggcataacacatcagaggaaacatgtgtcaagctgggagaacacaaactaaggcacgtaattataattatacttgagatgaataacttgtaaagcataattaacagagtatatttacaacttgactgactgaatagtcttatgcgagtcaaaaatgtacaactattgccttgtgcctcgatgagaaaccatgtagcttcaggtgtgcaagacgaggcattaacctcgattacgtggatgagatatattgtttgtgaagacacttagcgtataatgtatagtatacaaactaagtataacagacgggtgaactaacgcaagtgatagcgaggcgtccacctcaccataggaagacatgcacactaaaaagatcatctcatcatcgaatactgcggttgtcagatagaatgttatgtttttagagtaaaagcgacgagattttcattatcaaccttggatagaaatatgacaaactccagctcgctatcaagattcactctactctattcccaatgagatattccaatacaatacggtttacaacatatttaatacacgtttattttaacccagtaaaagcgggatattcacagctatgtgatattcaaataataattgtatttatttaacgtgatatgtaatcaaaccccatgatttcaggggataatcgttgtaaaaatatcagtcaaccctgtaattaagtgcttactatgtgattataaatagaggcaagctagactaaaaaaagggacaaaaaatcataaggagccctaaaagaatcatcagaaatnnaatcagattgactcgtggactatgcagaattttaactgcaaagccacgtaaaaaatcttttgttttcatactttttccattattgtttttatcttactgtgtgagattattactattaggctcaaatttcggttaacgaaaatgtgcgggaacacttaagaaaaatatcaaatatttaagtatcttgagtaaaatcaacttaaatattaattttttaatttaattaaatatatagaaaaataccaaaaagtctaccttaaaaatatctatctagataattnnnnnnctaattacttattttctaattaaaatgtgatatactttagtctatttattttaattaaatcattaaaaaaaattacatgatttaagttgatttaaaattaaatgacaaattaatctaattttcacgttgaagaatttcaaaatatctacatttaaaataaatgcatttccaaaattttatgtgggaaatgattcttaaaataaaataaaatatattctaaaaattatt

SEQ ID NO: 133442 - DNA, 885 bp, Cannabis sativa
ttaataatgtaattttcgtataaataataatttataataatatatataaagggaaactcatattattactgttatttgtgtattaataaatttatatatttataaaaaaaaataatttgtaattaggttagacttatttttttcaacaaaataattaaatcttaatagtttattattatttttagaccgcgcaacgcgcggacctatttactagttattatataattgtgaagcactataatcgtgttatagtgcggtattaagcaccttaaaatacaaagatagcattactcaaaaattaaatgtaaccaacctattataaggtaaagattacttcacggtataatatttgttgtgctgctagcctgctacctagggtactactttcatgggtgatgggtcttgaaatgaacaaaaatcaaaacattgtgtattaattaacaatgattaatttagcttttggagttcataacaataataattgtgcccgcgtaaaagtaattaaaacagtaaattggtgaagaaattacactatatatttactttttattttttatttttattttactactttttaatttatactcaattttttagatcatattcttatttatgtgcattaggaattataattaataagttatgtaaggttatatttagtactttaattataaaagataatatttattaaataaaattattttagagttgtatttagttaatttataataaaaaaggatagttttcaactaatccctaaattattctacaatgttagatgggtattcaaaattgccatttttttttagggaaatttacatagtatactaatttttgttattttttacaaaaatactgtcaggcggaattttttacttttttact

SEQ ID NO: 133443 - DNA, 788 bp, Cannabis sativa
gaatgaaaataaaataattttcatccaattattttattttattagttgcattttaaagtattggaatgtgattctaaaagaattactttccatcatttttgtggaatgactattctattttgcaaaggaagaaagaccatcccaatgcaagatgagaaaagaaaaattaatagtttttttatcaatttttttatgaattttaaatttgatattgttctattcctattcctattttctcccaaccaaatgccacgttagttattccttataaatggatttcaataaactaatataattactaaaatgtagtctcttcatttaacgcctttaatcaagctcaaaggaaactattgtttcattcctaatatagaagatatagatgtttatatctatgattaacactctcacttaattatactacgagttctcaaaatgtaagtatgggttagtctgtagggtgagctggtataacgaacaagtcaaagaactcaaataattagcttaaagcttaattatgttaggattcagatcgaattgatgatttaagatcaactaagtaatattgacttagaataaatataaaggtaagtgtaggatttttcttggtcaaattccaagaatgccctacaccactcaagcttatagtcaaaaaaacgacagggacaatatcgtcccagaaaaatcaatttaaacaatagatccacacgacaaagaaatcttggtcgtttctttcacacgacaatggaacttgtcgttccttacctgcacgacaaatcgtttgatcaaaa

SEQ ID NO: 133444 - DNA, 985 bp, Cannabis sativa
aaggctgcaatggagaatggagtgctgactgtcactgttcccaaggaggaagtgaagaagcctgatgtcaaagctattgagatctctggttgatattgtgattcagagaaaattatggctttggaggaatgtgtccagtgtttgattttatgttttgatgagagttgtgaaaaatatgtattataaaatagtgactaaatttgtaattgaagcagaatataaatttgaagtttgcgagtcttgaattgaagcagaagaacaaattgttaataaactgatttaaataattttaagtcatttttaaaaagaatcacgataaggttaagaataagttttgctctatcgtacaatgctattaaaataggccgaataactaattattagaagttaaaatacatataatcaacatcagattaaagctcttcttgaaaatggttgtattacttacattatttgtatagagaaacaaatcatgttgttatcttttagctaattacgctttgatgggtccttacgctatgactaacaaagaaatgaaaaaaataaagaaacatatgatcaacgtacaatcttgtatagaaagttggaaggttataaaattaaaatggaaaagtttaatctgatgaaaatagattctgattctatattatgaatggaaaagtattgcctaaggaattatatattttatttgaattaaggaattataatgaattttgatatttatgatcagtggccgtaattgttgttggagaaattttgacaaacacaaatattgaaagattgtttaaatactgaagaataaaaatgtaagtattcatttagaagagcactcaaagaaaataatagaaatttatgtatgtaaaatatacatatgtacatatattacataaccgagatctcgtgattaaatttttataaatattttgaaaatacttttacaacttctcgctagggctgttcatctgatccaatccacatttttttt

SEQ ID NO: 133445 - DNA, 695 bp, Cannabis sativa
tttttgcatgataatattaaatattttaaaaagaagtacaatcaaaaaatttatatatagtacaaaaagaaaaatgcaaccttctaaaataagaagccttgtacaatggtttgtctaatgcttaagtcgaccttcatgcactattacctttaagtgacacacccataattttttatcgtgtattataacacgtaaataaaaggtcaaaaatacttttaatgggagtatacttgtaagagcttatacataattggattaaatatatatataaattacaaacaaatatgagaggggcagctagccagattctcttttacttcactttggtgagtattagcaagcccaacggtcctccttctgataacaaggacaatttcgttgaaagaaacattcaacaccagtggtataaatatgggctaaattttttggcacgatcacacatgaaaaaaaaaaatacgagcgtaaatacgacatgactcgatgttataaattagcttgacacaacataataaatgtgaatttatgcatatgacccgatgaacctaaaaatacaatgcatgtacaatagactaatacaaaaatgcgattcaattatttttataatttaataataataaattaaaatgataatgaaactcaaatatataatataaaatattatattctataattaaaattattaaaaaaatataaaa

SEQ ID NO: 133446 - DNA, 1145 bp, Cannabis sativa
gcccgtacttatgcccagtacgtcccaaggaaaatcgcatcacctaatcaggtgagctcacactactacaaataaccctttctatgtccctttttcatgtccaacaaaaatagagttggacataaaaaaatttttgggagattttgtgtccaacattactagactagaaaaaaaattatattaactccaacaatattagacttaaaagagtacaaggacgttatgtatttaaaatttaattaaataattatttttattaattttgggtaccacgtcttgctagacgtgaagcttacttaaaaaaaatattaaaactatgtgagaataatcaatcaggcctatatccttctctattattattattattattatttaatatttattttgcatccgtccctattatattaatataaaaagtagataaaataccataccaactttaattttctctcttacgttgttaattgttattattattattttataaaaaaaatccctcaaatataactcatctctctctctatcttattctcatcaaatgaagccctagcagagcagccgcctccctctttcttctcttctcatctgggtttcttcttccatagaagcatctccattgttgatagttgacaccacaagtatgtagtggtgtaaatagttcgaaaccggtgagcaagaagtgatggttgggagcgaagaaggcctgtgatggagatttaaataggtagcagtatcatctgagtcattttagattttctattggctactgtaaaacaaatctgaggttttttttttcttatttgaatctaaggttgttgtttgatatctaagagtattatctgagcccactctgcttttttctatatctatagtgcttcgattaataataatattagaagtatgataacggtagatgcaaggaagtcaaactaccaaaagattgtcaccatttagatgaaattgtcgataattcgcttgccgcctgagaggtcatccaacgccctgtctccaccgtgaaagagctgttagataaattaacaataaaccaaaaatctatttgtatataatatagaacacgataataatatatgataattaagtatatgcgtacctaattgatccatagtgattaccacaatttgata

SEQ ID NO: 133447 - DNA, 908 bp, Cannabis sativa
aaaaacacagtatttttgaaaatattttcgtgtgacagtatttttgtaaaagctaacccaaattccaatatttttgtaagtttcccaaaataatcaaattagccctcgaaggcttgccacattaggtttaggaaaatttatatttttacattcaaatatatatttttttatatatttttacggtatttaataaaaataacaagaaaaccacacaaaaaaaattattcaaacaacttcaaaacaacataaaagtaatatacaaataacaaaaaatcaataacataataacaagtgtacaacataaaaataatatgaaaatatcaaaatactgtattttttgtaaataaaattttatcggtcatcttcatatgcctagagcgcttcgtaatttctaaattttttcttgtactgatccatctcctagggagatgaattatacatcactgttggatttgcaacttctacttgctccagaatctcaacttgagcagctttcgccatggcagaaactggaaaagaacaaaaaaaagtcaagcagttaaatacccacactaaagaaaatagcaagagtatagaagagtcatccccagcccggacccagaccttggacttgaaccctaaccccgatccagacctaagactataacctgaaccctagacccggaccccaaatccggatcccaaccatggaccccgaccctagacccaaatcctaatcccgcctcggaccccagacccgaatccgaacttgaatcccagctccggtcccagaccccgaacctaaaccccgacctcaaccccgaacccagtcacttaaataaaatgaaaaaatgaaaataaaaaataaaggtacagaacacacttttattttctgtttttaaaaattgaaaaacaaaagtagttataga

SEQ ID NO: 133448 - DNA, 1027 bp, Cannabis sativa
ctcaacttattaattccaccttgctccacttcagatttggaattgaatacactctcagttatataaaacgctctatatgtaccacgacatagatatgttatgattatgtattgttataatcctaatagtcaaggatcctctatagatgatttacactgaatagggataaatttaccgtctacccttcaatgtattttatccttaaaacacttagctacaagaaatatgatcaaacatgttagaaaactcacacaagattatattaacacagccagatagaggaatgatgagtcatcaaacttaccatttataccttattttccataaataaaaaagctagacaactttctttccatatttaaaacagttaatataaaaatataaaaatcaaatacacaaactatggaaacaaaatacataccacattttaaattagttaataaattatacaatatttttgtcaaattaaagatgccaaaaatagaattaataatctcccccttacactttgattgacaaaacatttataagaagaaaacctacatcaagtgttagaaacaaaaacgatagagtatagaaaatactccccctgcatgaaagcatgctaacacataaaacaaaataactttttaaacggaaaagttcacaaaccacaaacaaaacaaccttgctcaagctaggggtaaaggtgaccgtcagactttcattccaacggtcatgaccgcccgtcatgactaacgatctattctaatgatcatgactttatatattctccattaatccagtcctgatattttagcgccacgtgtcgttactcttaccacgtcactatcatcaaaatttggataaacagtctcaaaattagtatatttttacttgggtgatttataaaattattcttacccaattagttatcattttttaaactcatataattgttaatttataatctatatatctatagtctctatctttctatatatatatggctaattaggatttttttctccccaactttgacatgtac

SEQ ID NO: 133449 - DNA, 739 bp, Cannabis sativa
  modified_base (28)..(40): a, c, t, g, unknown or other
ttaattaatcacgatttccataaacctnnnnnnnnnnnnncgagctgcacaatacgtttaaaaatcacatgaacacgcctatgctagttagggtgttacaaagataatggtgaattctcgatcaaagagccttacagagtaaatcaggagcatcggtttgggcagaccaaatccctttagaagagcatttgggacccccatattcattcgagaatatcaatactactttggcgagttctttgcgaagctttacctactggttcaaagctagccttcctctcttcctttggcttcaaattttgtggtaatgatgaggaaacttgcttacatctgctttgagaatgtccaattgctaaggccgtatggttctcgggtcagattcctttaatggtggactgtatattagggtcctcctgctcggatttcattgagaatcttctctcattggatgtgggtcttaatggatgggagttactttcctatattggttgtatctttcatgttatttgggatcatacgaactctaccagaatcaagggatcaagcatctcaattcccacactaattaacaaggtagccttatgtttccaagattactctaaatctcgatctcggaatgtccaggaggagggggttgcaattgatccctcattctgttgggttttatgccctaaataaaactcatttcaacataatcagatttacttattaatatagatcataaataacattttatgtt

SEQ ID NO: 133450 - DNA, 1174 bp, Cannabis sativa
  modified_base (27)..(53): a, c, t, g, unknown or other
  modified_base (239)..(242): a, c, t, g, unknown or other
  modified_base (453)..(456): a, c, t, g, unknown or other
  modified_base (1090)..(1094): a, c, t, g, unknown or other
tcttatagtcatgtacgttatagttannnnnnnnnnnnnnnnnnnnnnnnnnnaatttagaaaagtttaacacgccgaaaactacgttcaaatagtgtgtttctcgcatgactattttattttatacgcgtgtaaaataaactgtttgaacattattttttatattgtaaattattcagaatttctcaaatttttgtaggttatcttaaatagctgtaacgtacatgaatatgaaaaannnntagactaaaaaattcttctggatgccgaaacaagtcaagggtgtattagtacatcccttttaagggggtgcattgtagaatcacccattatcttattggaaaatcttaccatgcatcctactgaatcgatgtattttttatctgttttgatatttgaaataacttttagttaaattctattttgtagtcatgtatgttatagttatttaannnntcttgtaaaattttaagaaattcgtaaaaatttaacacgccgaaaataaagttcaaatagtgtggtgtacgagtgactattttattttataggagtgtggcataaactgtttgaatattgttttctgtattgtatattattctgaatttcttaaaattttgtatgatatcttaaataattataacgtacacgaatatgaaaaaacattgaattaaaaattgttttagatgtcgaaatatgtaaagggtgcatcggtgcaccctcttaaaataaatgtactgatttataactatctgttttggtatcataaataattttttagtttaactttttctcgtagtcatgtatgttatagttagaaatttgtataaaaaattagcaagctgaaaatatggttcaaatagtgtgttgcatgctaactattttattttattttcgcgtgtgaaataaatagtttgagcattgctttctatgttataaattattctggagttttcaaaattttataaaatattttaaataactataacgtacacaaatataaaaaaaaatgatctaaaaaacattagagtacttatttacagtcttatacaaccaaaccaagtggagaaacaaaagggtaaataccattttnnnnnctgtgttttgcaaaagttacagatatgccatatatatggtattttttttatttttaggtctttttatgatatttgatatg

SEQ ID NO: 133451 - DNA, 2021 bp, Cannabis sativa
tttgttctaaggcctctatgaatggaaagttgatgtacagtttcttgaatatttcaaggaatttcaaaaactgcttatccagcttattcttgcaaagactttgagggtaagggatcttgatatgatgatcaatgttgactagaggtgaggcttctttttgctgcagaccttcagtagtctttttcttgtcttgagttagtgttggtgcttgttgatcttggtcctcttcgaccacttgttgctctgcccttggtccctcatattattttccacttctcaaagaaattgcttgacattgctctttcagattaatctctgtagtactaagaaaattaccttgattttggttggccatttgagtagtcagtcaactgccctatctgaatttctaagaccttaatggaagatttaatctctatcatgaactgaagtaacatatctatctggagattagaccccctattagagctttgttgttattgattttgttgtgactgatttctctgttggtagaacccttatcgctactgatttggaaactgcccttgaaaattttgttgatgtatgacccccttggttgtaaccataattattgttttgatagttcccaatggcttgggcttgctccattggaaaactgtttacatctaccaggaaagtatcataagtatgaggtcctccacatagctcaccaatcacttgagcttactttgcttgagcagtcactaacttagtcaaggactccacctaagttgtcaactttcttatggcatcaacttcatgaatacccgtaacttttttagattggcttctttctgttgaccattattggttagtcatggccatcttttcaagtagtacaaaaagcctcattcgcactttttctcataaaagccccaccatctgcggtatttgttctaaggcctctatgaatgttcgagtgttgttaaccaacttgcagccactttttatcccatagttagggagcttcctcaataactccttgaatctctctcaggcttcgtaaagagattcgttgtcatgctgggtgaagttgttgaattcagatctcaactttgcaatcttcgttagaggaaggaacttggaaatgaattaggccaattcctcccatgtgttgatagaattgggtggcaaagataccaaccaactcttggctcgctcccttaatgagaatgggaacagcctcagcctgatggcgtcgtcactaactccattcaccttgaatgactgatagagctctttgaagttagcgagatgcatgtttgggtcttctgttggcaaccccacaaactcgactaaagattagacaatttgcattatggtcggattgatctcaaagttgttagcatcaatggcaggtggccttatacaggatttggcccctgtcaaattcgatagcaaatagtccctcaggctacggtcattgtggttgcgaccattagcctggtcttctacagctcctccattgttaccactgttaccaatgttggcgttgtcagccatatctactttgtgttcaatctctattgtaactttttctaatcttttccttcttctgttctgtctgcaagccttctcaattttaagatcaataggatatctagcagttgcaccttgacgtctcataaactagttgaacctgaagaaaaaaaaaaagataagattttgaaaccaacagaattagaactaaaattgaaaaaaaaaatcaaattagaacaaaatttaatttttattaatattaactaacaattcccggtaacgacgccaaaagcttgttgtggtagattgcaacacgcaagtatacgtatcgtttgaatatgtaatactcacaaagagtgaggtcgatcccacgaggattctccttaagtacgttaaaaataaattgttacttatatttggaaaaataaattttaagagaaaattaaaattagaaagtaagaaaaacagcgaaagtaagaagcatgtaaattaataagggaattaacaatgaataaaagtta

SEQ ID NO: 133452 - DNA, 1788 bp, Cannabis sativa
accaattgcaactttcgtaaacacatttcagactgtactcttgagagcaggacttccacactttgtactgaaagttgtttttgaatgcgtagtagttgagaacattcttcagagtttccttgtccttgtatgcctgtcctttttctacttctgagtgatgcttgtctgttattaacttcccgttgttgatgttgatttttcgatctagttttttacttgtgttttcaagtttttctaccatttcttcagcagccagatttgcatagtcaattatgtcgaatttttcgttctctgattctcttgtttctgactcctccccttcttctgtttggtttcccgctgtgtgtgattctgttgttgttgtgttgttttcaagcattgttgtgttattttcaagcattgtcacattctcttcaaatggtgttgttgtggttgttatatttggggttccagcaggtgttgtgttgttgttttgttggttgacgcataatggatatctggtgaaatctattttttcgatcttcaattacaagtaaaagtagaggctggcatcgttaaatattttgatcggtggtattccttctttagcttggtattgtatttgcagttttgttctgatgttttcgaaccccaatgaagtaagcagtatttgtaatagctcttcatatttgcattttgttggtatgaattctccactagcctcatagttgacattattatattcttcttcccattgtccattgctctttatcagaactggtatacgttccattacctgccattgttcagaatattacatttatgtgtctttttttttcattttaaaacaacactacaaaacaatttacattagttgtttactagtgttctcatttattatttttttgatccatataattagcaatgaatttgtgttaataacgccaaaacaacattagaacaaccctgatttttcgaataaacatttttagtcgtttctcagggataatctacatgtaattttttttaataaaaattaaacaacatcagtttatatgttttgcattttttttaacttcagatctaaatctgagtttgttttttttctagttcttaaaaaattaaactactatgggttttgttgtgtttacctctgttcttgggaaagaagctgctgtaaatgttgttgttcgttcttatattatcttttgatttagtagtgtttcctcttcgttgggtttaatggttttttcctggttttctgcaattttgttccgtccccaaccaggaaggaggtgccgtttttgtgttttgttactgttcacagtataaaagtaaagttattgggcctgggcagtacaaaagaaaaaaaaacggacttggacagtaaaaatgtaaagtttgctgtgtcccagttttttttgaaaagatttggtaaaaaagcagtattattttaagtttccctaatttttatatacatatattttttttttatgtataacaacataaaatcaaattactcatccaaattaaatgaaaataagtagcttgattggatgttagatgtattggatttttggaccgtccatccaaaatctgatccaattggatattcaaaaattaaaataatatctaattcgattcgatcacaattgaatatctaatctttagtccgtcgattataattagatcagtcggttgttattggattggattgatttatgcacagtcaatctatatatacatataaaggagaagtatgaggcggtgacgtggcggtctaaaatctctccaaagctatttttcttt

SEQ ID NO: 133453 - DNA, 544 bp, Cannabis sativa
  modified_base (52)..(55): a, c, t, g, unknown or other
cactctttccctacacgacgctcttccgatcttgtgagtagatctaagatcnnnntaaaattaattccaacacatacattatgcctggtcttgtagcagttagatatagttggttaccgattagacttcaaaattttgattcatctgcttttggtgagccatcttccttcttgagagctttgttattgtctaatttagttgatacaatcttctattcctccattttgaatttcttcaatagtgtctctatatacttcttttgtgagatgaagatcccatcttctttttgagttatttcgatctcgagaaagtattgcattaatcccaaatcagttatctcaaaactcttcatcatctcttctttaaattttttacttatttcctcataattgcctgtgtagatgagatcatcaacgtataaagagacaactagtgtatccttcataccttgtattttttatgtatagctcactttttgctcctcctgtatccttattcagtgaaataatggttgattctactataccaggctcgtggagcttgc

SEQ ID NO: 133454 - DNA, 1035 bp, Cannabis sativa
cgtaaaatttctccaaacaagagtttaactaaattaaaaatacactaaaaattaacctaaaaatagtactaaaagtaacttaacaatgctatgccccacatagtcaaaagaataagctagcaagaccgagaggagttaatgctggttccacatatactgattatatgaaagtgtattgacacattttttttcagtttatacctgatttggattgattgggaactccagatctatattttatgaatttgaaaaaaaaaaattaggagaatttattttatggaatttgaattataattcatggttgaatttttgtttaaactagttttctgtagaattttgcgtcaataggcaattgtagatagttgggttgattagggtcttcttcttaggtgacgtcgtcagaattaatgatggatcttcgaataactgggtagttttcctattgttgtccttgtttgagcacacgaaggttttgaagatgagaagcatgggtcgtctgattgtacattgagtggaagaggtaattttgtaattttttttatttgagttgtatatatatatatattgaaatggtcgatctattgtatttttataatattgttgcatttttcatgtatcaccgaaaaaggccctttatattttcatgaaacaaacaatattgctttctttattatattttttcagtactgttgttagctttttctagtagttgattttttctcctcaaattttcctttctactcaatgttgatatatatatatatatgtaaaaaaatcgagtttttgtaaatgtcaatatatatacgaaaatataaaactgtatacacctccagaagcagaatgtaattctgttactgcagaaaccagttttgcagctacaaaacagaacaggcagaatataaaaatatttgcagaaaattaaataacttgacacaagagatttgtgtgtggtatcaatgttctcccgaacactcctagtccacgggtgttgggttttatgccctaaataaaactcatttcaatatattcagattt

SEQ ID NO: 133455 - DNA, 659 bp, Cannabis sativa
atattataaaagagaaatcaaattaaaaaaaaaatgtaattagtttccaatttattggaattaacaaatcagcttttttctttaaaaaaaaaagaaatgaaattgattcaatataaaaaattactaagaaaatggctcatcaaatcgaagagcttgacaaacaaggagtgaaaccccaatctatgtagtactagttttggataacaaagtttgattggctaaattatgagtcacatgattgacttctctaaaaataaaaaataaaccagaaatactagtgtgtcgaagtaaacttctaatttgttgcagcagttcgtcaagatcgcgacaacttttatccgtctctgaaagcaattgaatttccctcctgtaatctgtttcaactgtgaacgattgtgcacctcgctgaattccaaccttcaagtcatcctcacccatcaatggagtcatttattgccttagaatagtcaacagtggtagcatcaaatagcacttccccatcagctcctctagtaatgactcaaacacacagtagttatctcatctttcctaccagggccgaccctgaaacaaagtgggccacagaaaaaaaattatttttaggcccttatgttagagaaaatatagtatttttcaaagtcagtaaaaagaaatataat

SEQ ID NO: 133456 - DNA, 623 bp, Cannabis sativa
aaattagataaaagtcattaaattcaacaatttcaatagtttaataggcatttttaacgaccttaaaagttcagaggacatgatttgatacatttcaaaatttgaggaaaaaatttttttaattaacttttctttttctctattgcactatatatatattaatctattaatttttttgtttatatataataagaaaatagttatttaaaatatttttcaaaatttagaattgttatccgtattctcagatgaagtgtacgtggcaatcacggaagagcgccacatcaaattatgtatggttacttggttagtgtataccctccgccactcggcgtcacggaaggtgttatataccaaagctgttatataccaaaaggactccaggattcttattaataaaactgttatagagaaggatcagaagtcataagtgctccgagatggtagcagattagtctggtctcgaaaagccttagccaaatgttcctggaagctactcgggtgtatctcatctgaaggtaaatacgacggttgcataccttctgacaccgaatcagatcttgtcccctacatcagactttggtagtgtgcttacatgctctgtagctcctttttgtccgacg

SEQ ID NO: 133457 - DNA, 1087 bp, Cannabis sativa
  modified_base (1055)..(1059): a, c, t, g, unknown or other
aacaaggaccgggacccaagaccccaaccaagacctagacttgaaccagaccaagacccgagatcgggatttggaactcgggcagacccagacctaataccgaactccaacatagccccagaccttaattgagacccaaactcgggcctagacacggtcgtgcacccagaccaggaccgataaccgaacccgaacctggacccaaacctagacctaggacccaatcccagaccctaactcggacgtagatagggatcctgatacgagccttgaccaagacccagacttggacccgtacctgggacacaaactgggacctgaaatgaccccagacccagaccgggatctgaacctggacccaaacccaatcgcagactcggactagtacttagaccccgacccaaacctagaaccgaacccgaactgagacactgaatcaaaatcaaaactgcgactcggacccaaacccaaacatggacccacaccgggccctagggtgggggacttggacctaggccttggaacccagacctagatcggaactcaggacttcggacccaaactagaccataaccaagccccaaaactcgagcttagaccaaatcccggacctggtcttgaacccagactaggacagagactcgaacccgaacccaaacttgaactcgggacttgatctcggacccagaccaagcccttgattgagactgggatttggacctagacatggacacgaacttatagacctagaacagaataccagaccccagacccagactgggatcgaaacacgggacctagattagaacccatatgtagacccagacccaaacttgtgacctaaactcaaagctggacctagcccgggatccgaaaaacccgtacccaaactcagattaagactcggaccccgaccccaacctggacctagaccctgactcgaaacaaaacccggtcccagaactagaactgaaacagtgactacgacccagacctgagaccagaaccaaacctaaaccataatccgaacacagtgttgggaattattttaccannnnnttagatctactaacaagtatgtttatta

SEQ ID NO: 133458 - DNA, 619 bp, Cannabis sativa
ttttataaaaacatagtatttttgaaaaaatatctgtgtgacagtatttttataaaagttaacccaaattctagtatttttataagtttcccaagtattataagcattttcgcctctaaatttttttatactattaagttgtgtcccttatgatatacgatttatgaataatattcttcgaaatataaattttacagttgcgtagtcgttccgtcccattttatttaattttattgtaaaatgtattatgtggttaatgataattgataaatggatatacaaattagataccattcatcatttttatatgttaaagaataataaaataaaaggacatttttttacaataattcatatttttattttattagcttttttaatcattaagtaaaaatgataatttatcaattaccatttactgtgtcacttttcacgattaaatgaaataaaatataatggtacgttacactataaaaatttttacttttaatcacaataaaaattgtgaataaaattaaaaaacttgtgattaattataaatcacaattcttatattgtgactaaaaagttcgtgactaaaggtattagtcacaataattacaatttgttgtgattaaat

SEQ ID NO: 133459 - DNA, 582 bp, Cannabis sativa
  modified_base (63)..(81): a, c, t, g, unknown or other
ggtgtaaggacccaatggaggcttgaagcggggatgttacaaatttctcataaaccaagaatnnnnnnnnnnnnnnnnnnnttatatagaatagatattgaattagtataagaaatatctaattagatattattaataaatacactagataacccactactacgtattcttattcccttattataaagagtaaaataaataatgaaaaattaattaaagagaaaggtcacacaactaagagagaccaagtccacaaaacacaattatacataataaaaagatctttgttaattaagtctttaatgtgtatgttgtattatatatattaataaaaacactcagcctattctatctttttgcctacacttccaaattctctaaataaaccagcatgaatgcacaatatttaataattaaaagataatcagaatgttcaaggaaagcaataagtctttcattatatataaatcgagttaatgtttaaatataattatagggcaagactatggtaggaccaagcaaaagttccctaccggtagggtactttttttaaccattcattttagatcgtgtggttattat

SEQ ID NO: 133460 - DNA, 666 bp, Cannabis sativa
ttttttttttttttttataattggcagcaaaatccctttgagtatacttttgtttgtaaatttaaagtgccagttgaatttcaccgttaaatatatattgaattgccattgtgtatacttatatatttttattggatccaagattttagtgtcacgtgtacacatattcacagaggcaattacaattcgtatttaatgttgaaatgtaactaatacctcaaatttgtaaataaaagttaacttaaggggttattaccacaaaaaaataaaagtaaaataaaggaagaaaaattaaaacaaaagaaaatttctctgttaatttttttaaaaataatttttaagggtttttttttttcaatgagagtatgtaatagttatagtagatatttgatttgtgttcaaaaaatttataaaaaagcaaaacacttataacaatattcgaacattatgttttgcacaataaattttctcaccattcaaaagggtatcttgtatataaattatctcaaaaatgctattgtattcttctatttgatcttgtttggattgatagaagttttaggaggtgtccctttcattagttgaacaaaaaagatgcatctatatttaaaataaacctatcaaaataaacggcatttaaattatcttattagccaatacttttaa

SEQ ID NO: 133461 - DNA, 1144 bp, Cannabis sativa
atgactaggaccctggaacaggaccgggaacgtgaccaggacccacacctggactgggaaccagaacccagccctggaactcgtgctcagacccagtcctggacccggtctcggacccagaataggacttagactagaacctaaacctgaactcgggactcgatcccggacccaaatcaagcccctgacctaaattgggatttggatcagacatggacacgaactcaaaaccggacccagacgcatacccagatccaaacctgggaccagacccaatacacgaacctagatcaggactcagacttggacccagataaggatccgaaaaacccatactaggactaggactgagactcggaccctggcctcaacttggacctagacccggacccagaacaaaacccaaacctaaaatcaaaactggaactgtgactaggacccgaacctgagaccagaactgaacccaaaacataacccaaaacttagaccaaaacctggaccgagaccttgacgaggactgggacaggaacctagaccgggacccgtactaggacgtagacttgatgttgtcctaaaccctccctgggacctgagacccgcaacccagaccaggatccagaccctgataaggacccaaacctgaacccaaaccaaggctaggaccgagacctagacccgaacccggactaggacctggactaaaaccaagactcgggacctaaacacaaacctggacctagaccaggagctaggaactggacttggatgggggacctaggccccaaaacccagacccacatctaaatcgggactcaaactcgaactaggacctaacatagacccgagaatctaaagtcggacctagacctagacccgaaaccttccccggacaaaaatcaggataggaacctggacacgaacccataccaagataaaacccgaaaccggactcgaattaaaaatcaaacctgaactcgggacccgaactcaaacccagacccagaataagacccaaacctagacctgcacccagacccgaaccgaacacaaactgtgatcgaaacccaagacttagacccagaactaaaccctaactcagttcgagatcgaaacctgggacctggacctaaacctggacccagac

SEQ ID NO: 133462 - DNA, 632 bp, Cannabis sativa
  modified_base (579)..(579): a, c, t, g, unknown or other
aatttagatcctggtaaaatatatccaacatcaactgcaaagccactccaacaactcacaaaaataggggttcaactctaaatatgtacctattctttgggagcaattaattggttactttttgtatatttaaatatgtgagaaaatggtaatatctctctattttaagggatattaatctattttgaataagatcttttgtaagctctaacctatataaagggcattaggccagatcaataacctatgttctaagctctcatcatgcaaccctacctttttctctctcgcacgccacatgcataaacaagacaataagtctgtttctcatctcattcatttgagatctgccttacattgttctcactattgtaacattcatagagagccatactagaaatcacaaggtaaaagcttgtgatctgtatggtattatctctcaaatcaatacaagtaaaaggggagtaggtcattacccgctagtcaagggggtcgaacctctataaatcgctgtgtcaattttattatttgcttgcattgactatacatggtgattgtgttaggttttgtgccctaaanaaaacccatttcaatataataagatttatctaataataaagatcagaaataac

SEQ ID NO: 133463 - DNA, 570 bp, Cannabis sativa
aaactcataattttttgatttcacaatgtctcatacatcaattgacgactacataatgaactatcaaatcataaacaagagtcaagtatagtctcaccaaacgcctacagcaagcctaagcacatcatacaaagtaggcatcatgtcctatgttcaaatttgtgaaattgtgcaaagcatgactcatacaagcacgacaatggtggctttttaccaccattatgagctctataaatatctcaatgatatatattggggtctttttggaaagtctctgtaagaaaaatactcattaataattgtaaaataatcattttatttataaaagataataaaaggatttcaagactcaaatttatcgcaaaaagtgataaaattctaaagtcatataaaaatagtacaaaattctaaatgaactcatcaaaattaatcttaatatattaaagaggtcattcaccccacaaaatttcaaagagtttactaacctcacaaaaatcttgaaaaaagggtaattttacctaaaaattcaaaagtgcactaaaaaccaaagggattttttcaataatatac

SEQ ID NO: 133464 - DNA, 540 bp, Cannabis sativa
  modified_base (333)..(334): a, c, t, g, unknown or other
ttgattctctctttttttttttttggcaatatttctttaattttatttttatttataaatttgatgcgttagttaaattttaccgttaaatgccaattaaattgtcaccatgtataaatgtgtatacgtgatatgtttttattgaatttaaagttttagtgtcacctgtatacaagtataaacagtggcaatcacaattgacaatttacaaataaaaataaaattaaggggcattgtccaaaaaaaaaatagagaaaaataagaatataggactcgtttggtacgccgtatcggattatattgtgttggattgtattgtattgtattagtatnntttaatacaatactatgtttggcattgacttgtattaatagattgtgtaaaactataatatatgttcaatacactcgaccccaaaaccgattacgagtcgagtccgagtccaagtcccaatccgggtccgaatccaagtctcgagtctaggtttgggtttggggtttgagtctgggtttgtgtaacgtccccgcttcaagcctcca

SEQ ID NO: 133465 - DNA, 710 bp, Cannabis sativa
gcagttggtgcaagcaagccaaaaattgaagtgggagaagaacttgctatgatttaaaaatcaaagctgaatatgccataagagcaaatacttgtatgttaagtgaacctctcttgtgttggtatgaacaagttcttctagtgtttagattggatgttaatctataataaaagataatgttaacatgtcaatacttaccaacaaataataaaagataatgttaatctataatttttttaaaaaaatcatgattactgtttagaaccccattggatggcagaggagatcgcgtcgttcccatgcctttggtttgcttgtcttgggtctttgtgttactttttttagggaggagaaagtcttatgaaattgttttatgttatgtttttatttggtttgtttattttattttgtttaattttgtcagttgtgtaccttttgtcttttgtcgctttgactttaggcttttttggggtttattcttttaaatgttcctcggtgagtttgagccataaacttaatgtttctttggttatagcgtgatttattgatatttgagtcatttcctagtgcaatttgtgcagtttaaatgaagctttccttcaaaaaaaaaataataataatattaaaatccacattcgtccataataataaaattgaaagaaaaaatttcttcatcaaattaaaatcaaaattgtcaaaacataaagcta

SEQ ID NO: 133466 - DNA, 717 bp, Cannabis sativa
caaagacatataacagtcaaaagtcaagttttttcatatcaaaatcccaagttgtgattagttatagttcagtgcaatgtgcattattagatggtactctatgatgtttctatgattacaacttcataataggcttgatgtttttaaagctgaatatattaatttcatccctaagcatttcgatgacacacaccagattacataatgtgtgtgctgtttgagggtcatgcattgattaacatattatttctaaattatgttagcataatactaggtactgatgatgttatccttgaactttcaggtgactggggatgttttttatgaatcggtatgctactttaagtacatcatatcttaaagtatgttccatgctatccaatggagccaaatcgtcctcagaatcctatatttatctctttattatgaagacaactgtccttaatatactgtaactctgttgaaaacatcgaataaataaatagtacaatcgatgaatgcagaccagacctttatgttactgttgagcaaaatttccactggctgttatatttgtgggccttatatgtccggtataggctataggaatacaattcgctcattaaatctttctgttattatttgtctaattaagtgtcgagtctcatatagtttaatataatgtttaaaattgcaaatttaagcttcatgctatttttttctgtgaggcgaggcgta

SEQ ID NO: 133467 - DNA, 694 bp, Cannabis sativa
tatatatatatgggaagctaaatggaccaataagaattaagaaaaataaattactcctttacaaccacttttttctttaagaaaaaaaaaataaaagaaaaattgttttatcaaagacaattgtaatgcattgggctgattctatttttataggtcttttaaaaatcaccaagaaagtggttccttcattaagaaatggatttctttatcaagaaaccagtttcttggtgatttttctggcgacaatgccaattccgaaaattttttcagtgccggcagtagctccgatgattttctcgacaccagcaactactccgacgatgaaaaggagatgctaatctaggaacccataaaatctattaatcaataaaatgaaagaaaaataaagattcccactccaacggttgatgtttttattgtaaattcttaagtgatccaaataactttgtcataataataacaataatacaacctaatataatagtcaaaattgataaaaaagaaatgatttgataatacaacttatgaaaaggaaatttcctaaaaaaaaggaaataaaaaattaaagcaatattaatattggtgcaaaaattttgagagttaacttaaaaaaataataattcaaattaaaaattaataaattttttaattattaatattattttatttttaaaaataaatatataattaaata

SEQ ID NO: 133468 - DNA, 521 bp, Cannabis sativa
aaatgtttagaagtgtaaaaataaaaaatacccttgttattgatattttatagagaactaatttttagaaaattatttatttatgtaatttatttatttactaggactgcataaaagaaaactcaccacagttctcattggactgtagaaatcaaagcacagctgccatagtccatgaaccattgtttgtgctcaaaagcctagtgaaaagataagtgggagctttgcttgctcttggtcacttcaccttctctattatagaacctatggttgactagaaatgggtaatccttgcattttactaaggaattgttgttagtttgtactccttcttcttctcccaatgcgtgtcaaaccctagtgaagaacacaaccattgtagtctactacattcactcaaagatcacacactcatgtgttaagatgccaaagtatatgatcaaaccttttactctttgaactgtgcacgatatagcttggaggacaacttgtaatgccctaatgctaaggcacgctacagt

SEQ ID NO: 133469 - DNA, 800 bp, Cannabis sativa
tttttaatatctaaatgaattttatactaagaaataaataattttttatatcgcttaagttgttttaaaattttaatttattttttaattttattaatcattcaaaatgatttttttgagagctaaattaatcttttaagatttattaaaaaaaatattgaatctttctcatttttattttgagggggtacgatttgatgattgtcaaagtttagaaggcaaaattgctaattgataaaaatacataattatttaaacggaataatgagacggaacttaagagaagaattaattttttataaaagtaaaagtttagggaaatttttaacaagccgtatattttaagagccaaaattaatattgtcaaaagttcaaaagacaaaattactaattataaaaaaaattattttattcttttatttgatggcatcttacataagaataaatgtgagataaataaatagaaatgaaatattaaacatttcgaatgattattttttttttaattttttcctcaaaaacttaatggcattttatattagaataaatgcgagataaataaataaaaataaagtattaaacattccgaatgattattttttttcccaaaaacttaatatgttcaattaacaaacataatattagtgagaaattttttttcataaacatatttaaatacaacaaataaactccatagcaaatattgaatattagttagacgtttagtattttgtgacaatatcaaatttgttataaatattaataattatgtggatgtccaaatcttttatttattacca

SEQ ID NO: 133470 - DNA, 713 bp, Cannabis sativa
  modified_base (605)..(606): a, c, t, g, unknown or other
tatggccaaactttaaaaaagccatataaagtgtccatagttaattatgccatatttatcataaaaggtttaaaaaacccatactccacgtaaattctactaaacgtaatttaatttttaaaatatattgatatgaagaagtaaaacatacataaatacaatcattaactatatcttaactatcacaacaacaataattaattattattcttaaatgaaaataaaaaaaaattcaaaataataaaaaataattttcaatattaatatttaaatttacttcggttttagattttttacagtattatgttattttttattagtatattcaaattaatttttaaataaaaaataaaaatttaataacataaaacaatcaatgattgtcacctgataatttatttgatatttaataattaaatatttatacttaaaattactataaaaaaaattaaacttaaattttaatttataattaaaactaaatttaaatatttatataataaattactcaaataataattacacattgtttatgaaaattcatagtatatatacctactataccaaactataattttattataaaattttggctaattagtaanntttccccctgaactttgacatgtagtaaattgtgctccctgaacttttttggtcgttaaaaattccccttgaactattgagatcgattgttaaatttaaggactttt

SEQ ID NO: 133471 - DNA, 671 bp, Cannabis sativa
tcctaataacaactatctcgaatacttggcacctgagatagaaaaacagcttcaatcgcctttgttgtcgagcagtagagacaaaccttggcctccattgtcatatttccatatgatttcaaaaatctaaacaaactaacaagtttaaaataaactttggtgtatttgcaataatgaactaataaaatggttcaactcacgattagccctctgaagaaagaatcaatccacaatagccttacggagtagatcaaatagagaattccaggctataccaaactattttataaagttaacatatcttcttgatacaaaatcattatatatgtatacagatgaaatatgatatatgatcctcaacaagaaaatacataaatagagaaactttccctcttttaaaatcataaagaatagcaggtgaaccaataccaatatattgaaacaaaacatcattatcttcacccagtcaaaataaatgaaatcaaacaaaaccattgaaacaatgacaaaaacaaatttgaccaactaattaataacaataccatagcttgggaacccagagcctctaatcatcttaaccgaagagaaacttgctctccaaaatcgaaagatctcgtagatgagcttctcagtgtcaaacgcatttctaatagattcgtaaccctttcccc

SEQ ID NO: 133472 - DNA, 783 bp, Cannabis sativa
ccatggcggtggcgtttgtgatgactactaagttgtggctcttcatgccggctcttatggcattagaagccgatgtaaacgcccatagagagatgatagaatttgttgaatcaatcaaaagtagctttttaaggcctatcatttcataaaatatttgaagaaaaataatgttataactatgctctatcatgaaaatcatgtattttaatttaagaatcattgttatgttcttccaagatgcatgtatgcactatttctcattttcaaattttttaataatgtttaaagggaacttatgtaaaatcagttcaatttttgagatccttcaaatgggacaaaaatatatgttatacctaaaattgacttttaaatctagatggtacacaattttctatgagataaataatttttcaatatctttgttatttttgtgtaaattagtacattaacaaggctaaatgtgtaacttaattttattagatagatttaccctgtaacatatagtattttcaatgaataaatttgtatatcaaaacatcatagtattagtagagaaaaccaataacaaatccatttgaattgaagttgcccaagatgacaagatgccaacatgtgaacagcaagtgcaaccacatttgaaaaattatcgagagcagagaataaatgatgggtaaatactcttttggatgtattttgtaaaaattactaatttgatcatctgtattgttaaatgataaaatggaccatatattttctaaaatggtaaaaataggaccctgagtt

SEQ ID NO: 133473 - DNA, 1326 bp, Cannabis sativa
ttttttttttttattttgactttgtggtttgtttattaatggtattaaattataaaggaactaaatgcatctagtactatatgattactagctaccttatcttatagagaaagcaatacatatgttgtacattagtgttaattttttaatagggatttttcattaatttcggcctttttttcttttaaattagcgtgttgtagtttatatccgatgcaaatgagatttaagggagattataattgatgaaattgagtcgaatgttttgtgttgggaaagtaaccgaaattgttgctttcttagtagcatcatttgaaaactggtactataattcttagtcaatcaattgcgttaaatttgggcattgatggatgcaaaaaactcattttgtagtagtgagtagctaacgagatatgctatttatgggatgtactacttgatactgctagtccaatattaaattttctcattttctaattgttttagtagctaattggcgattttgttttcatttcaaggagaagagtggtcaagacccaattttttttagcaacttttcctcttctaatgtacttattttgtgagggactataattgaaaatattttctatgtaagccttttatattgtcacgtttacttgctacgaaatctatccacgatttactttttgtcttactttttctaactcttgaatggtttttaatatttataattatctctaccttggaagttattttttttaacttagtgatttgtttattaatgctataaattaaaaaggaattgaagaagaatgaaccgtgaatcttagtactagatggttattagatgagcattgctattggataccagtactgcccaatacttttataagtgacattctatgattgatcagcgatatttcttaaaaattattttcttaagtgatatgggtcccaatacttaatcacaccaataaatgtttaacatcgaggatggtactaagcaccaatgatactttttagcatttctcttattagataccttatcatatagaatgtggctatgattaactacataattttagagtttgactcaaattatttatttatttctttatttatctatatttgtaaagttgcaatttctttttgggtaattattaattatgagaaaaaggaaactcttggttgccaagttttgaaaagtcttcttaaggaagctttggaatgtcttggtatccaagttgtcttggtgctcaagttttgtaactctataaatatgcgttttgtgtgtgtgagagagagaggtgtgtgtgtggagagagaaaaatagtgagttgtgaa

SEQ ID NO: 133474 - DNA, 662 bp, Cannabis sativa
tatatatagtgtaattttcggttgttcatgtaaccaaaggtgataattttgttgataaaaaaatttgtgatggttaattttacaaaacactcacaatttcaggtggcatcgttgcaatcagaattagcaatggtgcagactcaattgatgaacagtagatttgcatttgcaaatgcaattcaaaactcacaacaacaggagcacaacatcatcaacaacaacaacatcatcagttgcaacaacataatgttgggatgttgcagcctgcctactctaacaactcctcaacctcgaacaataacctcatcaacatcacaaatttcccctccaatttcgatcttgcagcgactgctgctaccacaaccctttcttctcagagtttagagcctctccaactttctcgaccttcaaacgacgatgaggaggaggaggaagagagtcagattccccatattttccataatgaaatgcttcaccgtagctaatatattcagaatataattaaattaaaatatataataattatatgttgttcaaaatctcataataactagtatctttcaacttatataaaactctagcctcttttaattatttatatttttgtaagtattaataatgcattttaacatatgtgatatggatattataatgcttacaaa

SEQ ID NO: 133475 - DNA, 611 bp, Cannabis sativa
ttctctcaattctcttatatgctcactgtattgccaaatatttttttagtggtagcatacctcacttccttattctatggtaatgaaggatttctcattttcctagccatttccaagcttaaggattcttaattaagtctatcaaactatctcaaagacatcactagataccttttataatccataacttacatcgatcaaaacttttgaccaaaacaataatgctaataagcatttcctcaataaataaacatacacttcctatcatgctttactattaatataatcatagcatactgcaaatataacttaattcatgcttctcaaataatcaaatgtagcaggtaaataataacatatatgatatgaaacaagacacattgaacacataaatatactacaaaacaggtcacaactttcaaaaaacaaaccactaaattcatagtacaaaataatcttcaatatacgttataatataaaaactaaaaattaaaaaatcaatgaaaaaaagaaaatgataagctagattagagagtacttaattatgtaattaatctaagaaaaagtgtccgaaaagcgaataaaagaaaaaagagaaatgtaagtaaatg

SEQ ID NO: 133476 - DNA, 558 bp, Cannabis sativa
atctttgattttgttctttttatattcaagcttaaatcaagataaaatcaatctaaatatgaaaaagataggttagacaagaacttggggcttacaactataaatttgatgaagttttaagaagtaaattataataatgaaagttattctcctatcccacacatgattgaaaaatttcttggaaaattgggaacacacatgattttctttggtaagtccattcccacgttcaaatgagatgaaacactttgaacttgggccatgtgatattgtgtgaagagtgagactattgggcctatctatgtgatcattgaagaagtacttacttacttacttaaagaattaagatcattatcatacatgaataattaatatttttgtgtctaaattatttaaactatgaagttgtacctttaacatataggctagttaataatatcgcttaaaatataacttttatagtactaataacactaaaaaaaataccttaagtgataatattttagtcataaaataaattttctagtgactaaatgtgactaagatcggaagagcgtc

SEQ ID NO: 133477 - DNA, 508 bp, Cannabis sativa
taaaaaaaattatttattttaatataaaattaaaaaaatatttaaaacagtgcgaagcgcggcctatttcctagtaacactaatacaacaagattttttttaacattgaatcattctaatgaattctaatgaaaagaacaattagagagtagatgagaaaaaaccattcaaataatatacatttatgatttaaatgttaatttaaattcaaactatattaattaaaattcattaaaattattataatcaatggcataaacaaaacttattttacctttaggtgaaatatatgcttaaagaatttcctttcctttcttccttcttttctctgctattaaagcatcctcaacaagctcctcacttggggttattgtactcttcctatttagatttgtctatgaatgttagttgaacacggctcgagaggcttggaaacaattggaggtgaggagagggaccaattctgtaacgccctaaataattaggcacgctacccaaaatgcttatg

SEQ ID NO: 133478 - DNA, 510 bp, Cannabis sativa
ccatgtaaatttccctagatctttagagtaaattacagttaaaatacttaatatttttaatatgtttcactcgccgccaaccctaggtataggcggattaggctcgtgcctagggcccactcattttaggagtccaaataaaaaaaaataccttttaaaaaatatacatatttctttaataatttttaaaaatactatttatctttatagtaagagctcaaaaaaaaaaaattgtctataactcatttcaactgagaaccggccctggtttcacttttatatctaattaattttttggtggtaagtttattttatattttcaaaatgttacatttttatagtcaatttcttatttttaatttttttttttacggcaatatacattgattttaaaatactaaagtactttttgtacctaatctttaaaaatgttggacgatagtaacaaaatacatatttttgagatattttgaagaaaaaaaaaattagctataaatgacatttcttttt

SEQ ID NO: 133479 - DNA, 751 bp, Cannabis sativa
  modified_base (681)..(708): a, c, t, g, unknown or other
tacatcccttttaagggggtgcaatgtagaatcaccctatattatttttttaattttttttttttcaaatttactatttggattacttcataatttttttgatagtttttatatggattgctatgtaaattttagttgttatagtaatttttatgtaaaattccatttgaattgtaaaaataaaaaaagtttcaaaaagtaataataatattttggttattaaaaaaattattatataaattttgattaataagcaaatctaaccaaaattatgacacgaagatagcaaaataaaccataataaaaaaacccaatatcttagtggggacaaaaaaaaatatttttttattgaaaaaaatataaattttatgagaataaaaataaatatatgtgaaaataaaagtgaaaaatataaattttataagaatataaataaaatatgtgggataaaaataaaaattataaagtttatagagacaaattaaataaaatatgtgggataaaaataaaaattataaagtttatagagacaaatataaaattttgtaaaaatacatataaaaattgttatttttatagattcaaaatataaaatatctaaaaatttatatacaaaatttatatgaataaaaaattaaggaagatcatgttggaatttatgttaccaggatcttagatctnnnnnnnnnnnnnnnnnnnnnnnnnnnnaatatgaactttctaaaacggtgaaataaacacatataaagtt

SEQ ID NO: 133480 - DNA, 1924 bp, Cannabis sativa
tttattttaaattcatgctttctactcacttgaaagttgtaaaatatttgtgtgtggtttctattatatataggtaccctgatacacctggtatttggacaaaagagcatgttgaagctcggaagcctattgttgatggtgttcacgctaaaggtggtgtctttttctgtcagatttggcatgtgggaagagtttcaaatgcaggtgagtcttagcatctgctataggatcttaatatacaatatgatgaccttatgaatggaattgttggccaaatgtaagtatgtacgaaaatataattgtatagacttgtgacactattaattgttaattactgagtataatatcaattagctggaatgagaaattaaaacgcagagttgtgtttatttagtatacttgaaattttcctagagactttgattttgtgtttatttaatttttatgttgtttcttcaggccactgtagatgatctacaagaggcgattcataagagaagtacgtaattgttaatagtcatttgtttggtcaaaattaattttcacttgtaacaattgttaattatatgatttctaattagtttggtctattagttatagaattttgagaggtttacctattaagaagtgaacttttatataagtttcagttcattttcagcttatcattatcatgaattttttattttgttaattggtacataattaagtatttgtaataagttttttctttatggagtggtagagcttctttagcatccatactctgtacctgcaacataggatttttcgggagcttgttaaatcgttttgcttctaacctttttttactcttgaaaacacaattaaacgtgaccgaataaatgaatttttatctcattaattttcattcatgctttaattcctactcatccttttgaatcagtgattttttttttattaagaaggttgggaagtatacacaaccttttaactttgtgagccatgaaatattgatcaaatgaatcatggtgcacatgtatattttttttctttcaggaagttgtcttatttatttgttagcattcatcatatactaataagttttatgtgtgattatgtgattaggtttttgtatgagatatagagtagtttggtttttgattgtatgtgtttagagcctaaatttgttgcttacgaaaattctaagctccatatctcctttgtgttttatgttgcaaggctatggtgaatgtgtatataggattctaatagattatattttcgacacgatatggtaagtattaaggagttgttaaatttatgcatctcaataatttagttcgttgtagtgttgtttctactgtccaacacatatgatattggacactttgttctattattattaaaacatatatattacactctcttgattaccaatttactatttcatcactgattgagaaatattgttcttttctaataggattatacttttcattgtggctgccatttctacttttaattgtaagtacgacacaaatgcacgaacaactagtacagatgctatgattaatcatattctaattaatttcttccttgtttaaaacccaactcttatggtaatataaattcattgatgatgatcaatatagtaatttcacaaattgtagataatattaattgtgggaactatgcttcaagtaattattacaaagatgggattaagtacagctgatgaatactatgttctctaaggatgtctaatgtcgaaaatgactactatgaacttgaaggcacaccatctcacaacaatggaccagctgcaccaagtgaaacacaagagaataactataaagttgagaaggatataggtgaggaagtggttcaggagccaagctcctcctcacaacaaaatgaggtaaagattttcttatctcacttt

SEQ ID NO: 133481 - DNA, 667 bp, Cannabis sativa
ctctctctctctctccacccacccacaaaacccacatatcatcaccctttctctttcgatctccctctctctcgtctcccttcgtctcttgttttctctcgtccccataaacggccacctcctcttcttccactggcaaactgtcgacgcctttctctcaaagtatatacgtatatatatttattaattaatattaatttatatatatatatttctatttatattatacgtatatatgatatatataatattaatttattgtatatataagattctaccgtatgtatatttttacctatttatttaatttatacataattataaaatatttaattagttttagattaggtattaaaaaaatatttagtttagattaattatttagtttttgatttagacattttgaaaaatatttaaattagattatttgttgttatataataaaaaaaatatttttattatttgttgttaggtaataaaaaatatttagtttagattatattaattgtttaggtattaaaaaaattggttttaattaattatgtactagatttaagtggatggtgagagtgtattaagcaactcactgataaaagtgagtatattttaatgaaatataacatggtatgacactacaacattgaacactaatagcggcggacctctc

SEQ ID NO: 133482 - DNA, 1381 bp, Cannabis sativa
tatgaaaaaaaaaattaaactaaattttttttttctgaatgccgaaacaagtcaagggtgtatcagtacatcccttttaaagaggtgcattactgcattgtagaatcacccagaaaataatatagggtagttctagataccctaatattggtcacacccatacacccttaaaatcttgaatagtgattggttataatattaaaacatatagtattttagtggattgttacacattgaatatttattcatttatttttaaaaattatttgtttatttacttacaaaatacatatgaatatttattagaatattaatttattaaaatattaaagttaaataaataatactaatcatcaatatatataaaggagaaatatgaggcaataacaacaagtgagatacaatagacaacaagtgagatacaacaataacaatagggtttagtgatcgagatatgaaaataatgtattatggggaacaccgtaattttttctataccaccctatttatttatttatttttatatgaataattttttttaacaaagcaatttaaaatactacatataataaattttaaacatcttaataaataattccaaataataattaatacaattgtgcatataatttttagtaaataaaaattattaataataatatgaaataagaaaatatatttataattttactaatatatatttgtaagtaattatttattataatactaaaaaaattaaattagttgcgcaaagagctattatattactaatttattataatattgagacacatacattaaataagtgaaagccgtagtattagactttcaatttttcatatttggtttttgtttttttattttgacatacaattttttgaattatttcttgtatttctcttttattttatttttccttaatgtaaatgttttataatattcaattggatatattggcgttgtaagtggttcggctcggtgtatgcctccccagggatgggtgaaaattaactttgatgttgcttgcagccatcgcgcgtgacgattaattggcaagaaagtgagtgaattttgatatgaaaatttagattcctcttggttttttccttgagctgaaaaagagagaaagatagaaggagaaagaagataatttggtgtgttgtatttgcctaacttctacataatttctaacctatacatatttttctcttaaaaaaatgataaggataatgataaaaaaattgaattaaactaaaaatttatttagttaagggaagttttatttacactctaaaaatttctaagtacaccttatattaataatttttattttatataaaatttatatctttaattctactaagtatttttaacttttttc

SEQ ID NO: 133483 - DNA, 504 bp, Cannabis sativa
ataaaacccaacaaacccgaccaaaccacccaaaccgttggtcggtttacagattttttttaaaattgggcgggttgcacttaaattttagcaacccgaaccctagattagattaaaaaatatgtatgataaactgctcaaatcgaccgatgtacaaccctaaaaatgtccctaagtttttgtgaatgtgttttggctgtggtggcaaatttcaaattcctttcaatgacaaattaaaacaccttttattctacattagtgttaaaaatatatattatattttgtggaaattgtaaattaatctttttatttactgagttttttggaaattaattaaatgtttgtaatgaggattgaggagctttgcaagcaaattaaaaaaagataaggagatttttttatgtggttaagtattaaagaacttagtgtaacatacatataacaacatatcatatcatatattattcttacatataatataacatcatatcatagtgtaatctt

SEQ ID NO: 133484 - DNA, 545 bp, Cannabis sativa
atcttacttgattcattattcaaatatatgtataattttattatggtctgatccaattgtttgttgagtatcattgcctgatcgtatacaaatataacagtgagtggtattatacatgacgaatgtcttttaacatttttcttattaaaatcatatctaattcacatgtattatacatgtcttatatatcaaattacaagtaacttttcctattataaaatatatatactaaagcatactagtagtttttaattttgtcataaagtgttatattgtaattggtaaaatttaatattaaatcttatatattttaattaaataataattatataaaaaaatgttaaacatttataaggagccgaatcattgaggtaatgagcactattaatagctaacagcaacactaacaaaataagcattgttattagatattattagtgcctagcactatttataagttacactttataaatggttaacaatagtttataataattattaaattaaattatgtgaaatttaatatttaattacactaataccga

SEQ ID NO: 133485 - DNA, 977 bp, Cannabis sativa
ggatccaaaccagagtagtttccatgccttcaatcgcgcggagcatcttggagaaggaatatgctgtagaccaactaggaggccttttatcgtacacaccctgatacacttttttggaagctagaactgcacttagaatttaatattcttcaactcactgttgctctcatcatacgtcatctttatctccataacaaaaaactaacacgtacgaaagcactacttcaccattcatatggaccaaatgaacctcctatatatttatgtttacgtctctcttccattaaatgtggtatttaaagaaaattatttctattaaaaactagtatcattaaattaatcatttatttattaaaatatagcttaaataattatttaaaattagataattaattttttaatataaatcttaattgaaacttaaatttttttcagatgaatttaaatttaaattaaatgttaattcaattaattaatcatattttataacaaatttattagttatattatttaaaatatctaaacttattactctaataaacttaattagatatatgttcatataaataaatttaaaagtagaataattttttaaaaatataattgaatggtattaaatttaattattattattatcatttaaattaataattaggtaatagcaactctaattcaattttaagaaaatcttactaatatatagttaattatatagcatattaaatgtgtctatagaaaagaaagtgttattttctttttgtttttctatttttttttaaaaaaaaaactcactgcaaatatctttttttatctttatattaaatgtgtttatatttttttttttaaacattgcaatacaaatttaaactcattgcacacatatatctaaaaaatatatttatattatcattttttttaacccaattcacaaatatttttaaaaaatatctttatattattgttttctttttaaacaa

SEQ ID NO: 133486 - DNA, 922 bp, Cannabis sativa
  modified_base (850)..(850): a, c, t, g, unknown or other
atgtttaccgaatggagggatagacagatggaggcattaagggctcaccatgcagagattgaaaattgtagtcggcaagctgtcgtgctgatacgaaaagcctaccaaactgtaggtcagcaacttccaaatatcattcccctgggtaagatggacgaagatccagtaatgaatacttcccagactgcaaatggtcagccgcccaatacctggtcatgagttccactcgtgggccttacagtaggcaggcaaaccttgtcttgtaattcatcaggagaagtcatacctgattgttccaaccagatcagtggtgccattccacccgtcaaccaagcgaatcaatcgctaagacagccaggcacttcagtattcgaaaggttgggggcgaccaatgacctaaggaatgatctaaatagaagtagggaagtagacaagcagaatctcgcgacgatcgtgcagcccaaaacccgcactcaaattcccgctgaaaaagatgttgactaaattcaaattgaccagaatgccgagcaggttagcctagctgtacgggcacagctagacgaactgaaatatatgattcacatcatggatggacaaagaaaccttgatcttgagctagacagagcatgcggaactcctttctcacctgagatcaatctcttgtcgttcccccacaagtttaaaatgccaacatggaagatgtacacagggagagaagatcccctttcccatctcaagtactttgaaatgcaaatggacttgcaaggggtacgaggagacgtatgttgcagaatttttcctgcaaccctgtcagaagctgctcagcaacggtatttcaagttggctcctngaaagtttagttcatggaaaacattctcttcggaattccatgcataattctcctcctcacgctaacttccat

SEQ ID NO: 133487 - DNA, 949 bp, Cannabis sativa
ctgtagtcccctcatatggtgagacgtgagggttttgaaatccttgggcaaattcagagctcataatgattagatggaaaggtttgagctcttcaatggagttgtaaccaggaagtttcccatattctccatcttcgtatttctttaatttaaaatttataactcactgatttgcaattggattggatcctcttgctttcgattatatcatttagatgttggcgtaaatcaggagcattttgatttaagcgctcgcgctaatcaggttgtctccgattcaaatgttcacaaagatctagctgtcttcgttcatggttgctcatggacctcgtatctgagtaactcttagattgactactccttgtatgactcatacttttgcgatcattactacgtcgaggtctatcccctcctcatgtagatcgactgtgatctcgagatcttgaacttcctaagctagaactttcctcgtcatgtacaagccttctcctttgggaaatgtttgatacatgtcccctactagggtgtgtatacgcctcctccctatcagtggagaataagttgacggtgtctcggtggtaatccacttgtcctaggttgagccctaggatttctctcattagcacgagggatcttttggtcgctattcctgggttgccttgcattctcgtttctacgagaagactctggtaagtcattgttttcattcccttgggttgtgaatccccggggtctacgaggcacttcttgatgaggtgcctgattatttggttgttcatcttctgaaacatccctattttccccaagtttctccccctaagtgttatgggggttttccgaagccatctcctgcctcttggttcttgaaccttgaggtctacctcgcaaccttctcactctaggattaggctagttttgtgcagcgttttcttgagtcgccctggctgcg

SEQ ID NO: 133488 - DNA, 584 bp, Cannabis sativa
aaaataatataaggaaaaaatttttaaaaaatattaacactaatttttaaaaattatttaagtttatattttttttttaataatagggtgtatttatcgttttatctttgtctttatttttatttttattttcattttcattttcattttcatctttatttttttctttcataattaaaaagtaagtctaaatattaaaattttaattgaggatttggggaattttttctcaccaaattcaacgggaaataaaaattttattattgttgtgatgatttccacaatagtaaagaattatttttgttttttttttctatatataaaaataagtaataaagaacatagtactaaaaacaatagcattcaaaataaattttttaatcacctaaatatgcgacttgtataaatgaataaacttttttttaatttgaaggggtatgaattttctattttatctgatatttgtttccagctccatcacgatgttttgatggaaagtatatcatcctaacttaaaaaaaaatgagagttccattcggaactataatgttgtatttgttataaatattaataattatgtggat

SEQ ID NO: 133489 - DNA, 708 bp, Cannabis sativa
  modified_base (654)..(660): a, c, t, g, unknown or other
aaactttgaattaacatgaatgtaaatctgcatggtcacccttcaaaatgaaaaatgattcaaatgaattaatatgtttatggcttctctctatctctctcactctctcttttaagttgtgctttttttgaaaaagtaagatcttttaaatgcaaaagatgttcttaaaaaaatgtttggtgaataaaatgtgaacctacaaaataaacaatagtaattttctattttaaaagtcaaaggtttagtattttttgaaagagtcaaaggtttagtatataaagccgtttatgcacttatttttatttatttttcaggagtgtgaatattcttgtaagatgttatttcaaagtaaaaatcgggaattattcaaaaaaaaaaaagtaaatgtaaaagttggggaaagttttgaattaaacaaaagatttggtctttgtggggggttttttaggccactctgttttatctttgaacataatttagaaggttacgcgtcactcaattatatataaaaaatattgtaaaaaagaattttcctacaactcttcctttttttaatgttagttttttctcttatctttttgtaagattctgttattgagatggacgcttactatatatatgtagggatatgattttgtcccgtgatgtactttnnnnnnntgtattccgtggtacattagatgggtctcatggtacattaaatgagtg

SEQ ID NO: 133490 - DNA, 662 bp, Cannabis sativa
gatgttcaggttaatggggaagatattttttggtcgaattctacggcggcggcggcggcggcggttgcggcggcggagaccatgccaagctataataataataataatattcaagagctggaaagttttccatcaacaaatctagtaaatgatatatggaattccttcgatttttccgggtttgagattttctcaagatcctaattatatacattaaatggcatcatgattatttattcatctgatttgcctatatattcttacaatatttttgtaatttttgaatcaattaaaagaaaatatatcataatggtataaataggtaattatatacaataataatatcatatttttctgagttgtagtttttgatttttactgcatatatttatacttataataataataataataataataataataataatagctcttcgatcgatttagtgattgtgtactcagtggcggaatcagaagacgaaataaggaaaagccaaataaaatatatttttacctaattttttttagtatgtaatatttacaaattaatataaaaagttaattacttttatacaatatatataaaataatgaaaaataataaagagcgccttatagtgccaagtactaaaaaatactataaaaactgttacttttagt

SEQ ID NO: 133491 - DNA, 546 bp, Cannabis sativa
  modified_base (389)..(390): a, c, t, g, unknown or other
ctgaagtgcctggggacaatgcttccaaagctgtgaaagaaaagtatgagcgttggcagaaagcaaattgcacgacactgtacgaaaaatatgtccttaagcacgatacgacgcgagaagcacgaaaggcacgacacgcaagcacaaataaattaacataaaagcacaacatgcaacaagtctgaaaagtacaacacaacatattaaaaaaccttataatttattattattattattattattatttatatatgaatttattaattataccccttttttaattttaaagaaaaaggattacaatatataacttagctaagagttatatgctcacctcatgaatgatggtaaaaccaatgtaaggtttacactgtacagggattaaattnncgtaacaccctacaatgtatttgaaattaacatacccggtgacattattattatcaaatttatcaggacaaatattttttgcgttagtttattttcccgtgattctctaattaaaattttacttaaactttcccaaaaaatattctgagattggtc

SEQ ID NO: 133492 - DNA, 2267 bp, Cannabis sativa
ggttttgaaagccaagacaaagatcaggtttgtctctgaaagaaatcttatatggtcttaaacaagctccaagacaatggaacttgaagtttgatgaatacatgaacaagattggctatattaagagcaaatatgacccctatgtgtattttgcaaacaaaatccacctactggtgtatgttgatgacatactggttgttggaaagaaaagatctgagattgacaagctcaaacagctcctatgcaaagaattcaaaataagggatctggggacagcaaaaagaatactaggtattgacctcagaagagaaaggcctcacaagatcattctatcacaaagtaattacctcaagaaggtgcttgacaagtttgcaatgatcaactctaaagctgtatcaacaccattagcacaacatttcaaactatccattactcaagctccaacaactaatgctaaaaggaagcacatgaatcagataccctatgcaagctgtgtgggaagtttaatgtactcaatggtgtgcacaagactagatattgctcatgccatgagtgttacaagcagatatttagccaaccctgaagaaaaacattggtctgcactcaagtggacaatgagatacattaaagaaacactgaacactagtctagtatttgatagcagagaccagctacatggagatgtaactggctatgttgattcagattatgcaggaaatattgacaccagaaggtctctaactggttatgtttttactgtccatggaagatgtgttagctggaaatcaaacttgcagaaagtggttgctctgtcatccactgaagctgaatacatggctgcaacagaagccatcaaggaagttatttggctcaagggaatgtcaaatgaaatggagatagaatctgaggacatcattgttttctgtgacaatcaaagtgccttgcatctcatgaaaaatccaatgtttcatgagaggtcaaagcacattgatataaaatgacatttcattcgagatataatcaattcgaagtaagttcaagttaagaagattggaacaaatgaaaatcctacagacatctttacaaagagtaccacaagtgacaagtttagacattgtctaaacttactcagaatcaactaaagaaatgtctcctcatggagacaacctacattggaattagaaagaaattcttctattggaaatcattacagaggtgttcaagtgatcaaaccaggtggaatttgttgaggtttgacctcttgaatttggttttactgtcggttttgacagttggcatactcctctaactaacttaattgtcttgacagttaagttagttatatgctaaccatatacctataaatgaatacctctcacttgtgtacagattgagagagaaaattcagagggtttagagagaaattgagagggtgtttgagagttgtaaatgccctctattgtgtttgtttgagagtgtcaccagtgagacatgttgtgaggagcaagactccattgtaacaagggtttcttccctgttttgtaacctctgttcagatcaataaaagttcgtctccacaaccgattcaaggctgctttctcccgtggattaagctcatgattaccttgattgtgtagcccaatcacgtaagttcttgttgttgttgtttagtgctttcattagttgctgcatttactggtttatgttatgatttatgctaccgattttatgttcaattcatgttcttgatcattgtgcattgttcttggtttttgttggttcttatttggagtttaagactccacaaatttattattacaattaattaaaatataaaattaaattaaattaaaaaatattaatgattggtctggcggattaaccaaactaaaagaacagatcaacctattagacaagatacttttttttttttatttataacttagatggattgcacgttaataaaaaaactaaaattaaaaaaaaataataaaaaatagacgaattgcacttaaatttttctaatttgttctttatactgagtcaaatgaaatgtaatatgaaaagaccaaatagtctaacttctaatataaactccacatatcatatttagataaattaaaggagtgagatgcaaaatagtcctaaatttagaaaattaagttagtaaatgttcttttttttaaaaaacaaattaagaaaattgtcaaatataataaattagctaataaaaattataaaattattttactacatattaatttttt

SEQ ID NO: 133493 - DNA, 978 bp, Cannabis sativa
tggaggcttgaagcggggacgttacatgttctgaagctaggggttgcctgctaggctcttctcagataccgtaaaatcatacgatctggaccacttgggtcgcctaaaggttcacctcgaatggccttgcctctcaaaatttaagacaagggtgtactgtgaaagcatcgttagggccaaccttacctttgcagagcttcaagggcttgagggtctttataaggaggagctatttctatagctgcctgtcaatgtcatatctgtaaatgacccttcctctggtctaattttgttcaatattggtgttgcccataaacgactttctctttctctctttgaagtgcctcctattagactatttttagcctaagttttgggtcactttttagtgttgttttcgctctttatttctacttttaggatagttttatgattgtttctctttgtttaaagaaaatattcatgagaattagatttgacaaaggcgggaaagaatcgaaaaaagttcaagttatttctggcaaagctcgccgcgacaagcatgaattatggtcgcgacgaagtttggctgaacgttgtattctcgagtctcaatcagtcgtcgcgacgagacttttcgtgatcgcagtgtagccttcattacgaatttgtggacagttttatactttgtcaattttaagtgggaaacttggttcttttaaaaggggacttgcaatttttgagagggtaattagaactttagacttggaaacaaatgagagaacttcaagagcggcttgtggcaatccacattgatttctccaacctattctttcttctctcttaatttttcaatgctattttctgttttaagtttgattataggtttgattacggagattatgaactaaactctttatttggggagatgatgaatgttgattgaaattacttttggttaatgataattgctatttctcctttcttgattgtgaattt

SEQ ID NO: 133494 - DNA, 577 bp, Cannabis sativa
ctctcacggcctctctcgttttttttttgcgttttttcttctgattgggtttttccagaggtggtgcggtggttgtggctttggtctgggtctggtttggtttggttttgtggtcttgggtatcggttgagtttggtgagagttaaagagagagagggagagaagggcgagagaaagagggaaggtatgaggagggtattttgggatttaattaattttagagtattaaatttttatgcatttcaatgtagcatattaaaagaccatgaacaatttttaagcatgaatcgtcaaattttccataattgaatatgttttcaacataatattttagatggttattttcattgtgtaacatcttgtgttggctgagttggccaattatggttgtgcaaaacactaagaacaaggtgtggtggcttggttctcttgatagtggagcatcttgtgttggttgaggctgttcattaataaaagggttttttttttataaatatggcttttttgtaagtggtttagaaatatatggagaaataaagaaattttataaaatctggaaaaatgaataaaaaattta

SEQ ID NO: 133495 - DNA, 689 bp, Cannabis sativa
gatctattcacgttttttgtgggtcaaaaaattatttttattcatataataattgagacataatctatttagaaagataattaaaaagatgaaattagtttgacaattcaaacaataatatcttttaggctatgagcgaggggagggattctaactactctccttcttaaatgaatcaaaccgcaaatattagattaactctgtttgtagatgcaactatcttaaaggaatctaaggtaattagagtagggccattattatatcagcacatcatatagtgttaacactacgaaattactaatgtagataaattttttaaggtttatagttttcatataatggacaattgtgttttctaaaaatcttaatgatttgaaaagaaaataatgttataagggctattactaactaaagaaatctatttagagtagtatgagttattccttagtttcctcctttagtatagaaggggtttgttactgccttggatctagttttgttttgtgatcttcattttcttggaagcttattgagttttgtacaggaattataataattttgatagttaattactaaccaaaggtgtgacctttggttagtattggttgtttggtctgttttattttttttctttgttttaaaaagtagtttcagttttggcgtcggttgggttttgctttggttgatag

SEQ ID NO: 133496 - DNA, 597 bp, Cannabis sativa
aacttgagatttgatgaaaatgagctgtgtctcaaacacagactctctgttgtattatatatgcacagaacaagtgttacaactaactgaattaagttaggaaaaggagcttacaaataacagattatgtacagtaaaaactaactcctaactacctaactaccttcactaataacttataaacttaacatctatatgtggttgattatgtttatgtatgtcttatacaatttatagaatataaagtataaatttgataaaatatttattttaaattcaaaaattctttttattttcattttgaattacattacattacattatttcattattattattattttttaatctttatgggtacccaatgagtctccataccctatggagattctcctattccaaacttattggggataaagcgggacaagatgtggacagattgggcgtgcatttcccgctcattacccacttaatttctattcctgccaattgcaatataacacgtgtataatgttggacaccttcatgtacctaataactgtaaagcccgcttagtttaatttggaaattatcagttaattgtgattaattatgaaa

SEQ ID NO: 133497 - DNA, 581 bp, Cannabis sativa
aaaaaaaaaaaaatcattttattaatatcccataaaaatttcagaatatacataaataatttgtgagtacacatgaaaattaacaatattataaacttgaaaaggctgacctaagaggacaacgagatataatctgtaagcaatcccttgagcctgcaactgcaagcaacgctcgattcctgaatagcgatttggggccaaagagatgaaggcgatattgataaccgctaccggtgtccctgaaggaccctgagctcaacattgatgagatcgtagtcaaggtcaaagccaaaagcgctcaatgtcgtggccagtacccatcaagtcgaaggcgccaaagttgcagaggagcaagaagagtaaaatcaattttttttacagagaaaaatttaacaacaaaacttaaaaatgaatttgaaaaataatatttataaaataaagttttatagaattaacaataaaaaaaaaaatgtaaaaacgaaaaagaattagtaaagttcggtataattgataatttctcttatttttttattgtttataattttatataataaaattagggaaattattttatatattat

SEQ ID NO: 133498 - DNA, 980 bp, Cannabis sativa
  modified_base (49)..(71): a, c, t, g, unknown or other
gtttatttcattgttttagaattcgtattaggatgttaatgaaacatannnnnnnnnnnnnnnnnnnnnnngtaaaatatttccaacacttagatattattataattattaagttataaaaacgggtaatagaatattttgtaccctatatttttttaatatatgtaatgcaaccgtaaatttcttatatctcaatatttaaaaataggtatttacacgtatatataggaaaaataaaggtaatttacataaatatggtcaagaaacttaataaaaaaaaggtatttcaaataaaaacttaacatatatgggatatgctactttgaatttccattaaaaatattaaaattctcttcatattttttttaaaaacaaaataaataaaactacagtaatggccgaaaagtcattgctatagacgctgaaaaagtcgtcggagtagctttcggtgtcgaaaaagtagccagagttgctactggcacgagaaaagtcgtcgaaattggcattgtcgccagaaaaattaccaagaaactggtttcttgatgaagaaattggcttcttgatgaagaaaccatttcggtgacaatgtcaattttgacgacttttcccaagtttgttgtcggtgccggaaaagtcgccagagtagctctcggtgtcagaaaaattaccaaaaaaatcactaagaaatcgatttcttgatcaagaaacggtttcttcatcaagaaactggttacttcatccggaaacggtttcttcatcaagaaactggtttcttcatcacgaaacaggtttcttcatcaagaaaccagtttcttggtaatttttctggtaacttttctggcgacaatgccgattctaacgacattttcggcactgctagcaactgtaacgacttttctgacgccgacagctattctggtgactttttctgacgccgacagcaaactccggtgacttttccgacaccagtgacaaataaa

SEQ ID NO: 133499 - DNA, 563 bp, Cannabis sativa
taattgtaattttatcatcaaatttttaactaaaaggacattttgttaatttttttaaaaaatggacatttattaacttaattgttagatttagggccatttttcatcttgacccaaaaaagatttgcattatgtatgtattaatttgtgggtttgcaggggtctaccccaagaccttccatccagactcaaaaattcatttaacaacaaaattctaaatttattttttaaaaaaatgcataatttatgtttttattactatttattaaaaaatatatctattttctaaaagaatatacttaatttaactcttaagatactacgttagatattttattagtaagaaaagaggtttaattatatttttaaaatattatattttaaatttttatcattatatatataaaaaaaccataaatttttcatatataaaaaaattatttgatttttttggcccaaaactcccaattaacttgagacgaatggattattaaaaaaatatatctattctatataaagtgtgcctatataacaaaattcttgatttatgagaaatttatggg

SEQ ID NO: 133500 - DNA, 939 bp, Cannabis sativa
agtctatactgccgtataaaaaaagcatacacagtaaaaaagataataatgccgcctgacagtataaatgtaataaaatgggaaaaatcagtagtgggtgtaaatttccctaactaatctagttggaaaaaaaagttgacataagtggtaatattaattagagtaaggtaaccagaaagagtcacatgtggctagatgtactctactacgaaaccaaactcaacttaaataaactaatgaaacctacagtcgtagataatgaaatagagatcattcatattgttagacaaaagagatcattcacttgcaaatttacaaagcataactaactattaaagttacaaaaacggccacaaacttgataatagctgacgagaaacaaattattgtacattaataatttatacacaccatattaacatttaacttgtttcttcttattcaaaaacttatatttaatcttgtttattgctctatattactcttcaccactgactaatcctatgatatatatgaaaaaagcaccatatcacatttaatgaaaattgtttataaagcaccattttacatattaaatgatctaaaaaataaatctatcaaaataaaatggcaaaatttattagagtttgtcccacattactaatgtgtggaaataaattgtgatacataagatgaatgggctactcctcccattgccaattggttttgagatggaacctcattcaccttattcccaaattctaacatggtatcagagctacttgtgagcccaatttgccacctcgttgtgagcaaaaatgttgccggtccaatcagatacttctactgtctcccatttaacctcaattgtgtgccaatttccaatgttggggtctttgacctatttcaaaatctacaaatttctcgacgtgtacacccacaaatttctcgatatttggc

SEQ ID NO: 133501 - DNA, 944 bp, Cannabis sativa
cttagatctattttatttgtgattattgtgtgtgtgattgattgagcacctcttacatgctatttatgaatttaaattaaaatttgaatatatagatttaaattcaaaacaacaatgtcagattggtctatataaatttagggttgagttcattgttattcctattatttaaatttttcatagatatatagattgtattaagtcgagtattatatttcttattgtgaatattttatatttttgtatgtctttcatctcagtgagaagaattatatttgtaattgtattaatgagtagtaaaataaataataaaggagattaaaatctctactttctcattatatatttgaatcaaagtttattattttctgcagttctttcatttaattttgctatctattattttagtttctaaaccatttcgattttagttaccaaatggaaaataaaattattagtacttgataacatggaacaataatcagtcttagcaaaataaactacaaaagtaattacacatgttggatagccttaattttcttaacaaaagtgttacaattaataagcatattgagcaagtacaaaataagcttacgaaaggtgggatccctggatttctcatctgaaaagttttatcccgaaacctaagggaggggtaataaccaattatcaatatattgatgatctattgtttgcaaatggagattgaggcatcccaaagctaaatggtctttttgataaagaaacggtgtctgcaatagttaaaggtggtaaaccctcaggccttgggggagatagataggtttggaccctgaaaagaaaatggacaattcttaagcaaatcggcttatctgcctcaagctctggctagggcccatcaatgtgaggtagctccgtcactatggaacaagttgtggaatagcaaaattttggaaaggcataag

SEQ ID NO: 133502 - DNA, 583 bp, Cannabis sativa
gggtttgatattgggcagtgcatttatagtttttttatatagatttagaaattttagttttgatttaaattgtatgttgtttgtgtcaatttttttagtaatgtttacccattttgtttgttgatttgatatcagactttagagtttataagagtgccttctctcttcttctttctttattttcgatgaatgtgtgattttgacaggctttatgagagtcccatgtttttggtctattgttcaatatcaatcaatgcagctataaatttgctgcatttttcaataaaatttgccgaatttaaccattttttcaactatattgtcttgcttttaaaggctttatgtataatttgtggcttgaaagaaataataacagaatatttgaaggctctgagtgttcaatagatgatctttggaatatgatgagattttggacagctgggttattattaataaattgtgtatagatttgttattatcaattctgtatagatttgtgatgaattggtttttaattttgtataattatgatattttgttatattggtttattaataattttataattaaaattaaaatatat

SEQ ID NO: 133503 - DNA, 741 bp, Cannabis sativa
atgcatatagacatttgaaaggtcggcaacagagtgtgtaaaagttttagtagaagtggtagtaatggcagtagagttggtgttggagacgtgagatgatgtgtcttgaggaaagtgattcatgtggttgagagcatcaggggtgggtaagatattagtgacacaagagccaggctgagcagattgagggagtggatgagatgaagataaatgggcagtatttagtgtaatttgtggaggggttgagatagcaggttggtgggaaccaggggaaggagattggaggctggtatttgctaaagattgcagaatgtggtcaggggtgtgaatattggactggccgtggtgtgaaagttgtgtaggaatggtgcgtgaagattctccatggtggagaattcttggctgtggaggggcacgggaagggggaatgggcagtgaggaagtaagggtgtttcttgccaatcgtgtgaggaacggccaggcattggacttagaaaagtcggtgcgatatcggtcataattatttgttgggagtttagaacctttcatccaaggtccatattgaaagtcatcatcgttgcctctatccattctctccatgaaagcaatacatcgctcaaaaggatgacccaaacatccacattcgaaacaaaattcaggaagtcgttcataacggaaatcgacccaaaattcatccttgattttcggtagtttaatcatttgaccgcgcataagtggctt

SEQ ID NO: 133504 - DNA, 508 bp, Cannabis sativa
aatatggttgaggttgctcttgtcgtcaaaatactgcaaaatctctacaaaggtattcattcttgtatgcatgtttaatattctcatgtattagtttatctaaatattgattaactaatggacaaaagtaatctcagcttatttattactatcattgttactgatttgtactaatgccaatttgcagggaagctgtatatcattgtacacattgttatgccaattttaaaatttcttgtcatgccatattgtttataaactgataatatatatatatatgtattcatatatatcctactatttaaattttaaaaaattattgacaatgcagttttttttttctaataagagcataaatcataaatttttagttgtataattgtgatttcatcacatttggttttttacacagcatggcatgagaccaaagctaaacttagtattggtgtggtgtctccctattttgctcaagttgttgcaattcaagagaaggttggaaagaagtatg

SEQ ID NO: 133505 - DNA, 1228 bp, Cannabis sativa
aaaaaaaatgaggaaaaggttacagagaaaaaagtattgaccgaagagtgaaatgctctcatcttgaaaagctggaacttggccgaaaggctgtaacgtagaaaaggaaaatgaaagatggaatacgaaagtattatgcataaaaatgagtaataatatgtatatggtacgtacctggatcttgaggtattcaggtttcttgtgttcgcctttggacatgttgagtgaaatgagctgaaagtcaacatctttctcaatgagacaggccagaaccctggacactgccgtggacatgggtggtccgtacaccttaacgggagctgccattgattccgtttgttctctctatggaattgaaagtaattgagagtggttttgatgaggtatctgttttgtttttagaccatacaaaaaagaaaaagcactgtccactttagtttatcccttgcttaaattagtggattggaattgggtccacggagtccactaagttctgagaaaacataactaaaaagccgcctaattaaagacatttttttagcatttaatttataattagttgtactgattaataatattattaggagaataatattagatgaaattgatgtttttttttttacattttaaaatatatatttttttataattttacaaaaaaatctacatagtaacttatgttacaactaattagaataaacactagaataatttaaaccgtaaaaattaaaaataatatgtggaataatttttttttcttgtgtgtagacccaaacccaacttccttttggtgaggaagccacatcaaagtaaagtaagtaatcattaattacaattcaaggccaccgccaccacttaatcaaagtcagcctaatactgtattatgagaaatgctaaatgtactaattactttattactacgtgtcaatattgttattagtctacttaaatattagatcatatatataaataactaagagtatctttaatagaaagatataaatatagtgtattgttattttttaaaatattttgctaaaatatatatttttttagtcttgtctagtgacatgttttgaaagtcttttgttctttgtcttcgttctatggcttcgagtagttctcaagatggtggctggatggatcagtatgcacacttggatattgagggagaagaagaaggagtcctgattactgatgatcaggaaggggaggctcaagcgtttga

SEQ ID NO: 133506 - DNA, 541 bp, Cannabis sativa
  modified_base (482)..(483): a, c, t, g, unknown or other
aaaaaaaaaaaaaaaaagtaccatggctgtagagaagaacgacgcgtttgggaactggaaaataactgaagaaagttctgtattctgtgccttatgcttttttcttacaagctacgtacgaaactcgccgttcacagccgcgtattgggcccactagcccatttgagtaatggtaaatggacctaaaacctgatttgggcccagacattttttcttctttgttacttcctttcaggaaaatgtaaacattggaaaagatgtgttccaaaattctaacaataataatttcctagtatttaattatattctggaaaaatattaaaaattaaagaattttaaatttatttccaaacatgattagtgtttacatagtgtgacatatgaaaagaatatgttttcgaaggaaaagattaacaattaaaactgaaaatatataagaatggctaattagaatttttgttccctgaactttgacatatacnnaatcatgcccctgaacttttaaagccattgaaaatgcttcctgaactattgagattgt

SEQ ID NO: 133507 - DNA, 1630 bp, Cannabis sativa
ttttcaaaatgataaaatatgattcaaatcttaaaccaatcagttagttactttagtacatgtaaactatttttaaattttaaaatattgaatcccaaattgctaaaaaaaattataagaatataatatcatcgtaagtaaatttaagattagtgcattgattaaattcataatacttttttaaaaaaaaaattaactaagccatatttctactagtatttgatatttttttttatctcttctccaagatagcattttctatgtttagccttttttttttgcctagagttattgtttgtaattcattttagccaaaaaaaaaaaaaatcaatagctaaatgtataaacttatttttcaaaaaagaaaattagttaaactagcagtgttcatagaatgcctaattcatgaatccaatccacacgatcaaatttattttccattccgtaaaaagtgcatatatccacacttgtgcggatcagatgctaattcacatgtaaaagtaatcgatctaatctaatccacacatatttatatataattttatgaattatatatacaataaatattttaattaaaaaattgtactttaaaaaacatctaatacatatgatacaaatatatttaaaagtttaataaattaaatgtatattttatttttatttttaaacaaatataatccaaaataaaattaaatattatttagttatacatatatttttttcttcttcttccttttaatttgttgttttttttattaattttaatttgttgttggagacataagactacaatataataatttgatttattttgttgttagtaatatgagaaaaaaagttattttttcataattattattaaataattcaatattaaaaaataacgaatttaaaatatttgatccaatccgcacttttgtagattgaatttgagttattatgcggattagattggattcaatatatgaaatccgcacttagtgccgatcgaatgcactatggaaaaaatagtgcaaattaaattggatgaacacccctaatttaaactctttagataattattatataaatgtctattttcaaacttctttccaagtgttcgaatattattaaaaaaaaatctaaataaattaaaaattatgtaaattatcattataattttataaatagtattttcaaaaatcaatttatttgctagaaatatttggcttctctcacaatgactgttaaattaaaaaaataattacttctatttttaattcaatagacccctaaaataattacaaatagtcaactattctcgtcaaactattttccagcaaaaccacagccgagaacaccttcacttctgagtttctaaatctctctttaaatgatatttgtcatgaatgtaaaatgctaacctaaactacatcttttttttctcagcttatattttctgataattttaggaaaaaacaaatgttcacactgaaataaaattatattttagaatgctttgatttgtctttattcctttgtttttggttgattttatatattatacattcaggtggttactcaatagttatatttttattgtaatgattacatttttcttaacttatattagcaagttaccaataggtaa

SEQ ID NO: 133508 - DNA, 653 bp, Cannabis sativa
attttagaaaatacaggatccattctgtcatttaataaaacacagggttcaatctataacttttacaaaacacaaggtccaaaatagtatttaccttatattttctttcagagtaattatataattttgattaaaaaaataaataaataaataatattatataactccaaattcaaaaaggaaaaaagaatagtctttttttaaaaaaaaattatttacttataatttctttttagaaaattttgttattattaaagaatcgaatccattataacaataaaataattgaataaagtaggaataaccctcaatttgtttgcatcacgattaacatgaaacactattgttctagaaaattttgaaagaagaataaaagtgtcatctacaaaatcataaatgaccatttctcaagccatttacttataattattcattagcattttataatattcatgaaaaaataccataatttattttgatattttattaatttttaattatgattaaaatgtgaaataatttagattgtcataaagaaaatccacttttaaagtaaaataatgtatactctttccttaaaaataataatgtattcgaaagatttttataaaatatacaaaaaaaaaaaaaaaaaaaaaagcttaaaaaaataa

SEQ ID NO: 133509 - DNA, 724 bp, Cannabis sativa
  modified_base (674)..(697): a, c, t, g, unknown or other
ctagttctgttggggttaatgtttagactgatgcttgtcctaaatttcttagtgctcctgtaacagctgatttgatttgaattgaataacatactttctttcaaaaaaaaaaaaaaaattggagtattataagcacccggtctttaataataacaatattcttatatgtggcttatgcgaatgtttttttaatttgttccaaattatatacgtggataaccatatgacagacacgtggatcacgaaacacgatgttcgtgggagcaccatttaataaacacgtggatggtcgatgatctacaatgactactcaatatatatttacataataaacaaaataatgtatatattgtatttgtatgttcatatccgaatctaattctttatcttcttgtatttacaaaacaccttgtacttaaataaacttttcattgtcttctttttaaatgtgagtgtgtggttatgcattcattactgaaatatttttattaaacttttcaaaaatatatcatataatattttatatattaaaataataatacaatcgtatgcggcaaagcgaaaagatactctcaaacctttatgctataaataaaatggttttaccaagctccaaacaataattgttaggcaaggaaacaaatctttaaggactcgtttggaacgccgtattnnnnnnnnnnnnnnnnnnnnnnnntatattgaattggattatatatcatat

SEQ ID NO: 133510 - DNA, 637 bp, Cannabis sativa
attttgatatacaaataattaaaattgttgatattatagatagtagcatatatagttttggggtagtgtggtaaaagtcttaatctttggtggtgttagtcctccaaagatttcacactcctaattccctcccaataagattaagttaattgtgttgggttaattaattattggaaaatataattaaatattatagagatttacagaatatatatctcaattagaaagtcatgccccaagaaaaacttcaaaattaattaatgaaacaaagccatttataggcacaacaattattttccaataattcacaaattagtggaattatattatgtaattatatatatatggattaattacgtgtcaaactaagtaaaccatacttattaatctcagtggtagtacttgacatatgtgtaagttaattaattacttgtataaagattttatatttttatttcttataaagaataagggcaacatgccaacacgtacgagaacttaatagttttacgtaagtgttcatagatctttgaatgattatattaattgggatataattttgtcccgtgatgtactttcacggaatgcattctgtggtacattagatgggtctcagggtacattaaatgagtgtcag

SEQ ID NO: 133511 - DNA, 1015 bp, Cannabis sativa
tttgtattttttatcgattttgtcggtttggtttaggcgggttatttgggttgggcggtttaggaaaatttttgcacagccttagttccagcattcaaattcaatctcctctctgtcagtgcattattaaataacacatctctcactttaattttcactcctaacatttgttatgtccaggacctttcactgacatcgatgacttggataactagaaagcaagggcagctatactacatacagcaagaagctccattaataaacaaaaccaactgtaaaccagctatctgtaatgtcaatattgaaaatccttggcatacacgccttggacacccatctgtaatcattacaaacaaaataaataaacaattaaagttctctaaatctcttgcacatactttcaattgcctcacttgtcacttatcaaaacaaaaaaagctaccctttatttcgaataacaattttgctgctgcaacttttgatctcattcacttagatatttggggtccataccccttaccttcaatcgaaggatacaagtattttttgacaatagttgatgatcactcacggtatacttggttgtacctactaaaagaaaaatctgatgcacctatgatcattcaaaaaaaatttacttacatcaaagttcattataaaacagacattaaatctgttagaacagataatgcaaaagaactcactctcaccagcttctatgcaagcaaaggagttctcaatcaccactcttgtgttggccgaccacaataaaatgttgtagtggaacgcaaacaccaacatatactcacagtggcccgtgccttagcttttcaatccaacttacccttactatattggggacatatggtaaagacagcaacatacttaataaataggacaccatctattcttttacatgagaaaacctcctatgaattgctgcacaaatcatccccacaataccatcacttacgcaactttggatgcttagcctatgcctcacacgttcacatcc

SEQ ID NO: 133512 - DNA, 972 bp, Cannabis sativa
atcaagctggaggaggagaactgcccagttggcgttgacgaggctttgtgagcgattagaaatgcaccagttggtgctgattgggttgagaaggcagacattgggctgggcctttgagcaaatttttgggctcttttctttgttttcctttattttattttttttttcttcttttcaaatttactacttttattcttccatctctcttctttgtcttcctcaacaaaatacacttcaattcccacaaaagaacaataaattaaatctaaataaaatattttcaacataaaaatgtatttcattaatttcatgaaaatatttatttaaacttaatttattttaaactttaagaccaataattgtgcatttttcaccattaatcagttccacatgcatactacgggtagcaccccaagaaagaacccaagcaaagtctgtgaaacttggtgaatagtaagtgactaagagacttgcctgcgtggtcacttggggggcacccgtaccgtacaatgcatcgaactagcacaaagaatatatgtagagaaactttaacgcttagaataagctacaaaacctacatctaagccgtgtggcatacttcggcttgacaaagtaaatccggacccttacatgtcaaggccataagaagatagccaggacgatcatatgttcgtcataaaaggctttaaggataaataatagtagtgttcaaatacaaaggggccaaagcaagaacatgaaagccttaaagccgaatatgagattggttcacatgcatgaagccaaggtcctgcaagaaccatatagccagaaaagaaccagacagagctcctataggggccacgtaccgggctacaactaaggacgagttccttacaggttccaagccatgttaagttgaacattcgactataatagactcaccattaagtttcatacagagtttccaaggaaaccacatatgagactaag

SEQ ID NO: 133513 - DNA, 561 bp, Cannabis sativa
ttttaagttcaacttaattataattatttttgtctttacacctacttataatatataattatctgccaagttttaataatgttataatgcaccttattaagatgaagatgtaaagatcgtttaagttcaatatgttaagttattaaataattagggtttaattatgaaattgaattattaattataatattacatattggtgaagatttatttaatttcaatatatgttatatgtgaatttctcatttacctgtgactgtgttcgggagcagtggaaagtggcgttgggtcaatagagagtcatactttcatatgatttagaatattttcattagttgggtattattgctagacattagaatgtcaggaaattgtcggggttttggaaaagactaagatacccttttaatagtcattaaactcttatcttttgttaagggcatattagtcttttaatttgaggattttgttttatataagcacgatatattcagatttaatatttgatttattaaaaatgggtaaatatcattttggaccctgtgttttgttaaatgacaa

SEQ ID NO: 133514 - DNA, 706 bp, Cannabis sativa
taaaaatttttaacacccaaaaaagagacatgatttactacatattaaagtatgttaaagtttagaaggtaaaaatcctaatgagctgttctttcttttttttttttaaaaaaaaaataaataatacaaaatcataaattataaatttgacagtatcaactattcaactttcaaggtataataagattattggataagtacatatattttttttcattatatatatgaaataaaataaaaatagaaactcatactttgtttacgcgtgtaagctccaaattttgactatatataggtttggttatcatacgttatttcctaatgttctctctctttgtctctcttctctttctctgataagccgtatcagagcataacgaaacaaacagaggccatggatgtacaagatacccctaaaacatcctcaaaggtacgaacaaaacatacttagatctggttccatttctcactttttttcccactttcccatttcaattttctttctgataaagtagttttcttcagatttgcaactgcttcatacgatttggaaaaactctattcattgcttttcttttttctttttgcattcgggctatttagaaagattgattactgaaattttgtttatttttcattgggttcttgttaattgcagatgacattgctttgaaatattgtattgatacccttttggcccttatca

SEQ ID NO: 133515 - DNA, 637 bp, Cannabis sativa
agctttcttgtaatcttgatgaaatacttctatttttattttaagtattttgattgtaatcctcacattctctcttgtaatgagaacttttccaacagacgtcatgtctctttccttgctctaggatggtgaaggagacagtagatcctaactgaaccttgcccaaggaatccatctagacgaacctaggcactcatgatcccgggtggaattcgaagagtttaaaggtggctaatattgtcttcccagttggtatcctacgtggaatctctctgaaggaatcccaccaaattcgaataatgtctcctttgtcttgtatgaggaaagagcttagataaaaggtaagatcaccctagggattgaaacagccacaactctgacacaaccatttttccatgcagaatagggaccacatgcagcctaacacattgactccaaacaatactatcaatagtgttccacacttaccaaacataacattgggcttcttcttgaggcctaataaacattcaaatataatcactccattagtgggcttacaaactaaagaaaaactgttgggattttatgctctaaataaaatttattttaatataatcagatttactaattaataaaagatcagaaatcattttat

SEQ ID NO: 133516 - DNA, 588 bp, Cannabis sativa
tctctctctctctctctcaatgtggaatgagagaaccgcgcggacaacaagaaatgaaggtaatttattctccactcactcctccaatttcaatttttgtagggtttagttttctctctttttatctcatttcatacaataatttttctggtgacagtggaaaattttggttggtggctttattctacacttcgaatgtttctcttattcatatccttcaaacaaacagctttaagatttcttgaaatttttactacgaaactgagattgaagtcataagatttgaatcttacttgaaaatatgtgtctaccttcatttctgatgacaactttgctttctttatgtgtatatatttgtattattgtaacttgaattgtctcgtagaactaatttatcttgttcattactatacatgtatgaatgatgttatttctttttttgctgattaattatttatgaatgtttgtttagatggagcaaagctcgcaatccccatatgttggaactctacttttatgaggttttgattcagtgttacactataaaatagtgtaggggcttagtagtaatttctacagagtgtgaat

SEQ ID NO: 133517 - DNA, 776 bp, Cannabis sativa
actctggatcgttgtttccaaaagatttcttcttttaggagaagtctgttaagctcagattggaggtgggaaatttgttgagcagaatgaggagcaagctgatcataattcaacaagtgatcaagttcagcctgcgttctagcaatttggagtttaaaagatggctgagaagcttgccagtccttaatgttggagaggcattcagattgttttttaagaaaaagttgtaaagggggaagaggggaataggaagagaggcaccaggagtcatggaccaaggttgagaacgaaggatcattgattagagaattctcaatataaaaacgggattacttttggtgcttggaaaaagtgtcctctaattggagtttcagggctctgtggtcagagccataaaaccccaaatgagtgagagaggcatgaggaaaaaggcttttccaattagaggaaatcgtgcaccagtcaaggcgctcaagaatgtggccgtggtgcaaagtgaacttgttcctagaatgcgggagaggggtcatgttacgagtatgcagaaatttgtggaagtggtgcatggcatgggagggaggggaagaagtggaattacgatcattgaaagataaataatcattaaaatcaccaattactaaccaaggtaaaaggggtgcagtgtcatataaccgattaagaagagtccaagtaaaaactttagaatcaagataaggagaaccataatacccagtaaaatgccagtttatatcattagaattatttatataacagtc

SEQ ID NO: 133518 - DNA, 1023 bp, Cannabis sativa
  modified_base (694)..(697): a, c, t, g, unknown or other
tttttttaacataattttatgatttcaaccacaagaaaataaaaataactacaatacatattaatacaaatctaaaacttagactgcttttatttttcaggaacaagaacaattgggctgatgtcatcaaagttttcattgtagcgctcatctatgtttgttaaatcaagatcttcatcaaatttcaacataggtgaaagttcattaactttcgacatagatgaaagttcaacaatttttgacatcatagatgaaagttcatcttctagcctccttatttttctcagcaagcccggtatgactactgcagcacactcacacatcggaggctcataccactcccaaaatttacaaccacccacttgctgtgaaaaaaaactaacaaaatattacttttgggaaaaaacaaaaagaaaaagagaagaaaaaattgaagaacaatacaaacttacattgtacagaggacatttcatgaatcttctacttgggtttgcatcagtccaagaggtgaaaatcatagctctcttcggggacgacaactatatttcacagtcacgtaagccattttcttcccttcttctcttccttgtccttttattctttctctttttctgatcttcgtctccttctttttatgttcttagttttttttagatgtatgttcttaagtttagggttttgtttatattttaannnntttatttttattttaattactcattttaatttttacacttcaagttttgaaaatatggctgttgcccctgattttgcccaatatacgtggaccaaccaaacagggacacgtggacacgaaggtcttaacactcgaattatcagctaagcctttataaagacttgcgttatccgggagttacctcctggagaaggcatacaaagtcttctatgctcccggaggcctaagtgatatcaaagcacctcagggagatgtcagacttcctctaagcagtcatctcgcatttaataccgcatgggaggaagcgtgttggaactgccacacgc

SEQ ID NO: 133519 - DNA, 780 bp, Cannabis sativa
attgcacaacttacccggtattttcccttacggatcacgggactactgactgtcacaagcattctcctagtaggagtgataattacaactacttagtgaatttttatgtcagacattatttgccgaaatattttttttatagaagtatttgttatagttataatattatttttgtaaaatttttaaaatttttgaataatttatatttatagtatcaattttctgatattttagcttaccatgcttgttcaaaaaatttcaaacttattttcggtaatgtaaactaattaaattttttaaaaaaatttacagggatgatgttgtaactataatgaacatcgttatgaatttttttttaaaaaaataatcctacatatgttttcatctacggaagttgactaaaaagttgaaatatgaggttgatggtacttatttgggggaaaattacagtaaaagtcccaaaaaaatttattttgatgccgataaatctccaacctcgaaaaaaatagcaacaatagtccccaagctcaatataacgtacgtccccacttcaagcctccattgagcccttacacccacggaatcatggctcttatacacgagtgcgccactctggctgctttcatggaatgatgactaaccctacaatccaacacaagcatttttagagtactttgtcctcactcgcacgcttcttggaaaaacttcccaggaggtcacccatcctaaaattacccaaagtcaagcacgcttaaatgtggagttcttttgtgatgggct

SEQ ID NO: 133520 - DNA, 915 bp, Cannabis sativa
ttagccaatgtgtgcatgcatagaattcatttagaagaaaatgcaaaaacctccacctagtgggctcgaaggatggttacctggtcatcatccacctcatggattcacgtctctactgagcgagagcattgcctacaacaatgcgtgtttcttgttggtcatgatgaagctggttggcatgaccctgaatttggcctacaacttatctcagcctagctaactcagaatcatccctagagtccaagcaaggtcagccaatagaaggttggccaactcttggcctagtttttcctacataaacttgcgggcattctcattagtattatgagcaggttgctccacgttgatatgctcttatgtaagagattctatgggtggttccaaccttggagaaatggtaggatcaatagagatcacaagattagctagattgacaatattagccaaattagtaggaccttctgtggttggaggaacacaaacattgggatctaccgccatgggatcctgaggaggattcgtaaaagtagttcttctagttagaaccatggtgcttaattagaatgagatggatgaaaaccaaatagggctctcaatgaaagcaccaaaatattgacttaaaatttagccaactgatagcggagccttattaattgctgactatcaccatatatatataaataaatagtaaaaataaaacacgaatatatataagttcgacccccttgatgaacgagtaatgacctactccccttttagttgtattcaccttgagataatactatacaaattacacgttgaaattttagatttctagctatgactctttttagtattacatttgtgagaataatgtgttacagattgaagaactggtaagatcttataaagaacttatgaagaaaatagacttag

SEQ ID NO: 133521 - DNA, 601 bp, Cannabis sativa
cgaacatctcagaactataggatgtcttgcatttgcttcaactctttctgcccacagaactaagttctcacctcgtgctcgaacatgtgtcttcatgggatatccacacggagtaaaaggatataagttgtttgatatcaatacaaatcaattctttatttctagaaatgtggtatttcatgaaactatttttccttttcacaagctaaatactgacaattctaacttggatcctttttctactgttgtcttacctagtactgtgattaacgatactgatgtttgtgactaccccacagaacaaaacaccaatatttctatgcctccacaggatcactcagagcaggaaacacctgacttgaccaccaatattgcttctgatgcaatacacaacacagacaactcaaacaccactactagacataatacatcaaacaccagacctgcttccagtacacaaacacatgatcctgcttccaatcctacaagaaaatcaacccgagccactaaacctccatcctatctcagagatttcgagtgttattcctcaattcaggataaatcttccactccacacaatctttctaattttatttcatat

SEQ ID NO: 133522 - DNA, 585 bp, Cannabis sativa
cgatgcctcgttggtgacccacgtgtcccaggttgagtcccaggatttccctcgtttccacgagggatttccagttccctactttctggtcgccttctgttctcatttttatgagaaggctctggttgatcatttggttgttcattctcagggggaccctcagtttccccaggttgttcttcttgagcgttctgaggattctcctaagatgtctcatgtctcctggctcgcgagccatgaggtctgcctcgtggtcttctcaccccaagatcaagttgattttgtgtgttgttctcctgtgctgccctggccgcggctgcctctcattccaactcagcattccgtcggtttgcctcctccaagcagcatctgagatggcggttttccaactcaacgattggcacgtatcttgtaggatcataggtgccatcctcatcacacggcctgggttgagcaccaccaacactcatttcgagttcttcattcgatgtttctggattttggccattttttttgttgagtcctccttgaacgtgcgatctgtgtactggggccaccttcaggttgagtcctcctggaacgagt

SEQ ID NO: 133523 - DNA, 848 bp, Cannabis sativa
  modified_base (668)..(669): a, c, t, g, unknown or other
  modified_base (771)..(773): a, c, t, g, unknown or other
tggtaaaatattcccaacaaatgacttcagagccatggtaatgatttactttcatgaaatttgaatttaaaatgatgaattttgtttattgtgtcgatttagatgagttcatgttagtttatgtattatttgattaatgtatgtgatttgggaaaaattttccatcaaaaaaattttattttcgttctacaaataatttatttggatttcttgtaaaaaattaagcaatattggtttttacggaactcgattctaatcaaaattgagaaagttatgtggttttaaaaactgagtgtacatggtgctcaatcgcatgcgccagggttcaaacaaggaagccacacgcgcgcggacaggggacaaatccctgtctgaagcttcgatcaccttgcaacagacgcaacctttggacacaatctgcccactagcatgctgcaagtgccatgaaatctcgcccatgacaccctgctgtcttctccatgcacgtgcgtaggcaacttgcatgatttcagcccaaaatccaattttgggggggtttttcacccaatttttgacttttctaattttcaaaccctaattttaaaataaaatattttttttaatattttaaaacttaaataataattttaaattaataatattgaatttttaatagattattattaatnntgatattttgaggtttaaatttagaaattgattattttcttttatttatggtctaattttaaaatttagttaatttgtttaatatttatatattatttaatnnnaagatcagatattttaatattagctatattttaaattaaaagataacaatatcttttgatttgaaatattatatt

SEQ ID NO: 133524 - DNA, 1104 bp, Cannabis sativa
attattaaaattaagaaatggagaactttattaaataaggaagaaaagaaagggagaaattttctcaccaattttgtaaggaatgtcattaatgacacgtttactaaactgtaattggaatcagaataatcaatgaaagaaatcaatcgggttaaatgaaaaataatcagaaccaatatttgtaatatgttgtttactaaatttttttggaaatagaatagtcgtgatatatcttgtttactttattagaaaatataatcggaatgcttaaattgactaaattgtccttttgaattaaactatattatatgatagttattttgtaagatatattttaaaggacaaaattgttattatatatttaatattaaaaaataaaataaaaataattaaaattcattaccataatacataggatgatcattcatagaacaataattagatgattaataatttcatgtatgaaaataccatacataaaaaagaaaagaaaaaacacatgaaatcagtgtaattattggttttgtactttctacccacttggagacttatgaagaagaatattgatgaagtagctgaaaaacaaagaaataatgagctaggtagctaggtaaagagggtatgtaaaaataaaggaaatgtcatatcatgacttacaactattgtgatcgatatatggtttggctttatgtataccccgaatatatacatatattaatttctgcaaaaagattcagtactaataagaaaggtataatatttatagtatcagaaatcatcagagactcacttttactataaactcaaagattgatctcaaaagagatcagagagagtgaaagatgaaacaataatattggtcaaagttgatcagtactactggttttgatcatataaggtagatttatattggatattattacatgatgatcagacaaaggaaatatcatgcatattatatttattatagaatatatataagctagctattgctttattaactttagtgggtactaattaatatgaacataattccttcatttcctcttcttgccggttaatatgtatatatattataaatataaatatgtaatgtaatgtaag

SEQ ID NO: 133525 - DNA, 710 bp, Cannabis sativa
cttctttgtactttgtagctatttttttttttttataaaaaaaaaaattgaaagtgtacattaaactagataactgggtctcacaataggggatccctctctatcaaagacaccatcaaaatggccctttgacctagccttcttagctatattatccgcaccacaattgtttacgcgaggaatataaaggagattacaaacatcaaaattcaaaaataaattcaaaaccttcttagccaaaaggtctaacttcccaatacgggggaaagctcctttcttccagcgcacgcaccaccatttaagcatcggagaatatggcaatagaagagttaccaacctccttccccatctgcagcgcccaaaaaattgctaacaactcaacttccactgccaaattggccctctagcttctcacaaactaggaccagcaatccaaattgcgatcaaacaatccacctgcaccaccatccttccacgatgtattagtaaagaagactacgttagaatttgagataagatgaatgaggttccatctcaaaaccaattggcactgggaggagtagccttttcatcttatatatggtaatttatttccacacattagcaatgcgtgactaactataatacaccctcctcacgtttggacctggaaagtgtgggtataacgaacgacctttaagagaccacaggaccgaacgtgacatttgaaa

SEQ ID NO: 133526 - DNA, 1458 bp, Cannabis sativa
actccaacaaattccacctctttatctcagcctcatgtactagaagttgtccttacactattagtattttcatgtccttattaccaaaatttttaataagcatcaaggttaatttgacactcgatggttatttgaaggaaacatgcaaatgcaataatgaaaccaaaatgtaatttatctcttgatttaagattctttgtcttgtcctgtcctgtctttatcattttttttttttgtgggctaagtaagtaatggaatcattcctaccaacagtagtaagtgttcgtgtgaatacaatgaaaaaacgtagccttgtattttcttgtctaatttagaaattaacagataattagagattattatgaaacttgcataatatttatgatttatcattttatagagatttatttgaattcagaatgcattatatatgccatatataaaattttatgtttttgcatattttgtgcccggcaacattggaatgcggcgtttggccattagaatcacattttaattttttagtggtagtggggcaatatagttagacattgagaatgtcgagaattatttgaggtagtaaatatccaaaatacccctaggtgacttagagactttttagcataaatgagggtagaatggtcttttgaccattaaattccttgtcctttagtggactttagttggatattatattctaactttatcctttaattaattagataaacattggctttattttattttaaccaaaattaaaaaaaagctatgaaattcaacttctcacttcattgtctctctctctttctctcgaacccttagaggatcagcaacatttggggattattcagctacaattcagtagagtatagcaagctttttgtgattcaactctaagtaagatactctagcctttcttttagtaatttcttaagctttaagtttgagattgcatgatttgtaaggtagggttctgtagcttatagggttgtataattttatgttctggggttagattaaggttgtttatgttgatttgagctggttttagggttgtttgtgttgtttgagcaaggtttgaatttatgaactcaaactttgctctccaatggtgattcttgattctgtgtatgttgtggtgttttattgtcttggatatgttcattgtggtctaaataacatgtttggaaggtttggttaagtttggggttgaattaagagagtagtgaaattttggaattttcctgcactaaactggttgaccgattcacggggacctgtaagaaccgaaattctggctggtccccaggaaaccccacagaaccgaaattccggttggggaaccggtctactggttgggacaattttggaaaccttagttttttctgtttttgcgatatttaggatattgccatgttattcctcgataaggaaacttctagtttcaagtttaagtcc

SEQ ID NO: 133527 - DNA, 927 bp, Cannabis sativa
gcctgagtggagatggattacgagctgcaataacctcatacaggtctgctatgaaacataaacattcattttgttctatcattctctgcagttcttttatattctaattaacattctctataggtatgcttttatttttttgttgatatattttgcttatttttaggagctttctcaaatttgtaatttttgaaataattgtgcaattaatatattcaaaattctataatatttaacaatccttattttaaactaaaaaaaaatccccatttttttgacattttttttgttatttatataataaaaaagttatatacacctaacaaatctttaacttaatcgtatatactctaatttttttaaaaaaattttgtattatttatataatatagaaaccataaacagctaaccattatattttttttttcattaaaactgaaaaataaacccaataatgaaaacaaaaaaaaatctatctcttttttagtatcaactaaattatagcataccacacttatggtttatcaggcattgtttcacaactcattcgattggtagtgaacaattctccattgggtgttatatatcaggtatatatctcctctatttattagaattatatttatttaaatgtcttttttataaaagtattatatatcctcaatatataacaaattctttaagaaattttatataagaaaagagtgaatcaaatccaaaacattagatagtattgagattaatacattgaattcatctattttcttttatttctccattttatctatttctatgtaggattaagaatgaaattcaagcgaaatagatgaatagtttatttatgtgtatagggttatttatgttgggttttgggccctaaataaaatccatttcaatataatcaaatttactaattaataaagttca

SEQ ID NO: 133528 - DNA, 682 bp, Cannabis sativa
tttttttgtatttttataacatatcttcaatacttgttatattctgaatatgtgtatgaatttatattgaaccaagtaattaaaatgttattgatatttgtagttgtcaaaatattgtttaacgatcctcactccaatcctttcttactcaacgtatttgcaaataaactcgaaagtgtgaagatgactcttggtcagagtatcacttctcacttacttatgatgaacttaaaatgagctacgatgatgacaatgagtgagatacaataataacaactttgaatgattgagatacaaaaataatgcattttgggagaacattctaatttttttccacactactctatttatttatttttaattagagaaatgctaatagacatttgttattgatgtaatttaatatcaagtcctacactttttgatttaataaataatataggaactgctaaacactcacaataccacacatcagtatagtgttggacaccttaaggtgtctaatagtaatgctcttatttttataataacacttttttttttttaaaaaaaaaaaacaaagaaatgtcaaattctctctatatttatagattaatagtataaattgttagacttttatttgggcttacattaaattttattggttttattaaaacttgggttgattggatagttctttgct

SEQ ID NO: 133529 - DNA, 718 bp, Cannabis sativa
cacacgcccattgctctattctcacttgagatttgccaactctggttctcactttgtaatcttaagagaaccacttcagatcccattactatagtgatctaagtggtattatctctggtatcaatacaactaaaaggggagtaagtcataacccgctaactaagggggacgaacctctataaaatcatgtgtacttttctattctaattgtgtaacacgtggcaattattagtattaaattcgactatgctgtcagttggccaaatctaaggtcaacaacaatgatgagaacaatttggaatgatcgggatatattaaagaatgttatatgaaccatgtcgaacttcatttataaaaaagagattgtgtaactacatgttagaccgactcgtttgtacacctaatttctaatattattcaaagaaaaattatatgaaaattatttaggttatttttttttaagagaattgctaaaagtcaccactgttgtaattcagtatcagtcccctaaccaatttggggcacctggacactaatgcacacagtaatgatatattttttttattattattattttttttttatgtttaaaatattgacagttttatgtaaaaaaaatattgaaataggtggatttataatttttggagtccaaaaataaaattttcctttattttggtaggaactcaaaatggtttattttttatttatttttttt

SEQ ID NO: 133530 - DNA, 842 bp, Cannabis sativa
tgggccttggattagataatgagttaatttggaatggttctctaccttccttttaggtgtgttgtaacacatgtttctttccaaaaaaaaaagaaaaaaacaataagtaggtgagaactttaattaaagctttgtaaataatttgatctgatattcaaaaacaaaaaaaaaaaaaaagttattcatgttttagctatgaatatacaagagcgtctttataaaagaaattgagatttgattacaaaacatccaccgacccaccaaaaccaaattttattcgcttccaacttctatacatgtgacatccacgatgcaaaaatttggagatcttataaaagttacactttaattaatttagttgttagtcacaaataaattataaaaattaatttgtattatatataaatatgttatattccatttaaaaagaagttgttgataattctaggcataattttaaggagaactagtcattcatcaaagtttggctacaagtacttcagtttaatcaattactttaattatgctaacatttcttagactttgactttattatattgtagtaactgtatttacctaattttacttgtatacaattctattgcgttttaatgacagagaaagagtttaggatgtaggcttataattaatacactactagaaaatttggctttctcttcagtaattacgttgctttatcttcaactaggtaactaagttgcgctttgtcttgtaatttttttttttttttttgtggttgcaaaatatttgtagtaaataagttgtataatatacaatttatattattttctcaaaatcatgcatttctgtaaaaataaaat

SEQ ID NO: 133531 - DNA, 886 bp, Cannabis sativa
agaacttgagattaacgaaccttttctttgcaaacgacctcattattttttgtaagcgaaatgtgaattctgtggagttaattaatgaagcttttcaagaatccagccaagcgactagtttagcagctaataaaaagaaatcccatatctatatttggggggggtcaaggaggagatcaaaaatgaaatcttgggaataactcaaatggaagaggggtctttcccgattaagtatttgggtgtgaaccttagacctacaaagtggagagccgaggattgtggtgttattttggataagcttagcttgaaattaaatgggtgggctagtaggaatttatgctttgctggacgtgctcaattaatacattcggttatgcttgggatccggaacttttggatgagcctctttattttacctcaaaaaattgtggcagctgtgcatagaaaatgtcgtgactttcgctgggtgtgaatggtaataggagtaagctgcatatgccgtcttgggaaaaagtttgtctccctaaacagttcagtggtattggtttcagggaaggtaagaaatggaacatggcgatggttgccaaacatttgtgggcgatttcaagcaagcaggataatctttgggtgaaatggatcaactccatttacttaaagaagcaggatgtgtggtcttgcccaataaaacctgatcagagttagtacttcaagaagttgttgaagattaggaatgtgacgaatgtaaacatgttgaaccaggcggccaaaggtaataaattcaaagtgaacaggttttataatgagttgattggagctgttagaaccccctatactgctactgtttggcataaatatattgttcctaaacacaggttcatgttttggc

SEQ ID NO: 133532 - DNA, 618 bp, Cannabis sativa
tgtggtctcttaaaggtcgttcggaacctcattcattttattccaaaattctaacagagactgtttgatttttttagcttgtcgacccacgagtttggccaagatcaatgcaccctgttgttagggaaagctttcagctttaccccgatgtttgtgaggtcttagttgttttacttgataaattctttgacatggagtacccagattgtgttaatggatttcaacaacatgttttctattgaatttagaaatggagcagatgtgagatgttacttttcttggtctttggtcaacaattttaagtggaaatatagatatacagtaaggtttcgacttcaccatgttaattatgctatgatgaagagaagtaaataattattagtaacttgatacaagaaattcattgaaaagaaaggggaaaattacacttattatgagattttaaaaattcttatgttaaatatgatacttttaagtttgaccaatttatatggtattttttttttgtttttaggtctttttaggagacatctctatttttcccccagggaatccttagaattaccactgcttagctttcaattcgcctctgaccatcaaatgaaatgtaaataaccc

SEQ ID NO: 133533 - DNA, 1187 bp, Cannabis sativa
acaaattacaattatgttttaatggatatgtaaagtaagtaaaaaaatatatttgatattaatagttatttactattttattgaaaatatacaaaaatttattacttttttattgtttaaataacaataataaaataaataaaaaatgtaaagtttcgtaaaactcatgaaatatataattaacgttataataataaataaaaataataatatttcctgtgaattaaatttaatataatattatatatcgtaccgaattttgcacaatattatattttgtgttaaatttagtagaacttttactgtgtattaaatttagtacacgttttaaaatattattaaagtgatattttttttttcttttaagtgtgttaaaatgaattaatatattatttttttaatactcaattaaagatgttcttcgtagatgaagacggtagttaagaaagaaggaagtgtgaaaaacttattatagaccattattaatggagataattactttttcttttttaaagaatgtccttgataaacttatatggttttcacaaaatctattaatacatgaaacataaatatagaataatttattttttttaatggaattcttcacttctaagacaacgaaaatggaataggctattgaaggtagatgggttggtgagggagagaagatgtgacatatatatgtttgggggttaggaaaaggtttcacattcacaagttaaagatgggtataaactaagtcaatgaattgttgaaatttgttattatattattaaagagtaatgaaagcataaaaatggtaaaaaaaaaattaatttttttatggaaaattttttatgtttatgttttgaatttttttatgtacaaaaatacatttttaataaaaataataaaattgttttttttagttgtttttagttgctttatagtttaggaatattaacggtaaaactatttgaactttttattttttaacacttaactacaaaaatcgaaattttgacggtaaaacctacccaggcctgttttgctcattacacttccatctaaaaattttatttaaataccacagagaactcctcacgtgtacacaaatgtacacgtggcaaattttaagtagtccacgtaatattaattgttaaattattatgaaaaataatttaaaaaatataaaaaataaataa

SEQ ID NO: 133534 - DNA, 502 bp, Cannabis sativa
gaagaataagtggttgaaataaagtgacaaaaatctaactagaaagtatatacctatgtatgcaagctcaaatgcgattaacacaaaattattccgaacctacaatataaagaaatatgtgttcttgtaacagcaatcctatatgattgtcccatataagagactacaaattcaatgtgttcttgccacccctaattcaataagcacactttatctgcttcaacaaaatgagaacaatattaattttaaaaaacaaaagagaaagccatatctcaaaataaatagataattaataattaaatagctttgcaaaacaataaatttactacaaaaattagttaaattcatattgaagaataacaactagtatacttatgcagccaaaactcacacgacaaaattacataatcgaaatgacttggagcttgtttggctgtgttttcagttttcagtttttaaaattgtgtttttaaaagtgagaatagaaaacagttttttgtca

SEQ ID NO: 133535 - DNA, 837 bp, Cannabis sativa
tataatatatagtatataaattacaacaaataaatatattacataagcttttatttaaaacaaataaaataattaaattaaaaaaaccccaaatcgttttgtttttctcattcccggagccaccacgaccacaaccacaaccacatcaccatcaccgtcgctcgaccacaaccaccaccgcgagagccatccctgaaacccagaacacaaaaagaccacgaccaccatcaccgtcgctcgaccacaactagaccgcaaccccatcaccgccactcgaccaataccaaaccacgaccaccatcactgtcgctcacctcgaccaccaaaacaaacattccaaccaaaaaaacccaatgaaagcttcatcgtaatctacagagaagagagagatacgtgcctgttatcgagagagagagagagagagaatgttacccagagagagagagccatacctgttatcaagagagatagagagcgaagccaacgaaggagatggatggccggaggagcgtcgccgcatgaagaagagaagggagagagagatcgggttaggcataagaaaaagagagagggtttgaaatgtagggtttggaataatatgtatattatagggttttctttgggctttctttttcctattcatcttaatagtctcagtctataaccgagaccaaagaatctttttagtgtcggttataaatcgagacttatacttattctatatgtatattttttttaaaaaaaaaaaattggtctcagttatacttttagtgtcggtctcggtctattaaccgacactaaaagtcattataggtgtcagttataaactgagaccaa

SEQ ID NO: 133536 - DNA, 639 bp, Cannabis sativa
ttttttattaaattaatggaaataaaataaaaaaaaaaaagtattttttaatttatcctttaaaaaatataggtggaaggcccatgaccaaatagggcaccttgcaagacgatccatttaagacttaattatttactcattcttctaaagaaaatatgtaattaaatagtcttagaaattatttttattcaaaaattgtgaatagtataatatgtattattcaaaattgtgaacatatgttggagaaccatataaaattatcattattaaattaaattgttaggtcaaagtgccctgctcacgcatgtttcactataagggatcttctatgctgcacttgaatcgatgcatcctatttccacataacaaaaaaatcagtctaatttttttcataatcatatatgttataattattaaagatacactgtaaaattataatttctttttaaataatttacaacaaaaaatattattcaaataacttatttcacacgcttataaaataaaataaaatatgtgtatgcaactgtttaaatttcgcttttgacatattaaattttctgagaaattgtatacaattatttatatacagtagaacctctatttaagaatactttattcaagaataacctctaattt

SEQ ID NO: 133537 - DNA, 639 bp, Cannabis sativa
aaaaagttaaaataaaaaaactatgtttattgttcttgctccaattataaaaatttattttataaaataataaaagagtaataaaattttttaataaaatactattataaatattgacaaaaaaataggaagcttcaagagagcatctttattctattatagaaaggtattttttgtatggacggaactctttttttaagtcgaactttttattatagctaaagagcgtgttcagagagcatggttgaaaatgctcgtaaaaaatataatgaacgactaaagattgctttagtgagttccattttggtgaacttggtagattgcactcgacaagggtgtgagcaggacaaccatacatattttgcacataggcatgttgttagaagaacctttatttgtcattatttaaaaaaaaaaaaaagtctaccaattttcgttgttagagtacgtagcccgcagagtccttctacaggtgttattaacgagatttgtaggtgtttcgaattgattacaatattagaatatttctatttaacatagttaaatgttgctatactttgtcgtcattaacatataaaaataactttatattgcaaagtattacaagatcgaaggtttttatgccagcccattggataa

SEQ ID NO: 133538 - DNA, 561 bp, Cannabis sativa
  modified_base (532)..(536): a, c, t, g, unknown or other
gatgattgaatgtgatttacgaaatttttccatgaaaataattttatttttattttgaaaatattttatttggatttcttgtgaaaatttaagcaattaaggtttttacagaactcgattccgataaaaattgaaagagctatgaattttggaagtttcggatgccatgggtgtcgagtaggtgctcaggcgcaccaggtattcggacaaggagccctttgcgagtgcagattcaaacaaaatcttgtctaagcgcatgctgatgcttctcgtgtgcaccctacagcttgccgagggagatgctgcatccgcccacatttgccgcccatctcaccctccaactccctctcttgggtgcgtggaagggctgcttgcagccttcctgggctgcacgtgcaaccctcctggccatccagccaccaaaccctatttttgtgggattttttcattttttctgaattttctcaatttcaaactccaaaaatcaaaataaaatattacttttattatatttaaacttaaatatcaattnnnnnttaataatatttaatttttaataga

SEQ ID NO: 133539 - DNA, 1022 bp, Cannabis sativa
ttttttttttttttttgtatatctccctctttgctatacttttttaaccgcaaagatagtttaaactttaccctggccacgaggggcttttagtagtgtaatagggtcttccttttttgctgttcctttcttggagacttgttgtgataggcttcttaggggctagttgtgtttactgaagcacttggttccaacagccagtgtttcaatctttttccctttattcttgattgcctcctggttgattcaagaattgctttttactttgactctttctttcttggggccgcgatacttttcggcttgattcccgaattactgtatttttgaaaaaatagttagattttctatttttatttatttttccacctgaagataaaaaggtaaattttaaacaaagaaaaaatgccctatttttttttttaaaagttaaaaaaatcttataagtaaaaaaagaaaaatattatttttatttagttttaattttaaaataattcatatatataaaaaagagatatgaggcggtgactgatacactaagaattctccaattaacattattagttctccacttaattctctcatttttataattttttattaattttataaataataactccaaaactcatatttaaaaaaatatgtaattactattattgaatatttaaaaaaaatatataaaaatcacctaaaatctatatcacgtttctttctttctttcttttttttcaaaaaagaaaaacaatcaaatttaaaattggtatcaatattatgtgataatatatatatatatatatatatatatactttttaaaaaaaaaataattaaaactttgttactttttttttttctatcacttatatatatcgtgctttttttttaaaaaaaagaaaatgtagtttttgaaagattatcacccaaaaataaatagggaaattctacaatgcaccctcttaaaatgaatatattgatgcactcttatttgttttagcacccgaaataatttttagtcaaattt

SEQ ID NO: 133540 - DNA, 867 bp, Cannabis sativa
tattgtatattatgtattgtaacatttatttaatctattttattgatccttgtattatattgcaataaagttgtaatatcttgattttcttccatgataataaaatctctaacaaattttagttacaatttaagttgttctgttagtttttacgagagtttttatgtaaaattttataaaaatataaaaaatactactcacttccaaaagtagttgtaacactcataattatcatttggaaggatagacttctatccatagatttatttagaaaattcgctttgttatataatgttaagtacttaggataagatttttatagagttaattgggagtaacaatgatattgccaactctcttagttttattgttttagattgggaaatttatatagtatattaacttttattattttttttataaaagtactgttaggtggtatttttactattgtactgtatttttttataagtttcatattgcagtatactgtgttaagtttttattggtgttctactggtgtttttttattgttctactgttgttttgagttgttctgttttgtatttttctagtgttttataaaaacacagtatttttgaaaacttttctgtatgacagtatttttgtaaaagttaacccaaattctagtatttttgtaagtttccctttagattagggacggccctaggctaaggtgggttaggctgtgcctaaggcccacttctattataggtctaaattaaaaaaaaaaaaaaaaacttttaataatttttcaaaatgttatttttttttttttgagcaaaagatgatttattcattcataaacattcaacatcaacaatagacttgagttcaagaggagca

SEQ ID NO: 133541 - DNA, 548 bp, Cannabis sativa
aggatactcggctctcaccccgagaagacccggttcaagtcccggcaacggaatttttttccttttattaatataataaatacacagcacaaccgaaattgggcctaacgcaaatgggccttaccttattgggctgaaaggtttgtcagttggtagctttgagcccaagctgaataggttcttcatattcataaccaatcccctttacctatatttttgaataaataaatattattttataccttaggtttgcaaaaattattgattaagagtttgtttggtcgtgtattcagttttcaagttttaaaattgtgttttcaaaagtgaaaatagaatacagttttttgtcattttaaaaatttgaaggtgcttggcacaaatttttagattttttcttactaaaaaaataattaatattttaacaccatactatgacatgaatctatccgagttcaggttcgagtttggttttgggtataggatccgacttagagtatgtgagcaaaaatataaaataaaatatgttacataattttttttttttttga

SEQ ID NO: 133542 - DNA, 1011 bp, Cannabis sativa
  modified_base (746)..(751): a, c, t, g, unknown or other
  modified_base (958)..(971): a, c, t, g, unknown or other
agccagggtaattatttactttcatgaatatggatttaaaacgatgaatattatttgtgtgttgatttggatgtgtttatgttggtttatgtgactatttgataaatgtatggtaattacgaaatttgtccatgaaaataattttatttttattctgaaaatattttatttagatttcttgtgaaaaattaagcaactttggttttaacggaactcgattttgataaaaattgacaaagttatgaaattttgaaaagtcgggaaaggaggtgtcagttgtgggcgagatgcctctgtcgagcttcattctgcgcgtggaggtgtgcccaggagccgagttttctcggtacaagctcctgagacgtgcgcgcatgggttaggctgcaacttcccctatttttccctgtttcctctgaccgactgtgtgaatctcggaccgtgcaacccattacgtgcgaaaatagggcagtccaatttttcaatgcatattttgatcaaaaattcatttttgggcaaaataaaagccaaaatttattagatttttatgtagatttcaaattttcaatttgaaaaactaaaatatctgaataaaaaaataatttttatttattttaaataataaaagttgttttttttagatatttagagtttactaatttgaaaaattaattttgtcacatatattttaaattatggttagattttaaaaaatttgttaatttcattaatatttatatattatttannnnnnagattagatattttaatattgggcatattttaaattaaatgataactttatcttttaatttaaaatattatattaaaattatctaataagatgaattaaataattaataaatttgaaatagatatttttacagatattctaaccataatattttcaaaaaaaatagttattttgttaaatatttaattgtttattaattataagttnnnnnnnnnnnnnnttatatcattttacttatcagaaatttataaatagtattt

SEQ ID NO: 133543 - DNA, 1319 bp, Cannabis sativa
  modified_base (1269)..(1288): a, c, t, g, unknown or other
agtatacgtgcctcgcacgtagctttttcctagtatatatataagaaaaatatttaatttaaactcaaacttcttttatcattttttactgaaaatttatttttattattttttttttcagttgatggaacaaccttaacccatataatgtaaaaatgagaaatttttctaattaaatagaaatattaattataaaaactcaaaattttctaatattacccattcatgggtaatactgcatgattagattatggattagtaaaggcaactagtggtgtaatgaccgcatgattagattatagattgctaaggcaattaggattaattcctgatatttaacaactatgcatgattaattttattgtgagtcaaatttttagcaatggtcattagagttataaattctcgattatgaagattttattaaactctacatgtattatttatgtcatatgcaaaatttataatttttatgattttttttgttcgacaatggaaaatacaatagatgaccaatttaattagaagagttagcttagaacctttttatttaatgggagtatcaataagttgatatttaaaatattagagtaagcagggttatggttttggactattttactcctaggcctctaggtggtttatgtgtgaagccaagagtaaatttagaattttgttatttgaagtaattgtgattttggtagattattccacaagtgaaagctagtcactatttgtttttcctcagttgttttctgagttagttttgagttgtatgatgcttattggttgtgttttaaggtttggttatatattatttaataatataatatgcagattaaaatgtgataatatattattatgaggatactatatattaagtgtttggtaaataaattgtgcaatatatgatttatttaacctataaattgtaacctacgtctttgcatgtagaggagttacaaggttaattacttttataacttcttttggttaatcacattttagtgtaataaaagagatgttatacacaattgatgatatgattcaaagttatgaaatatagttgttacaaactatattaatactcatttatatgagagaaatgaggtgttgtgtatttaaattctaagtgtgatcacctacacattataaaagaaggtctttggtgctcatttgaaaagaaccaagtttctatcaacaaagcacttgttggattgtattttaccagatctagatttacaaccatgtatgttatttaacatcctnnnnnnnnnnnnnnnnnnnnatgtaatttaaacacataaaaggtatgagaa

SEQ ID NO: 133544 - DNA, 614 bp, Cannabis sativa
ccaaaattttactggtcaagccattaagtttccttctttcttgagtctcaatgataactttactggaccctatgctcctcaaccatctaatgcggttgtcatgatgcctacacccttaaatcccaacctctcaaatgttgcacatccttataacagttccacctttgatatctctttaagaccttcagctttcacttcttattctattgactctgtcattgtggcttctagccaatctgtccctggtcctgctctgtctattggtctttcttccccagaggttgctagtcatgttagctcagcagctgctttgtctcatgccactgctgacaatgctaacatggaccccaacctccatcgggaacaacctgattctgatgtacatggaaaaggcctagcatctgcttctggtgttaagaggccctcaatccaaccttactttgctgttgttggaagttctgtgcggtctcagcttaaacctgctcgatcaggtgcgagggagaatgaggcttctgtggatcctactcaagatgaacaggcgggtgatgctacgcacaccctcctagaaaaatgagccttttaagctggaatgatggtgaaagagcagcagcctg

SEQ ID NO: 133545 - DNA, 780 bp, Cannabis sativa
gccttacggtagaaataccctataattataatgatataagttactttacatttatttatataataaatcaaatgattagattaaaaagacccataaaatttcctctataaaaagggacaaaatgagaacgccggtacgacttgatagttgatgtgaatttggtatattaattaataattattaagaaaaaagaaagagaatattatgtgttagagaccacgctaataaagataataaaatgaatatttaattaagcatatataatttactaataattaacaaatgattatagtactagcttgctggtgacaaaaaattgaccaattatttatcatcatatataaggtcttgtgattagttgatgttattattttaaattataaaagagatgatactcaattatactaataacattagaaataacattttttaacaattctcaatatttatatgttagcctttcaaatgagacaaatgtgcatattttgaaaggcaaaattaaaatatatatatataaatgatacttattgatgtttaattagctgtacactaaaaattatattagtttcttaataaattatatgtcttattactttgatcatcatcatatatcatttctctctgtctaagtatatattagatctttactatttaaaccctagcttaagttaattagtttagctagcaacgaagatctttgctgtggttcttcatcttctaattcaagtctatctagctaatattaattactttaaacccttcaactctctctctctctct

SEQ ID NO: 133546 - DNA, 1077 bp, Cannabis sativa
  modified_base (504)..(516): a, c, t, g, unknown or other
tagcatttctttcaacctctatgcacgttctcatcatcatcctcctctatgctcgttctcatcatcatcctcctgctcatcttcatttgtagaaaaaaacccatccaatcccaagaaccacaccccaccaaggtaatagccacttcattaccgttgacgaagattgactcaaccaccgatggcttcagccgcagaagaatcatcagggagggtcgcttgggaacttagatgactcagcacttgttgactaagattgactcaacacctggggatagaattgtggtttctgagtttgtcggctccgcaagcttggaattctatctgcaccgaaacccagatggggtttcgctcttggactggagtcgacgtctcaagatagccgccggtgcggctaagggcctcgagtacttgcacgaaggtgtggcaatgagagagagaacaagaagagtagaaagaatttgttagggaattagcagagaaaaaaatagaagaagaagaagaagnnnnnnnnnnnnnaggaggaggaggaggaggagaggacgtgggaattaatgttctttttttattttttttattttaattttttttaatatttaaagaatttttttttatttttaaaataactaattttttaaaaatatttatttacgtggaccaataaaattgtgttacttgtacactgtgtatacgtagacattccaccatggctaaaaacaactaaaaatggatggaaatgttaaactgctaacagaacacaagtttatgggattttaccaccaaaattttagaattgggatttagttgcaaaaacctgaccacttaagggtgtgatgccgcaaataactctaataaataatatccaaataaaaagttattgttctttgtcaaataaaaatatgcataataaatagatgaaaagttttgcactagaaaatatgaatgatctcgattaccgttaaatctcatccaaatttaatctcaacctaagggcaagttgtcatctggttgataggagacaacaacctgatagagaaacttgttggatacatattgttgcccctgatttttcccaatata

SEQ ID NO: 133547 - DNA, 507 bp, Cannabis sativa
tttctatttctgtaccataccatttttgctaatgaaaaacttccatagagaattccacacacaagccatagcaaccctgggacatatccataaacccctgtaaatatagttgactgtataaaacagaacccaagtcaggtttatgtacactttataatcttacgtgtatatatttatgttgtacaggcagagggagagagtattagtgtattacactccaataatgcttgttggtaatgtcgtatcctcttctgtattttttaaaatgatctagtggatccaccctcactgtatcatctggctgatccatgggatcagatacattacttctctgatcaatcaaactacttcctaaagtgatttcaaatttaaagaaagtcagtgaatgtttcaagttttaactgttatgtatcaagtatattctttatatctatttttccaaatataaaatgaacatagtttagtatatgttaacaagagattaaagcatgaaaaaacttgttttct

SEQ ID NO: 133548 - DNA, 978 bp, Cannabis sativa
agcctcctggatcatatagtatcatgtttaaacaaaaagtagccttgatgacgtggatattaatgtttgacatgtttgacatataaataaagcccatcaatgggcccaaaatgacaaggattgggctaagcctaatttttttaccttccaagaaggcaatcgtgttacttgtccaagtgagtctctaccaagcataacttgcatccagaggacttctagcttcgcatagccggaaggggtgaccaacttgttcctagaagtaaattatagtttccctttttccaatccatgcataatcaggaaattactttccataaatctcagacagagaataatatcaagcttaaaagggaaaccacataattaaagaacaaataattaatacatattttattacccacaatcaaaagacacggtatgaataactatcatcgtgatcaacctgtgaagtcagcatacagtcgttgtccaatgggttaggcttcttacgataagtccaacgtaccatattatatgtaaataccgcattagagggaaaaggataattaggtataacctctagtactctataaatatacaacaaatccttcttgcaaagggttgaaaattcttaactctcaagtttgagaagaaagtagagaaaatatactcattgtaatcgttttggattttcttgtccaacatataataaaactgactcgtggactaaggctctttaatgccccaataacataaaaatcctgagtgttctctgcttgtttatttcttttgaccgtttttccttagttcttatattaaataatttgttttctaaaaatctcgataaacattaccaaatacccttaggccttcttgaccatgactcctaggtgggtgttacacatgtgagaactctccacttatctaaagattcgtggggcggcaatttttaactcattaaagaaataatcaaagttatctcaagaccaacacataagc

SEQ ID NO: 133549 - DNA, 535 bp, Cannabis sativa
agcaagaatttccagagcaaatcttgtttgaggacgagaatgatgaggagactgtagtttttgtttctgatgaatggaaacctacgacttatgcacactacaaaggaataggtcatgagaccaaggactgcaggaacaaggaggggaagaaggctgaatgggtagtcaaaaagcctactgctaatgcccgagttcaaatgccagaggaaggggaagatgaaaatggttttataccagcaaagaaagtgtggaaagaaaagaacaagactctacctactgatgttccagttattaattctttttcgcctttgcaggagtctattgaggctgtttcagaacatctgaatgcacaagaaacaggtgcaatcagccaatacttcaatacagcagcgggaaagtgggaaaaaagacactattaacgttggggatacaggaggagagggcgtacctcctcttcccaatggatagaatagttagttggaatgttcgaggagtcaacaaccagcacaaacaacaattggtgaaacaattttta

SEQ ID NO: 133550 - DNA, 964 bp, Cannabis sativa
aactttaatatatatcaaattgtggcccttaaattttcatccgattcagattttctttagtaaaattagacaaaagttcttaaatccaacaatcttaatagttctggagaattttaacgacctgaaaagtttagagagcataatttagtacatatctaaatttaaaagtaaaagtctaaattagcctaaattataatttgactaaagaacaaattaaaatattcagtaaattgtgaatggaatttaaaatataatattctttaattattttcaataactctttaattttttaaattatataagatatatataaaatagaataacaacataattgataatacaacaagatatttatatatttatagtaattaaataaatattcactttttcttattttatgtttaaaaaaatagattaaaaataattttttttagtgagtcgaatattaataatgacatacttttggttggaggttattccttcacctatatactgtgttatgtatttttctcaaaaaataatgacatacttttaaataatgtaaaatgtacttttataatcattataaataatatatttacaactttaaatattatttaactaattcaatatatttttcttataaattaattttatacctcgcacggttattataataattgaaagataaaatttaatttacaattattttaataatgaataattttgaaaaatttacacagtacactaaaaaatagatttttttttcttttatatttttacaattttttttcttttatttacatttttaaaggctctgttttttataggttttcaattgtctttttgtttttcaaaaaaaatattgctttcctatagtggcgatatgaaaataatgttgttctgaaagtacggaaaaattacactccatattgttgtaaaaaaatcacaatgtttatttgtagcagcaacgtcaaaataatat

SEQ ID NO: 133551 - DNA, 1332 bp, Cannabis sativa
tcattgtcgttggctaaaagcgaagtcaacgcgtataatagagttttaaattgtaattttaaaaataaataaatagtgatgtcagaaaaaattaaagtattatcatattatttaagtaaacactctttctcataaggtattttttttaatatatattttgattatttaaagttatagttatcattgtatctcccgttattatcacctcatccaggaccggtcctggccccacctagctgcagcgccagaaatattttgtcatcttttaaaagtacatatttttttttactaattttgaaaaatataacattttactctaaataagagcctaaaatattttttctcctttcacccactaaatttcagaactaaccttgacctcatctcaccctttgccatcaccatatctcaccggttgtcatcacaatatctcatctgttgtcatcaccgtatctcttatagtcaccactattgtccttcacatatctcaataataatctcagaattcattcagaattacaaatatttttattaacacatttttaagatttgaaaacgactataatagtccctaaatcatacatcatcaaaattataaattcaaacttatcactgaaaaatatttgcacaaaaaaaataaagaaacacatattaacaaatttaataaatcaaatacatatatattcaaatttaatatgctatcctttgtttatgctataagataatatagcatataaatttagttttaatattatttttaatatgttattctgtgtttataaatttaataaattaaatacatatatgtatttaagaaatacatatatgctattatttcttaagtacaatctttaccaagtaaaatacatatatattgtaactaaatacattcatgaaaaaaaattatacactgatattaagattaagagattgtcttttccaatttactctattaaaataaattatatagcaaacatgagtatataattatataattctattcatgatcatataaatgaatatttttaataaaaaataattatataataaatataaaagactataaatacctaacttatacaaattggatgaaaaagaacttataattgatgatggtgaattcaatcaaaacaaggcttagttttaattaaatgatagatttcttcttcttaaaaagtagaagtaattatcaatggtttcaaacttagagaaaaaaaatagaataagtagggaatatgagatatttaaaagtgtataagatgttagaatttggggataagatgaatgaggttctatctcaaaaccaattggcaatggaaggagtagcttatt

SEQ ID NO: 133552 - DNA, 2222 bp, Cannabis sativa
  modified_base (2129)..(2132): a, c, t, g, unknown or other
cctttacctacacatgaaagtagcattgtgagtcgacatactcagtaagaaaagtatataacatatgacataatatcgacttgtatccaggcatccatacacctatttacaaggcttaacaaatgaataaaagcgttccatactagggtatgaccactgtaccacatacactacgtaccttgttgcacgagtattgatagcatttgtttcgtacattgagtaccactaagtgatataccacacacactctgtactttcccatacttatgctggtaacaccgtaatgtactctttaaacaatatacactatatcaatacactttgtaccatttccatacaagtgttggtagtgtaccaaccataacaagcatgcatatataattcacacatagatatattcgcatatatatcacatattatctgctgttcttacctcttttccgaattcaagtgagttggccgacctgaacgaaaagtctcgtgctggatggatgccctaatcacataacataactgggtaaatcacacatcaaaaccctaatctgggaaacccgaacctacaacttaaggttctgctattacctagtgaaaccacaatatcctaggaaaaaagaaatcacccaaccaagcactgaaatgacacgaatcgaggaaatgagttgttcgggtaatttgccaaaactgggttaaccggttttacaggtcttggcaaaccggacctgtaaaaccgattaaccagtttgtaccaggtttccccaaacatttcacaacctgctcaaaatatgtccaattgccaccaaactttcctaaacacctataatgagcttacacaatcatttccaatcaacaaaacctagaaaaacacacaaactcaaaatatgccatggatgaaccaagcttgagttattaaactcaaacttgttcatccatgctaccaaacctccaaacagtaacaaaacaaccaaaccaactcaaattaagcttaaaattcaaaccaaacataaaccaaaccctaacatcacctaaatcttctatatgcataactaaccaaaaataaagcttcaaaaacacatgattaagggttctagggttgaagttgaattttttaggaaaaaggttgaagttgctggtctttctttggtttgggttgtccgaacaaggagagagagaaaggaggatgagttttctaatttcttgatttttctttgttttttctctaaaagaataaagaaaaatgaattaatcttttgatgaaaatagtaatggctaggtgtccacaccctaggctgccacctaattcctcacttgcccaattactaaaataccccatttgcttaacttaggcaatttaaagtttaggggtaaaatggtcaaaactataaccttgctcaaacccggtattctacttgtttccaataaatattccactaagaaaaaggttctagactcacccatgtgattaaaatagtcatccatcgcattttccattctcgccgagcaaaaattgtaaaaataacataattcatatataatacaaataatactcgtagagtttaataaaatattcgaaattgagaaattataactctaatgccaatttctagtaatgggacctacaatttattaaattcacaaataactataaaaatatcaattattagtgctaattgcctttactaatccatattataaaatgcagtcattacaattatccccctgttaaaaggatttcatcctcgaaatctaacctgaatagctctggatattgagtcctcatgtcagactctaattcccaggtggcttcctccaccttgctgttcttccagagtaccttgaccaagggtatggtcttgtttcgaagaacctttacctttctatcaagaataggaactggtttctcttcgtagaacaagtgtgattgtagttcaagggcttcgtaactcaagacatgagttgggtctgaaacatatttcctcaacattaaaatataaaatacatcatggacaaccgataatgctggtggtaaggctagtcgatatgctacctgcccgaccttctcgagtatctaaaatggcccaatgaacctagtgttcggttttgtgctttaaagaaaacccatttcaatatannnnaatttactaattaataaagatcatgaatcgcattctatgttgcatggtgcacatgatttgtttcatgattatatttaatgtataaattct

SEQ ID NO: 133553 - DNA, 1058 bp, Cannabis sativa
  modified_base (119)..(121): a, c, t, g, unknown or other
  modified_base (1003)..(1028): a, c, t, g, unknown or other
gaaaacaacattttgttgttttcaaaattcttgttttttgtaactttgttttctgaaaactgtttttaaaaagcaaggccaaacaagctaaattcaattttctatttttaaaaacaaannncagttttttagttatgatgccaaatatgcactaagtgatcaacaaaaatagaatctcctagcgaagattctaagtgatcaacaaaaataaaatctcctacagaatgtataaatcacaactaaacaatcaaactctgaaaaattattaggcaaaagtgcaagaacacataactattctaaaatctattgaaggtagatccacttaatacattggcaaagcatagatgtttaaaagtggaaatatttcacctctaaactcttgtacttaacaagttgatgtttatttcatgtttattggtcgtccactatagttgtatatggattaacttgatacattcttgggtggatagatagcttatatgattagttagataagatcctttcatatttagaattggccaactattttttttagtatctttaagaattcaaacctttttatttttataaaaaataccgttgtttatttttacattgctactatatcatactatgttgctgtaatatgaaaatatccttattttctataaaactatgactaaaaaaatctataaaaaaaacaatgtaagaaataaaagaaattacataacacagtaatgtttatatttttacgtttaaaatttttattacattttacgatattttataaaaaaaaaataacaataaaagcatgtaaaaaaaaaatacaaaaataacattaaaacaacgtaaaaattaatatacaaagaataaaaaattaacaataaaataattagagtataacataaaaaaaaaaccataaaaatatagaaaattctatagtacttttgtaatttatttatttttgttggttttgtattattattattattattttgaaattataagggaaatttacatggtnnnnnnnnnnnnnnnnnnnnnnnnnnaaaatactgccaggcggtattttttacttt

SEQ ID NO: 133554 - DNA, 899 bp, Cannabis sativa
  modified_base (219)..(222): a, c, t, g, unknown or other
gacttagaaagatataacggtaataagtttatgatatcttatcaaaaatcaatatcggtctcttccaatgtatactctatacatggaaaggacataacacttcaaagtgtaagtataccttatcgccgattatcataccagtctaaatctagtgcactgacaaatcatgagaattaaacttttgaacatataatcatgattatattgaaatgagttttnnnnagggcacaaaacccaacagttaaaactttaataatatttcttttgtattgttaaaattttattagattgatttttaaatttttattataatgtttgataataatgaaagtgtaaaccgctcaaactgcaccgcatcacaccacattttcgcgatatgatttttgcatttttaggatctcgcggtggggttgcgatttgagaaattacaaaaactacatatgcagtttggtttgaaaaaaagctacagcctgcaccaccttcaccgcgaacacccttagttcaaattgttagttgcatgtgtgactcttttttattttattaaaaaattaatttaataataaaatattttttagtgtaatttttggtgttgtgattagagtgaaaataatttttaatatcaaatttaacaataatgtgataccaaatttaatgtataaattggagatgttcttataagaaaattatattgaggttcacttagtagaaataaaactctcctatctctttttcatcccaaaaaaaaaaaaaaaaaaaatcctctatctttttttcttttctttcttcggttttttttagggtaaatactattttggaccttgtgttttgtaaaagttaccgattggaccctgtgttttgttaaatgaaaaaatggaccctgtattttccaaaatagtaaa

SEQ ID NO: 133555 - DNA, 797 bp, Cannabis sativa
tttcgccgtgtgatagacaactatcttcacaaaactaggagaatgtattatagttcaaattttttacttagaaatacgagtagtctcgtgtatatttgacatgtggagccaatttctagtgggaaatgatgtcgtgtcaataacagctttcgtagagctaccctcccatgatcgaaacttgtaagaaagtgtgactgagataaggtttagtcgctactatgcgcaacataataaattaaaagtaggattaaaaaattatcttaagtcacacatatatcgattatatgtgaggactaaatgattctcccaatgtcccacgaaaagatttcatctttacaagtgtctggtccatataccttatgtacaagtaattccaaataggctggaagttcatatgttactcaagaaagtgaatggtaatgatttactttcaatattatcaaatttattaattaataaaagatcaaaaattattttatgttgcatggttcacgtgatttttttctaattatatgtttaatgtataaatcatgattatagtgttgtgaatagagtagaatataatcatgattatatatttcgaagtttttgtcccacgatttgtcagtataatagatttacacggacatgataatcaacgataaagttttacttacaacttggataagtgttatatcctttccagggcatggaaaagtatgctagtatcgaaagtatggagtatacatcagactggattgatattgacattggataagatatcataaacttagtattatatctatctaagtcaatat

SEQ ID NO: 133556 - DNA, 842 bp, Cannabis sativa
ttttcatgttatttttatgtaattgtcttgttttgtcttgttttttctgttgtttctgtaaatttctgtaaaaaaatcgtaaaaatattaaaaaaaaaaatcttaaagtgtaaaagtataattttatgtaattatcccaataaaaaatatatatcttagtctataaactttttttatagagagaatttaaactctttttttcacaaatattaatgtaaacattttttcaatatgaaactcttatgtaaacatttggttaaacacattgtatgtgttaaggggttcaaaatgctatgatttattctcttacatgcttaactggttctaaggtatatgggacctaaggcaaaataaaatttcggaaccctatatatctaatttaattattatcaaaatgatatttctaatgctagtgtaatggtaaagctttaaaaaaaatccttaaaagctccaagattcaatctttcatagctacacattaaaaacaattttaaaaaaataaacaattagggattaaggattgatcccttgacctctctagttatactatttaccactacatcaaataatatttgttatatttttttcttatttaatattttatctatatattaataatttttttttcacaatttcagagccctaagcgattggcaggggcggagctaggactaaatattagggggggccaataacaagcaacacgtgcaaaaataaagctttatgtttataaattttagtgaccaatgtctccatttcaagatagtcttgactatattcattagaaatgacaattttacccaaaaatctatttacccgtgggtaccctacctgtatgtgta

SEQ ID NO: 133557 - DNA, 509 bp, Cannabis sativa
ccccaggcgatgtgggattgcacgacttacccattattttccattacggatcacgagattactgattgtcacaatggtcttgtgagatctggtaattaaatgggaaactgcactagacgttcggatgcttgctaattttttttttttttctggatatgttgtttaatatcttccagacatgcaccatgttggatgggttccctggataggtttttcatcaagggtggagccacatagacctctataggggctgaatttttaaaaaatttgcactactatatatataatcatatataaaaagatattaatacataatttttcatgtatgaaagaactaaaaaaatagtatttagttatttaaatataattttattattaagaaaatatatagttttattttttatattaatgtaggtcttacaattatatatatttaataaatagtaaattattatattactattttattagacttaattaatttgttttaatttaaaaatatatttagt

SEQ ID NO: 133558 - DNA, 806 bp, Cannabis sativa
ctttccaaacgcgccctaaatatttaaattaattactaattagttattttaacgttatattatgatattttaatattatttttgtaatcttaatttattgtagaaactaattagtaactaaattctaaaataaatattgactaagataaaaaaaaaaattgtaactaattagtatatgattagtatcacgagtaacttaatagttttttttttttttttttaatttttgaaatagcgcaaaaatatatgcttctcgcatcttgaaatattcacattaaagcgtaaattacaataatatttttttaagctcaaccgggtaacgacatggccataagttctttcttaaatttaaagataagagagaaagagagaaagagaaaaagataaaaagaaaggaagatagtaagagtttataaactccgcatattcatgctttaagaaaaaaaaagcagaaagaaagaaaggagtgtcaacatttaatatattttggtggcgtttggtaatattttttaatcagttttctgtttttaaaattgaaaaaatgaaaatatttttcaaaaacatgttctataaaactgttttggcttttcaattttttaactgaaaatcaaaattttaaaaacaaaaaaaaattacttttaatatttttttaaacagtttttttcttaatcaatattttagactccgactacacctggacctgaatctcctcccacggccctggcgttgaacccgacctctgacatgaacccaaatccgactccggacctagacctggcttaaataaaatcaaaaaataaaaatga

SEQ ID NO: 133559 - DNA, 833 bp, Cannabis sativa
gtaaaataaattccaacaatattcactcaacagagacgcaaattcctgaggtggatggatgaccaagattacatccttcgacctcaccaaatggagctgtatcactgtaatagagaagccaacgacctgataaggcagttcaaccagagaattgacgaaagaggacgggatatcatcagagatccactccaaggaagactggttgatagatcaaggaggttctattaacaagctgaccaacctggttcctcagggacaaggacaaatctttcctttccaaagagaggacataccttgcaacaaaggtcaaacgacaagaacagtcatatcctggcaaccaacggcatggggggccagccagggatcttaggctcagcaacaaccccgtcatccagcctttggttggccaaccacatgtaagagtccctttggctggctagaggagcactctttccccgaggggagcgagccacttaaaggttaatcttcaactgagaaggaccaagagcaggtggaaacacccaaaatgacaatctgagaagtgaaactaatcactttagacatctagatccaccaaactccaagaaccggtgcaatctacctcttgtcaacacaccgacaacatcagccaactgaggaatcacggcggccagaccatgccctatgcaggtctagtcggccatgaataactgcctattgtaggcttggccagccaaagccaacattggcttgccaaggcttgaatagatattttagggtttcccaacaataaaatttttaaacttaggatattttattttattttttttttaaatagaattgataatatccta

SEQ ID NO: 133560 - DNA, 706 bp, Cannabis sativa
aaattctttagcaatatataaataatatatatataaatagtagtaaattcttatttagaataaaattcagctaaataacataagtatatttagaaaagccaatagtagatgtataaagcaaaaacttttttttagatttaatgagatttattttattatatataaataaaaagtgattcatgaatttctcataaattatttaatttttattaataaactattttatttttaatataaataaaaaattactataaatttctaataaaccaaaaatttttgttatatagtcacacagatataataactaaacaatagtatatgctttatgaaagacaaaattgcagtggcacgaaacaccacaacatacatcataatgaaagataaaattccataaaaaaactaaacaaacatttaatgtaaatctatcagccaccaaaaaattaaaaccttatatatatgatccataatgggttcattaggcttcagtgtgtatatatatacacacaattaagctgaagcaataactgcttcataactcatattcagctgcaagaaaacaaagaaagaaaaaaaaaataatggatgcattatgccatcgtgatgtatatcgccgatcgccgtatatgaaccaaaaacaaaagttaatggcaaaagccattaaatatatattaacgaaagtccaaaaaaaaaaaaaaacccatatttt

SEQ ID NO: 133561 - DNA, 1077 bp, Cannabis sativa
  modified_base (439)..(441): a, c, t, g, unknown or other
ttaaaaagtaaaaagtgaaataggttgaatgtattttccaaaaaaaaattgctaaactcctccatcttttttttttcatcaggaatcatttactcaaaaaaccaaacgagagtcaaaaaataaagtcagactccctcagaaaacgaagcaacttcaaactcgaatagaaaaactcatacttaattcttctagttataaaaaaaataatttaacatcatctaaaaataattattttttaaaaaatttattatacaagaagagaattctaatttgtgtaaaaagaagtctaatttttgtaaaaaaaaaaataaagtttcatataaatattataattaaatggcttaactgttaaaataattatagtatggatttatataaaaaaaattatttataattattaattgctgaaagaattcttgttaaatattcaattaattannntaagaaaataattaattataattatttgattctaaaaaaggaaattttacctattgataacctgctattatagctaaaaaaaatgtaactatgatagttacaataaaaatataaccattgagtaatcactcatatatattatttagaaacaattaatcacattaaatatgtccattgttattttcattacatgagttatgatcatccactaaatatttataattggagttaggtatcttcgtccattaacttctctaattatatatttatgaatcagtgtccttgatattctattgaatatttttgtaagccatatacagaaaaatttattttctctaataaaaattgagcgcgctatgttcaagtaccgctatcaataccaaaaggaatttttaatctactctcaatcaaggaaggattggattccatatttgtgatgtatgttcccagctatttatattctcataactccaagatacctttcataaactttagagcaatttgcgccaaattctcttatcttttaatttttatacatctaacccccttatttttatttttggtagcaaaacccccttatgttttaatttttatacacttaatccccttatattttttttggtggcaaaacaccct

SEQ ID NO: 133562 - DNA, 860 bp, Cannabis sativa
  modified_base (829)..(830): a, c, t, g, unknown or other
tattcacacctttaaataagtaataatatatggacatataaatcacactcatatgataagtcattttaacaagtgtagtccattttaaataaaaataattggctaaatttgtcacatagatatgtgttaagtttatgtgtagtttttgctactcataccatttttttaaaataataatatatgtacacataaattacacacacaaatgttaacaagttagtatgtgtcatatttatatacaaataaaaatagaaaaaattacatttttttttgcaagaaaataagttctaggaagatttacattaactattattttcgacaattcttttttacatatttacaaggttttttttatatatatttttacggtattcatcaaaatatcacaaaactatcaagaaaatcacatacaaataacatccaaacaacatcaaaacaacataaaaaaacaatatacaaataataaagaaccaacaacaaaataacaaaaatacaacataaaaatgaatacatcaaaaaatagaacttatgtaaataaaatcttaaaaatcataaaaatatttaaaattccgtataactttatttttgtaattttttattattttttaaataatcccataaaaataaggaataagttgagaagtatctttttttttttattacacatcaactaaatatagctacaaaataattttaattgatatatatcttcttttataatcaaaatatcaaatataaactcaaataatttatgaaaattagaatccttaatgtatataataggaatataactaataaaattgaatataaataaaaaaaaataaaaaannaaaaataaaaaataaatatacaatataatt

SEQ ID NO: 133563 - DNA, 626 bp, Cannabis sativa
attttaatacaatactttaaaatttataatttaccaaacaccggctaaatgggggtggaatattctcaacggcagccaatctttgtgctgcagagttctaactgctaaatacctcaaagggaaagactttgttaactgcaggtacaaagattctgattcttggttttggaaaagtgtcgtaaaagtaaagtccattttgagaaaaggggcctgtaagttggtaaccaatggagagaatactaatatctggggggatccctggattcctcattgtaaaagtttctgcccaaaaccaattgggggtgctccctccaacctcaaccgtgtggctgatcttatgttaaataatgggcagtgggatattcaaaagctgagagactattttgaccaagaaacggtatctgccattcttaaaggtggccacccatctggaattggaaccgataaatggatttggacgctggaaagcaacgggcttttctcgtgtaaattttcttatctggctcaagcaaaggaaagagctcctcactgtgaagttgctccgaaactctggaataagttgtgaaatagcaaaattttggaacgacacaaggttttgtggtggtgtatcctatctagtgcactcc

SEQ ID NO: 133564 - DNA, 1009 bp, Cannabis sativa
ttttcttgctaaaattgaggtgattttgggttagaaattgagtttagaactttttataacttaagtccgaacattgttgtgtttgccaattacgtgctcgattttagattctattacgtaattatggtagtgtgtatggtatatatgtgtcttatgatgtttagggtggtttagacaggttctgctagtgtttcggtgaatgcgtaaacttggaaaattatatttttttccccgaccaactggtcaaccggttgggaattggtcaaccagtttcggccaataggtttaccgtttcgggtagccttgggaacttaggaattgtatttttgcaataactttttattcaggtgcccgttttggacgttctacataccatattgaaggttgaaatgagctctaccatatggtatatgttttagagccaaaatataattattattttagtgtatttgaactacggggtttggtaggaaaccctaggttatcctttactaccgttaagcagtgttttgagataaaaacttattggcttatcattgttatgacatagggcctaggattatcgatcgtactctaagtaggtcggccaacatagctgaaccagaacttgagataagaaaagtataatgtaccacatggcatgacaggttctgaaattattgatcgtctgattaggcaatgataatgtgatgatagtatgaacataatatacgggctcacctaattaggtgatgccatatacctagcgacgtaccgggcataggtactggatttagtgacatatgatgagtatcaagcataggtactgactcacctgattaggtgatgcgatatacctggcgacgtaccaggcataggtacgggcgtcagtgacatatgatgagaactgagtgtaggtacgggctcatctgattaggtgatgcaatatacctggcaatgtatgaagcataggtacgagtgtcagtgacatatgatgagtactgagaataggtacgggctcacctgatta

SEQ ID NO: 133565 - DNA, 1427 bp, Cannabis sativa
caatcgacgatgcagcgaacgacgtggtgatctctatgaatgcttgaggtcgtaaagaaaatctaacgaaactcgcaagaagtaggtcaaagacaaaaatggcatgcaaagctttaaaaaatctgggggggttttcgcaaaaaaaaatctcaagaaattttttgaaatggcaaaggtgatgaaaaggtggctcttttttttttttttataccattgggttgatctccgtcagattaaggagtaagtgatccaacgggtagataataaggaagaagtggaaaagatggttaattaatgcttatgatgtgcctcaaaactacaaaactgccaaaatcagagggcatgcattttttcaaaatggaatatgacaaaaataccctcggtaatcatttaaaaagcactttttagtgaaaatgactttttaaggggcaattgttatacccaaaatttggctggtactttagaggataatatgtgtcaaccttggagaatatgaatcaataaatataatggcaattttattaaaggatattaaatggaataagtcattaaatgtggagttagtagagaatatatatagctcgctgactgtatagtcttaagcgagacaaatatatacaaactattgattcacgtattgacgagaaaccatttcgcatcagaggccataattgtaaggatgacatctataatacatcgctatgtgtaaagaggtgttgacaaggcgagtaggagaacacttagcgtataatatacattatactaactaagtgtaacagcttgaaggacatgaataatgattagcgagacatctatctcgctataggaaggcatactcctggtgtcttcactaatcagctccagacatctttcaatgagatctattgctacgtcgcgttagctctctaagaaagaggctgacattcaaatgatgttggctactaaagctcaccttgtcactaagaactgcgattgttagatggagtgttaggtcttcaagcatagagacgactggatttacattataacctcggaaagatatgggaaaagctctaactcgcagccaatattattgttgctattgagttcaagtaccaagcgagatgccccaggcgtgatacactttgcagcgtatataaatccacatcagtgttgacccattaaaagcggtttaaatcacaactgtgtgatattcaaataataattgtatttatttacgtggagcgtaattaaagcccacaatttcggggaaatattgttgtgggatttgtatctgaatgtaattaactgccaccctatgccattataaataggggtagaatgtacagaaaaaagggacgaaaaatgcttgagagaaaagaaccctagtttgtattagaaaaatatgaataagattgactcgtaactatgcagagttaactgcaaaa

SEQ ID NO: 133566 - DNA, 697 bp, Cannabis sativa
catacgaagatcttaatgtgttgtctctatatagtcctgatgtgaaggctcaacagtggcagcgagagtagatggctatcatgagctttctagcaagactcatccgaatttgactctgtaaagtcacatgttctttctgggtctgatgtctcctctttacaggatctctttagctgtgttcttcgcacataaactactccatctatttctcttgattgtgctttggttggttataacaatcatgcactgtgaaaaaactctactccatgtggttccaaaggaggaaattcacaagggccttccaatcgaacaccagaatccaaaagcattatgtgcaactattgtaagaaactaagccatgccaagtttgagtgtaataagttattgtttaaaaatcagcaaaagcactatgctaatgttgcaagcactagtggtgcatttgacaaatcgatccttatatctatggatgaatttgccaagttctcaaggtgctaggaatcactcaagtctttatctcctcctgtcattacaattgttgattcaagtaaatctaatgtatgtcttctttccacatcctaaaaatgagtcattgattctggtgccacaaatcacatgataagtaattccagtctcttgtcgactctctagtcttatagtcccacttcttctattaccttagctgatggatcaccatttc

SEQ ID NO: 133567 - DNA, 1093 bp, Cannabis sativa
  modified_base (53)..(59): a, c, t, g, unknown or other
aagattacacaaacaaaaaaaaaattacccatgagttagtgtatgatgctcgnnnnnnnatgagagaaattatgtggtgagccttgtagtgtagtagccgctagcctgctagtgagtgtagtgagctgaaaaaaatgagaatagagaaagcaaaaatttgagcttcccatgtggtgtagcttcgagcagagagggggtgaagtaaataaagagggtattttgggcataatagaaaagtggtcatatattttaaacattgggtattatgagttttgaggaaaatttttcactaaacgcaagcatagaaattcaaatttcccttttcttaagagctaagaaagggcaaaatagtcatttttggttagttaagttaatcctttattttttgttaattatttttaagttagaagctaaaagaagatgtgagaataagttagataagttagatttttttttttaagttagaagtcaacaaagtcaaatcagacattcttctttttctttgttttctctcggctaaaataccaaagcaaagccaaaaaaacactcacttgagttttctagcctaaaattaatttttcctcaccctaagaagtaactaggaatctctacaagtggaagttaaactaaggtaaggttctaagtatcttttctccttcgttttctatgaaattattagttttggagagtgaatttgggtttggttgctgtggtaagttttataaagtgttatacccatatttcgagcaacaatatggtcatgacacgtgtacaagaactggaaaatgaatcagctcgaatattgaaaattaaacacattatttatatcgcctcagaaaatactagtcacagttataaattgaagtctttccttaggtgattaaggataagtcaaaataatagctcactagtagaccagcgatgtgacagttagtagtcccgtgatccgtaaggagaaataccgagcaagttgtgcaatctcacaccgcctgtgggaggtcaagtgggatgattttgagactgtataggtatgggactacatagttgaagggggcgtaaatagattgattggtactacctatatcaacaaggt

SEQ ID NO: 133568 - DNA, 804 bp, Cannabis sativa
tgttttgaacgaatttattaattgatagatcttatgatttttattcaaaaaaaaaaaaagattttattcattcatggtaaaagattttagtcttggttcattgaggaatcaattggctcaaagcacgtgttagtagcatgactatcaaatctggagagttctcagtgtattatatatatttatggtgcttttataaagggatgcattgatacactttgtatattttttttttcaagtacgttatagttatttaagatattttataaagttttgaaaaacgtggaataatttaaaatatagaaagtaatgttcaaacaatctattttatatgcgtataaaataaaataattatatatacaacacattgttgaaattctatttttaacgtgttaatattttaaaattttgtaagatatttatgataataaaaaataaataaaaatatatggataagagtgtattgttgaatttttataatttattttgttatgaaataatagtagtttttttcttaagattgagaatgagactagtgttgtgttgtgtatacattacacatggcatcttctaagccttatctcctttgctcacgtgctctaatccaactttgtcatcgctatcaattccatccttctagtcttccacctaaggtttttttttttttttttttaataaaactaataatattttttatcaaattttaagaacttaaaaatgccttctgaattattgagattgttggatttaaaaacttttatctaattttagtaaaaaaaaaaatataatatggatgaaagtttaggg

SEQ ID NO: 133569 - DNA, 1276 bp, Cannabis sativa
  modified_base (32)..(61): a, c, t, g, unknown or other
tttagaaagttcttatttaggatgttaataannnnnnnnnnnnnnnnnnnnnnnnnnnnnntaaaataatttccaacaactttactccatgaataggaaaaaacatgctacacaatgtaaataatcattaatatcaaatatttctctaataagataaattgatactgttactttataaaatcagtactatcatgttatggcattaccatctaggtcatccaaaatttgtatatcttaaacacttgttcccatccctatttgtcaatatatatatatccttaatatcttaggtgtgatatatgttaattctttaagcactctcgtcactctttcattcttagacctcatcaaccttcttacccattttcacccattttcacccattcacggtgatatatagggaccatcatatcagtagggcatgttagtttttattactagtctatgatcacaatcgcttaaggtggacattcctcatgaaagaaaaatctaaaacaagtcatattttctaaaatttctacaaaatgatcctaactcaattccaaaaaaatattcaagtgttaaaaactgacaatgctcgtgacttcttcaattctgtacttggatcatatttgcattccaatgggatttttcatcagagttcttgtgtagacacaccataacaaaattgtgtggccaaatgcaaaaattatcatttactagaggtagctcgatctttacttttttcatccaatgaagggaaaagattttagggtgaagcagttctcacagctacctatctcataaatagaatgtcatcacatgtattaaaattcaaaacttcgctacaaatcttcctagaagcatatccccactcacattttgtttctcaaattttccttcatgtctttggtagggctgagcattggtcggtttggtcagtttttttcttataaaaatccaaaattcagttttcggtctggattggtgcaattcgaaaaccgacctaccaatctagaacaaatctcgaaaccggcttttttgaacctcgtgaactctttttaaaagaaaaattatccaatttattttataaatacataattttatattttacaactacaaacatataaataaattgttcaaaaactaattatcttattcttttaactttaatattaataaaaaaataatatattattagtaactataatacatgcaaaaaaaaaattaataaattaatatatatatgtataacgaacggtttcggtttgttttggtcggtttattacccaaaaaa

SEQ ID NO: 133570 - DNA, 862 bp, Cannabis sativa
  modified_base (826)..(834): a, c, t, g, unknown or other
tatatgtaataattattattattatataccatcgtagctgctgctatcgaaggtctgttggaggtgtcggcgcatatcgtaggcacgtgacgagacctgcttcacgaactcgtccgaagtcccaggaatggctccgtctaggtgaagcgctctctccacctcttccgtaccgttatcatctttgtcgtcatcagtggttccaccaccaccgtctgatttgctagaagctcgcctgctccatgatctcctagagagcttcacgggtgagctcaggcgcggacgggagagagaacacgaacgacggcgacaattctgcagacgacaagaaatatagaaacccatttggcgccgttgcggaggacagagggaattatttgggggtagaactaaagaaggaaagactgaagagagtgaatccatggcggctggtggtgctatgctatgaatccaatatggaggtatgagaataatattttgggtcttttctatgtaatattgtggaacagtttggtaggcgtagtaggatggaaaaagttctctgcgtaaacgactgcgtaacttggtttggtgacacaagaatacaggaaaggaaagaaggttggagaaggaaaattgagtttttgtgattctctgtgaatctttggatatttcctccctcatgtccgttgcgggtccgggtaactgaattatggggtccgggtctgggtccgggtaactgaactatggggtccaagttcgggtaactgaattatgggatccgggttcaggtccgtatccccatatgtttttgtgaaataatatcaaaaaaaattacaaaaatacggtnnnnnnnnnttttaaacatttttacgattttttgatt

SEQ ID NO: 133571 - DNA, 1053 bp, Cannabis sativa
aaataatttccaacactaacatcttaagttacactaaaaatgcccctttcattttgtacatcagatgaaatgaacggtgtccctattaacactcattgtgtcatcgttatctcgtttgacacttccttgcttagattgtttatgtcaagagggaaaagaatatctgcatgagtgttggaggccaggggtgcggacacgggcgggcgcagatgggcgcgtgagcgtagatgggcgcacggggtgcgaacgagtgtgcaaggagcaggcgagtgcgcgggcacaagcagacatgtgagcacaggcagacacacgagtacggatgggtacacgagcgcagatgggcacgcaagcacagacgggcacataggcgcgaatgggcgcgcagggtgggggcaggctgtgcgcaagcaacttgcgtgcaggggctgcgcgcgagcgcgtggagctccatttggcaaacttttgggcataacactaatgactccaaatattacacttagtaatttttgggggtcaacacttgccccctagtctataaaaattctttcaagtgttcttgtagaccaagtttggtgagcttcttctttacaatttaatttttcttctcttctcctctttgttacccttcatgaggagcgtaggctttatgatttatctcaacctttttgaggtttgtgtctactgcaatgagtgagtgtttgctcgctaagcttcctcaacctcttatgggttactctctgggtataagggagcttatggctccttaggtcacactcaaccttttcataaatttaagaccatattgggggaacctgtggccttttaggaagcgctcaaccccttacattgtattagttgtacttagagtgcattttgggtgctagaaaatcagtactcctttcagagaggcgtccctcttagagtcgtattcattactcttttccttttaatattttaagggagatgatggttctgtgaacggactcaaactttttctttcgatttactatgaacacatccaaatcaacacacaaacaatattcatcgttttaa

SEQ ID NO: 133572 - DNA, 1239 bp, Cannabis sativa
  modified_base (79)..(82): a, c, t, g, unknown or other
  modified_base (709)..(710): a, c, t, g, unknown or other
aagggggtacattattgaatcaccatatattatatatagggatatatttttgtcccgtgatgtactttcacagaatgtnnnntgtggtacattagatgggactcagagtacattaaatgagtatcagggtacgtttttactttttaaccctaactacctttagatcaatctcagccgtcagatcaaacaactccctcatctgacggctgtcgtatatcacggattacaatccgtgaaagttcaattacgggacaaaatcatatccctatatataaatatatagaaatatatattgattgcttgttcatttgctttcttacatataaattaattaactctccaagttatcgatgtgcatcatcaaatcaaacagtgcaacgtacatattgaagctaattaataatatcgaaacaattatataaaattaataaatttctcttattatttggagtttggacctctctctctttatatatatataatacattctcgttcgaacaagcctttgacaaatggctttctcttgagcaacttttacctatattgacgatttgctgtctttccgtatccaaaaaaaaattaataaataaaagaaagaatattatttttttatttttttaattacaaaataaaagtaaaatataaaatatttattttttaattttaaaaacaaaaaataaaagtattttgtaaaatttatttttatttnnattttttgattttatttaagttggctctaggtttgtagtcaaattcgggttcggatcagagaccaggttcagcgccagggccgtgggggagagatttgggttcgggtatagtcaaagtctaaaatattgattaagaaaaaaaacagtttaaaaaaatattgaaaatagcttttttttttattatttttaaaattttgattctcatttaaaaaattgaaaagtgaaaacagttttatagaatatgttttcgaaaatatttttacttttccaattttaaaaatagaaaactgattaaaaaaatgttaccaaacgccaagttgtcccctcaagttgtctacgtacccttatataagggatcaaatcccatcgtagttcagttggagggtagaatagtcactccactccattattcaaatgtgttcacctatcgttgtgggttgtacacccacttttccgtggatactggcccgtgacctaagatagtgggaataattgtaaccgccttggagcagggccggccctaggcata

SEQ ID NO: 133573 - DNA, 1031 bp, Cannabis sativa
  modified_base (742)..(744): a, c, t, g, unknown or other
tctttaaaccatagaatgttcttctcttgtaagttctaaatgtctagtacagagaacaaatacaaacttttatctgccacggagatcaaacaggaacctagtggcgaaattactccataaatccaagaatatatagaagctttttaaatgttttaaaaataaaagggtggcgaacaaatggaggttcatacacagtcaaataaatgatgagtggatgaaatacccatatccaccacgagggttccccgaagggtgtcgtcattgcagattagtttattttaatggcgaactggtcaagcctggatctttatgctcgtactacgagtctcaccgacacagtaaagacttctaaattgttatgttatgattgtttaatggttagttttaatgtttgtttagtctttacttatgtttaaaaattttcacttgtctcgtgtctactgtttaaaagttttcaatctttttgtcttaaagtcgataatatatcaacattctatcgataaattatcgacaaacataaataccacaaaatattcctaaatatcggcaacaatttaaatttattgggtgtattgtcgataaaatatcgacaaactatcgatacactgtgaatataatcagcaaaaataatttacaaatttaatcgacaatatgtcgatatactattgataacaatgaatttatttaaattattttatttatcaaaaaaatatcgatatcatgtcgataatggtcatccctnnncttccttcgcatattatcgacatttcatcgatattctatcgataaaatatcgataagctctagaaaacacagatttcgaagaaaaccaaatctaccagatctactattttagactaaaaaataccagttccaataaatatcacacacatataatgaaagcaaactacatactattacaaatgtctaacaaaatgattaaaaacaacttacccattgtaatggtgaatgattcttgagtgattgggggtgtggtcccattttccaccaccgagagagagagagagaga

SEQ ID NO: 133574 - DNA, 561 bp, Cannabis sativa
aaaagaacaccaaagcaaataaataaaccaacacaatagatattgaggctcaatcatgattgaactatgtctatgggaggtagtcaaaatccaccaacaatcaagagtacaaggcttcaagcttttagttgtttgcacacaaatttctcactattctcagtactagttcacaatctcacttatttcacatgctctcataccaaaacctttcactctttcctttctttcaaagttaatcttttcagcttaattgaaactaatatcaaggtactattatatcaagtactaaccatttctttaactgtctacagagcaaaggaaaaaaaattcagaatagagttgaagttagttcttttgagtatggctaaaaactgaaaaatagctcacactttcaaggaataatacatttctgctcaggttgtcattctcagacaaaacaaaaaagaaactcaatttatattactacagttctcatatagaaacatggatgcacgtcacaaattttcataatcaatgtagtagggaaaatttgagattaacattcataaagccttaagacac

SEQ ID NO: 133575 - DNA, 759 bp, Cannabis sativa
tcttcttggtgaacagtgatgtgaaagtatcccgtgcttttttcggtgtcttcgccgtcctgatgtgttccaacatctcatcttcgactgtggttcgaatcgtaaacatggctttgcctgctttaatcttttatttcttccaagcggacgcgtccttcgattgtgtgacttcattgccaccaacgcaagttttggccatggagatatgcctccattgcattgacaacatattgaattttggttgttaagtttcttaatttcgccaaccatttgaaggtcacccatcatgcaagctccatagtactaaatcacacacgatcattgtaagaaactcaacaaacgactctttgatataaaccaaccagacctatccctgataccacttgttggacacgacaacgtgtgaaaacgtaattacttttatttttacaaaagtaattacaccaaaatttgaatacttttttattagaccacaatatactaagtactcacacttttattttaccactaaacacctctattacacacttgtatataactcacactttaaaatactttatctttaaattggtggactttagaacacacacaacttaacttagcatacattaggacttcacttgtttgtgcacacaccacaaaggacccaaggtccatatatatggaggatgttggtgggtggtgaccaactaaaaatttgctagagttttctagcaatttctttgggcttatgtcaaaggcccaagttctagatagcac

SEQ ID NO: 133576 - DNA, 776 bp, Cannabis sativa
tgattaaataaacattagctttatgtgggtgatttcaaacataaaagttaatcaaaacacatttaaaaataaattaaaatttagaaaaataaacagaaattaaataaaatcaaacctaggaaaagtagcctaaaacctaaactatacatatctacaactgattttttttttaataatatttataactgatatttgaattttaatttttttcaatctaagattttaagttaaagccatatttttaggggataaggtgataaatacttatttctttttatccataattaaaaatactttttttttttgatgatttaattaaaaatactcttaaattatattttattaaaatataccaaaatagatatattttaaagaatataaaaataaaagtaaaaattaaaacaaagtaaaatgcaatgtaatttcatctatttttagacaccatcaaaaaaaattgtgatataaatcaagattatattcttcataaaatgatatttcactaaaaatcgtctggtggttgttatagttagcagtttccgtaatgggccatttagccgaagtcagcccaacccaaggccccaaccctgtctcatttccttacaaaaagaggccccaatttgtttttcataaatgtccatctttaaatatttaagcccatttattttttctcaattctgaaagaggaaattacactctatactcattttatattgttctcttttatttttaccttctttttttaaagtctatcatatttacctctttttttaaacatt

SEQ ID NO: 133577 - DNA, 595 bp, Cannabis sativa
ataacgatattgacatatagaaagatgttaggtactactggtaccctttaacatttcttttttttatttttttattttttttatttttgtgtttgaactataaatattattgtatactttgaattttttaccctactataaatattcatcaaactatttacagtattataaagtaattattctgtcaaattgtaataccatgacaaataaaataataacgttatagttttgactattccttcaacaataccatgtgtgtgatgatttaaaataaaagtatatatatttttaaaaattattaagctagataaacccaattaatgattaaaaaattaaataaaactaaattaaaaattttaaattaaatatatataacactaacgtgacaatagtttaaataagaaggtactagtagtaattaggatcttttataagtgggcattgtacaattgcttagcgatattttctaaagggaaatttgcggcagaagtatccgaaaatatcgcttttatacagattagtcttcaactttcaaaaatagcagtaatagtcctcaaattcacgttttttataaatctgtcaatacccaatttaa

SEQ ID NO: 133578 - DNA, 961 bp, Cannabis sativa
gcacgttatatggaattaatgtctcatacatatatttccacactacataatcatgatcgatgataaataacaccaatgtaccatatatcaattaagagaataattccataataatctaaacagagcttagctaagaaaagatcatatatagctttttatgcatagaaacaaatttcaaaactacgattatgagattctaagtaataaactaattattacatatgtaaatataaataatataatatggatggcttgaagcttcaaatttctatatatcatcattactcaaccggatggtttggttgattcggtacttattaagacgaaattactaattcattggataatcaacagtatatatgcatgcatgggtacgctaccatgtacgattttgttgtatagaagtagtagaatatgatgatgtagtgtacaacatagtaaaaggggatgataacgaagacaagagcgagcacagaaagttttcttttaaaagaagatgaatttttatttcacaacataataagggccaaatcaaactctgttatgtagttactgactcgcagaggtaggtcctagaaggctttctaattgtccttctaagaagggtcttcaaggaagttacttttcttgtggaaaggagatctggatggctagttgttccttctaggaaagaattctagatagtcgactctaactagctctatcctattcgggaaattcctttagtgagtgcatttggtctgtgtttctggaagccctcatacacgctctcggatgcactcaaacttctgcagatgtggagacttcgctcaaaggaaaattggttaagttggttattgcctaactagcttaaccacgcttcttgcagccaccaacttcaaaactttgatcctaagcctataaataccaccaacacttaccatttcacatgacgattgagtttttagtgtgtgtgtgtgtg

SEQ ID NO: 133579 - DNA, 883 bp, Cannabis sativa
tactataaatttaccctatgctctcaatgtactaaattcttcatatttgtgctaaaaaagaacaaaaaatctttatccttatgctaaaaaaaatcaacatacttaggcccctcactaagggctggttccgtcactgtatatatttataattctattattagggtagataatgtggcattctttcccctcaattttctattttatctaatttgtggttttttttattattttatttaatattatttttttctttcttattttctttcaataatgcaaactttattacaaataaattcaaaaccgtttgtaaaaaatatcaattaaataataatgtatgagttatcatatattattattaattaataataaatcaatatatatatatatatatataattctcttgctaagtaagataatatggcatgttatactttttacttttaatattatcttttttcttcttttttttttaaataagaagttacaaccaatgtaatatatgtaataattaataacttagtgtattatatatggtttatttttaagcgtgttaataaatgtaccgtcaatcatttaaatgatacattgagcgctaatgatgtattacatatgtaaataaatatagggaaatttatattttatattgtatttttctcatttattttaattatattgtgatacggcagtaatttcttttttagtgtctatttttatactaccttcctattttgtgtattcaaataatgttttgctgatagaattttttttattttttttacacgtgtcagcctagagttttgcatgtgtttatttatttatttttatttttattttaagtgttaaaaaatttaatgtgactgtgtattgtcacatttgtgacagt

SEQ ID NO: 133580 - DNA, 531 bp, Cannabis sativa
actagaacttaatatcgtttttttaatctataactcactcctcttcgatagtctgaccaatccccaggaaatttaaattactttaattttctagaaaattcatcgctggaatcattttctattccagtcaagttgacaacctcttcattcattttctcgtgattaaataatatgttagaaacataatattactttcattttaaaaatattataaactaaaattttaaaagttacatgtagttctcggcatgtctcgctaagccaagtgtttatttcttttttaaagtggcattttttccaagcataaattgcatggtcttcaaggacatcctgttcaaaaacagggttagtttgtgcaatgtgtaaataattttactagtaaaaagttaataaatttagtaatacaaaattaataattttacttagaaatatagtacggatcgctgccatcgactttgtaccttgcgtggacgtatacttcatttcttttctattttttttttgttttgattagatcacgcaataaacttt

SEQ ID NO: 133581 - DNA, 915 bp, Cannabis sativa
  modified_base (50)..(69): a, c, t, g, unknown or other
attggatccaaaatatgaaatccgcacttagtgcggattggatgttgttnnnnnnnnnnnnnnnnnnnnggatcggatgaacacccctaggtaatcttacgagaaactatgtttattttttttttccatttgcggatgagtttttgaattattgaaaaagatatattgtgttgagtttttgaattattatacaaacatattgtgaggtttagatcacttaatcaaccaacttattgccatgacagttggcagttatttcggttggtagttatttcgattaaatggacattaacctactgctatatataaaggcattcaacaacagaatgaatagagagaaatcgagttagagagagattgcacaagagtgaaacatgagggttgaacagagatgaattctcttcaaaattgagggtagtacaagactgtatctggttcaaagaatttgacagttttttttaagctcttgttgtaactggtgtgaatcaccatagttctattttgtgcacttgattctccattgatgtaagttgtaatctttgccattaattaataaagtaatcacagcctatagagttgtttctactcggggattaggtccaagttttatccaaaacttgtgactgcacctcgttatttcttactgtctttttatttatttggtttaatacattttctggtttatcattctaagccattttattcttgcattgtgttcttgttggtgcttgagtgcacaacacatacatatatttaaggtcataaaatgttttggattaaattttttggtgtaatatataagttaatttaggtgttgtttggtaaaatacttttactttttaattttttaatcacaaaataattttatttttgaaaaacaaaaatacgttttgtaaccacttttgttttttaatt

SEQ ID NO: 133582 - DNA, 574 bp, Cannabis sativa
  modified_base (45)..(46): a, c, t, g, unknown or other
taaataatttcataattaaccataaacaactgctaatttccaaannaactaagcgggctttacatgatactaatatatcattatgacaaaaattaggatcaaatagagcaaaagtttgtctatattacatagtgggcgtttatagttgggctaatattgtaaagtagatgcctaacaacacatgcactacttccaattacatgttgtatttcagtttctttacagtattctcacagttgactaaccataatcgatttttgaaaatgtcaagaaggggacccaatttcatttctcatattttataataagtagtttgatccaagaatgaattatgtaaattacaaagctagtagtaaattcatctcaagagattgcaaatatgaaaaattagtacaaaagttgaaacaagtgttgtaatgcaactaagaaaacacttaattgcaactgaaatatctacatacaaaattaccaatatattgtttacgcattgtccaattgttgtcttattatcattttttttttttgacaaagtgattaaaatcactcatgaatttacgacgcccacgtccgccac

SEQ ID NO: 133583 - DNA, 1111 bp, Cannabis sativa
  modified_base (771)..(771): a, c, t, g, unknown or other
  modified_base (1059)..(1065): a, c, t, g, unknown or other
tttttattaaaaaaaaataaaaataaaattgttaaaaactaaaaaaacttccctttctcagtaatctcaataattcataaaaattttaagagcctatcttaaatattataaaaaattactaactaattataaagtaacactttatcgtagtgttaggctccggaattcggaacaccttaaaccaactcaaatatggcgtattaaagacatcccatacccagtacttgggaattcaaaaattacctaattaaattcaaaagttcactcaaatatgtaaccgacattacccaattattgtctatttgtcctattttcatatacttccttttcggattgtgaaacacattaaattgagttggtccaagtacaccaaaactaataatttgaaacaaaacacaattcaaacacctcacaacaatctagaatagtaatattaggactttggcggtgcgattggtgtagtttttaactatttttttttttaaattaatctgtacatgtagtttttttaatttttcaaacggcacccgcaccgtgaaactaaaaaatcgtagaaacctcatcacaaaaaatagtgcggttcggtgtagttttcgcagtttggagtatcactaaataattaaactatcacaaatacaataaaacttgagcaacacctgtcaaaaataccatggggcttgaaaataaatatgaaaaaaagtttcaagtttcaacaatacaataattactaattagtggtctttgggctatattggacctaaataaatatanaaattggtatttttataatatgcgatgcggtacggtttgaactacatattaacaatttaaaaccacaaaatcgcaccacactgcgcactttagaaaatattcgaaccgtgactgcattgcaaaaaattttaaacatcattttttctgcagtacaggaagtttgagcgatttaaacaatttaatcaacaaccctaagtaataccttattgaaatgaggatatcacaaagccatcaaacgaattaaatcataaaagtagaaacaaaaacattaaaatatatatatatatnnnnnnntatatatatatttataatttttattttcaaaaagattgaaattata

SEQ ID NO: 133584 - DNA, 1305 bp, Cannabis sativa
gaggtttcctgccctatttgtggggaggctgaggagaccacagagcacttgttcctgtactacaactttgccttccacctttggcggtcttctccttaagggttatgcctgttcttgactcaagagcccgcatgtgggactgggttacttttctatggaatcttaaattcagaggagttgatactgatgagctattcctctatgccttgattgtggtagataccatttggaggatccacaacgacaaggtacataacaaatcaatgggtaacattaaacactacattgactctattttttcttgttaagcagattatggcttctaccttctttcccctccacagcctatcaagactcatgcttggtctctgcaaccggaagattgggttaaaatcaactgcgatgttaaagtcgaaggtgacactatgtgtgctgtggcgattgcgagggaccataaggaatcaattttgtgggtggcgacaaaaaagttacacttctttgaccaactcactagagaagttgcaacttgtcttttagccatggagacggctgccgcattgcatcattcttttgttttggtcgagagtgattcagagattgttatcaagaacctaaaaggggaaaacgagccgctatcatggggggcattccggtgggaagttagttgtggaaagatacaaggcggaaaccaacccatactatgtgagatttccttgagagagttgatgagttcattaaattggaagaagccaagaaaaatgctcaaggcttcaaccaagctaagagtaaaaagaacggaacgagcttaaattgccaaagctctcagtgtaatatcccgataatcctaatggtaaatgattaggatttataactatattattggttaattaggtaataagtgggattgtgattttactaatttagttcaacataattttaaattttctataagtggataaataagcataatttttaaattactgagatttatatggtatatgtgatgtaatatgagttactggtacaataaaaatattttcatatttggcgaccttggagactcgatcgggggccagaaatatcataatgggtttaattgatagaatttgtggaaatattatgataagttaataatataggtattaaaataattaagagtatataaaattttgcatggtgccctaaaagtaaaatttcttagtggttaagaaatgataggataaccattaataaaaagtttttattaatataattatattattatgggatattggcggctaaaccacctgaactttacggtttgta

SEQ ID NO: 133585 - DNA, 720 bp, Cannabis sativa
aagagactttttccattcagtaaattgctttgaacagtgcttaagtttctcagctaagttgactatggggttatttgtattgctctgatgattggagctccaagcctgagtaagacaaacttcaaagttcggttcggccatccataatttatcaaagaaaaaccgattgctgtgtctttgggttgagtgtaattgatggagattcaagattaaaggacgatggtcagatccaaaatagtcttcgtgaagaagaaaatgtttaggaaacagagaatcccattcagcgttagatattgcccaatcaatgtgttcttgggtgtgggattgttggccttgcttatttgtccaggtaaaggggtagccatgaaattggagattgtgaagagtgaacgaatcaatgaagttttgaaattgggtagaaggagcacgagaagtgtcccccccaattttgtcactcgaatttaagtaatcattgaagtctcccattatcaaccaaggagagttatgaatagtgggtccaagtctgtggataactttccaggaatggattttattttgacaattcggtgccccataaaaaccagtgaagtaaaaagcagaaaattggtgaggctttaggtagcaatgaaagtgacttatattataagacaacagagttacatcaacttcatgagtccataacaacaaaaggccaccactaagaccaatcctagggacttc

SEQ ID NO: 133586 - DNA, 501 bp, Cannabis sativa
atgcatattttcaattcttttatatatatttgattttattctattgtcatttttatttctcatttcttcgagctaattgtacttttagagtcaagggcagactcacatagaagtaagacggaacaattgtctccctgaaaaaaataataattgggaaaaaatgtatacattttagttagttacgatatatatttgtaataaaaaatgatatttatagacataatattagttttggtgtaatgattagattagatggtatataagatagaggaaggactcaaatcccaccaacaatatttttcttctttttaagtttatttttattcatgccttacaaaaaaaaattaagtctgtcactttaaatcttaggtctatcactacttagagttagagttgaaaatccaattagtagcttcataggcactttgtattggtttaggcactttgtattggtttcctattccatgtaccattaccaaaagaataattatcttttttacc

SEQ ID NO: 133587 - DNA, 1227 bp, Cannabis sativa
aaatgtgtcatatcccacaaatatcaaatattatgagtttaagggaaaaatttcaagaatatgtaagcataaaaaattaaatttcccaaaggtattattgttcaaaaaaaataaaaaatcaaaacattaactagtcatgatgatcaataccaattcttcacggaatactttttctttgctaataaataacaccatgcccgtggtttttcgctcaaaatggtatctggttttctgacataaatataaatgattggaatattgtctaaatatatatactatactacagataattttctagttattatacatacacagtatatattgttggctattctatgattttttgattattctatgggatctaggatgcccacggggccgagaattagcggggagtactctcccattcccatcccgctaaggattttaattcccatctccgcttattttccattgggaacgagaccaggaattccctaatggcattcccatcccgctaaggattttaattcccatctccgcttattttccattgggaacgagaccaggaattccctaatggggtgaggacggggcgggaaatctcctattgtaaaataaaatttattttaaaaaattaaatgtataaaattattaaattacataaaagataaaatattacatattatttagtattcaatatagtaatcattattaaaaaatttaactttaaaaattgtaaaaatgatattaatatactaaaaaaaaaatacaaaggcatttataaaatatataatattaataaaaaataattaataaattaaacagtcccgtcggcgtggggagtgtcattccgtccccgccctgtttaacattcaagtacaatatttatcccgttcccgtcccgttccccatttagacaagaaatctccgccccattagagtcgggtccccggggcaccattcccagggagaaaatgtgcatcctaacgagatccaaagatcgcacttaatatcaattattgcgattacgaaaataacatttcccgtgacatgaggaaaattgtatatataatcaactactttttcaaatcatcacttatttgtttctctaaaatcaattttactactataccaaaccaccacattaatcaatggatgatgtaggatttttaccaaattaccctacaccaacaagaattttaatatcagtatcaaaggtcaaaattgacctttcctagtctaatt

SEQ ID NO: 133588 - DNA, 798 bp, Cannabis sativa
acctaattaggtgagcccgtgccacaacttggcaccaatatatcacatcatctaatcagacgagtctgtacctacgcctggtacttatcatatttcagtgacgctcgtacctacgccctaggggtggcaatttttgctcgcaggtcgtgttcgtgtcctgttgagacccatgtatgacaggcacatgctcgacccgaacacgacctatttaataatcgtttcaaaaaaatccaccctatacgtctcgagacccgtttaataattgagtcggtacttaaaccctaaacagtagcgacaaaaaaatccactctttctctgtgagtttggtatttcccaagcaccttgttaacgaccgattgggagtcactaaagacctttattttttgggctccaacaaattttggtagtctcaaccctgcgaacaaggcttcatttattgcctcattattagaggatgaaaatttgaaccgtaaagcagtttgaagccttaagccttgaggcaacactatcactatctctactgctaatccattctcgtttaaggccccatccacatacactttccagataggggaactcacttcgggttcatgagcagttgcttcagtttcattgcactaaacaattaagtctgccagcgcttgctccttaatggaagatgcgtgggacatactgttgggtattttgccttaaataaaatcccattttaatgtaatcttgaatattcatttatcaataaagaaacagatttacttcattacttgtttaatgtgctattcggttcatgtgatcacttat

SEQ ID NO: 133589 - DNA, 974 bp, Cannabis sativa
gtgcaagcaggatagaatatagaaattctaacaaagttattatgagccgccatattagctgatcgtctaacaaaataaaaaactacatcttttaaatccttaagcatacccttacaaacattcaccacttgaccaaacatggatctcatatcaattgtgcttcgtaaggcttgaaccaccggaaggcaatccgtttcaagaaccacatgtgttcgttatcttatcttgatccagctcaatgcctctcggattccaatgacttcggctgtagcaggaggaacttgaccatggaacaattttgtgtagccttcaactagcattccttgagaatcacgagctaccattgccaacattccaacgaaccccattagccaccaagttttgagcttcaagggtactccgccacacatagctcgggttgggacctaaagaggccgaagtgaatgtgccattgggataatatctggctttgaacacacgcgaaactaaggattcataattgatttagagacaccaaccttgcttacccaaaagcgccaaattaaagtctcttaaattttgaaagttcattccgccttttgatttgtgttgacaaagccttttccatgaattccaatgaatacccgagttggttgtagatgaggcttgccaccaatatttttctatcaaactttccatgtccttagtagtttcaagagggattaggaaaacattcatagcgtagcttgggagtgactgagcaacaaattttattaacacttcctttccagcacgagagataaactttgttccccacccttgaagacgtttttgaaccttctccttcagatatcccaaagccgcattcttattacgacccattgaactcggcagtcccaaatagaaacttccttccggagcaatactcatagctagattattaactttaattgtatctatcttatatggcttaatataacttaattcataaatac

SEQ ID NO: 133590 - DNA, 1007 bp, Cannabis sativa
  modified_base (506)..(511): a, c, t, g, unknown or other
gtaaaataatttccaacattcactcccctcttaagaacatatcttgggttaacaatttgtattagagcaagggttcatatatttgattatatttcacaatagagcatgacgtttccaagtaattcacaaaatgacatgttagaaagtttaagcacaaatagagcatcgtacttcaataaagtatatttttcttattgaaaaattagattgaaatttactttcaatctatggattatgatttgtggcaaatagtatctaatggtctttacattcccattcccaaacatgttataaatagtgtaaaagttattaagacttatgaggcatatgataagaatgataagaaaattctttttaaaaatgctagaactaaatatggacttatatgtggtttggatagagatgtatttaagaatattgaacaagcttctacagtttttgatatgtggaaaatacttgaagttactcatcaaggaactagtgctatgaaagaaactaaaattcannnnnnttccactcgatatgagaactttaaaatgaaagcggatgaaaccattactcacatgtatattcattttagcacaattactaatagtttgaacactcttggcaaggtacttactcaaaaagatatggtgaccaagattttgagaagtctcaccaaagcttatcaaggaaaagtggttgtcatccaagaagccaaggatctctcaacacctcctttgaaagaattaattggttcacttatgaactataaaattttcatgagtgctcaagaagaagaggaagttcagaagaaaaacaagactattgcattgaagtcttcctcctcccataccattagtgatgatgatgaggatagcttatgtagtgacatggaggacttagcactcttctcaaaaaagaaatacaaaatgtttataaaattcaagaactttgaaaagaagccacaaagagggattgactcaaaagaaagaaaaagcaaagatgatccaccaatttgcttt

SEQ ID NO: 133591 - DNA, 576 bp, Cannabis sativa
aaaaaaaaaaaaaaaaaactgaggtataagacccctatagcttagacatggtctctcatattgtcataaatgattgaaggtgtaggaaagaatctacactatcttattctattagttttgcataaaaagataaaaaaaacaacaaataaataaaattaaaaaaattaaattaaataaaaaataacaaatatataaaaataaattaaataaaaaataaaaaaaataacaattaaaaaatatcacaaaagtaaaaaaattaataaataaataaataatacataaaaaagaggagagatcgcaaaggacaaaaacaaatttttgtttgtttgtgaacattaatttttctattaatgttataaatatatatataatgttgggttttctgccctaaataaaatacatttcaatataattagaattactaattcgtaaagatcagaaatcattttatgttgcatggttcgcgtaatttttttcatgattatataatatataaattctattaagtctagaacatatgtatttgtttatgattatagtgttgtcagcattgtggaatataataatgattatatg

SEQ ID NO: 133592 - DNA, 951 bp, Cannabis sativa
actgtagcgtgccttagcattagggcgttacacgtagggtcttcgacggctcatgaacgacacgcagggtcttcgacgactcgttgacggtgatttctttcttttttcaggatgacgctgacgttggtggggcttgagagtttcattctcggagttgggggttttgtaggaggtggagatgggttttgtcggaggtggatattttctcagatttaaatgtttcgtagaggtgagaggtcgtggtttcacagagctggggttaatcgaatttgggggtttcagattttggggttttgtaggaggcggtgctagaattggagaccaccgtgcaagaagattgattggccttggattgttttttttcgagatctgattcaagggattggggttttttttatttatttaatttgtttattttatttcttttaaataaattatgatgtatatttacttgttgatattaattttttagtggtattctatatatttgatattaatttattgtgtaataattatattattatcaattaatttatatataatttttatagtaaatttataattaaaattttaatataaataatatataaattatttaatattattttaaaaaattaaattaatagtatttcaagtctattaaagttggactacatatatatttgtttgggttgtgtctgactttcacgttcagcttagtgggactagaaatatttttctagtctaatattattggactagaaaaataccttttttatttcccttgatactatgtccaacataaaatagactactaatacttatatagtccaactttaatggacttaaaaagggatttttgtagtaatgttaagttacaatctattttcagatttgtaactcatcatatgttacaattttatgtgtattattatactatatatgatataatataacctccaacacataata

SEQ ID NO: 133593 - DNA, 682 bp, Cannabis sativa
attggacatgatctcgatgagatcttgttcactggtgttcctccccctgctactctactcaatggcacctctaatccagagtttcttcaatggcgacggaaggatcagcttcttctttcttggttacgatcctccatgtctgaaactgttcttgcctctgttgccaattacaatagctcatacgcggtctggtgcgctcttgaacaaaaatttgcctcacaaacacgagccatctactgttccatcacccactgttatgacagataaccccactgtcatagcagaacaaactttacctagcctcacccaaaccaatgtctctcctttaccatccactattgtctcagaaaacactgttactcccaggactcatccaatgattacacggtccaagaatggcattgttaaaccaaaagcatacttggcaacaaagcatcatttacccaaatcattattaccatctgaacccaaatctctacaggctgccctaaaagatccaagagggttcagttctatgcaaactgagtttcatgctcttaaaaaagccggcacatggacattggtcccaagaaaaccaagtatgcacattatagacaacaagtgggcatacagaatcaagttgaatgctgatggttcattggatagattcaaatccagattagttgcaaaaggtttccatcaa

SEQ ID NO: 133594 - DNA, 603 bp, Cannabis sativa
atctcaaaaccaattggctatgggaggagtagctcattcatcttatatattctattatcttttcacacattagcaatgtaagactctctaacagtatatagtttaattttgtttgcgatgtgttggttaagatctgagtttagatttacggggtaggtatgagagtttgattttccatactaatttaatattataccttatgaattaaaattcattcgatcaatgattgaaatttgggtatgttggatatattgatatgagtttgatttgaaaaaattaatttatggcatatgtttggtgtggtttttttttttttatgaatttaggatttttttttaaaaaaaatagttggggttagggtgtggctggatgaagaagatgtcgacaatagacgtcgacagtctagacatcaacggtagacgacaactgcgagtagtggatctccggagagctcgaggggttgggtgtgactagggaatggggataggggtgaagtggtggctgggtgaaaatatttttaattaaaatatatttttttagttttttatttcaaattatttttaattaaaattatgatttgtactaataagcaattgacatgtg

SEQ ID NO: 133595 - DNA, 1977 bp, Cannabis sativa
gcaaagcagtttcagttggaaactgaaactagagttattgaacaaaaagatatgagcattcaagagttctattctgcaatgatagatctatgggatcatttggcattcattaaattagaagagctactacgtgattttgcaccaccgtatatttctcgtagagaggaacaacgattggttcaatttttaatggctcttcatagtgattttgagggacttcgtggttctatattgcatcattctccactttgttcggttgatttaatcgtcagtgaattgttagtagatgaaattcctctcaagtctcaatcagggaaagactttctctcaacacccaattcttctattttggtagtccctcctactacactatttcctctacaagagaacaaacctcgcacaaaagttggtaatgatgagtgtagcttttgcaaacataaatgtcattagaaagctcaatgtcctaagcttgcaaatcgtgatttgcaacaagaaagatatcagcccacacctcctcatatgagtaactagccataatttaacaaccaaattcgacctccataatttagtactgttgcaattgttcctccatcaggctcttacgattttgttgctctgtcggaacagtttcaaaagttccttgctactcaacctaatgccatgtctgtctcttcttctgtaggctaaccatccattaccacgtcaggtatgtcaccttctacatgagttttcacaccttatgtcttcgcattctacatcctttacttctttgagtcctacatcgtctatgcctatcatgactgttgatggtactccaatgccattagctggcattgatctgttgtcagttcaaatttatcgcttcctaatgtttatcatattcctaactttcattgaatcttgcttttgtaggtcaatggtgtgattctggttattcagtatatttttcttctacttcttgtcatgtataggattcatactctcagaagctgattgtgaccgaccgtgggcgaggcagattatatgttttagatgagctaaggttactagtatttgcaaatcctagcattgatttatcttttttttcatttgtctccttcatattctagtttttatttatggcactctcgcattggtcatgtttcatagtcttgtttaaaaaatttagcttctaaaggaattttaggagatttgaaacctcatgatattttttattgtagtgaatgtaaaattgcaaatttttctgctttacctttcaataaagtacatcttcttctgttgcaccctttcatttagtacactctgatgtgtgggggaccctctcacgtcgttacaaaaaggggttctcgatattatatttcctttattgatgaccacactcatttttgttaggtttttcttatgaaacattattttgacttttatagtatttatgatcatttttgagcttatgtcaaaactcaatatggtgttgttattaaatgttttagatgtgatcaagatggtgagtatactttgaataaatttgtcgatttacttgccttagatggcactgtgtatcaaactttatatatagatacgcctaaacaaaatggtgtggctgaaaaaaatcgtagacacactattaaaattgctcgttccgttttgttgtcatcttctgttcctagtcagttttgggggaaggctatttttactacagttcacctaattaatatgattccgtcttctgtcattttgggtttgtctccttttgaaaaactatatttttgtattcttgactattcttctttaagaatctttagttctacttgttttgtacttcgtcctagtgtagagcgtacaaagttgtcatcacactctgttctttgtgtgtttctcaattatggggaagggaaaaatggttatcgttattttgatccagtttctcaaaaattgtatgtatctcatcatgttatttttcttaagcatatacctttc

SEQ ID NO: 133596 - DNA, 804 bp, Cannabis sativa
tgagaggaaattaggtttggtttgatttgcatggatgaaatgtggaagaggggaagcttaaaatggaggaagagagtttttggagggatgtgggtgtgggacacgtggcagatgagtttgcatgcatgttaaggaatgttggcacgtacattgttatgatatgtgtaagcttttcatatcaattaaatttttgcctcatgtgtatcattattgtcttcttgagtttatctcatctttcattcgatttaattttgagtctcgtgtctttttgtgcccttttagattagactaatgttatttggcattttagtgtctaatattatagtgacgtaacatgttatgagtgcaggatcggctctaggtataagcgaattaagtccgtatttagagtctatttattttggaaactcaaaataaaaaaaaaaaattattagttatttattaaagtaaaattaaatatattgtaaacaacaaatagtcatagcttagttgattgaggtgcatgatatattatacaatgtgtcatgggtttgaatcccataacattttttttaaattttttttatatatatttttaagaaccccaaaatttaattatcttaagcccatatattctcaggatcggtcctgtatgagtggtttaagtggttagtgattatttatattttttagataaaaattaaaagcattttcaccagggattgtttattagagttgtctaatttttaagaataattatatatataaagtgttgctcaatataaataatgatcacatgttttttttttcttttttaaatttttt

SEQ ID NO: 133597 - DNA, 502 bp, Cannabis sativa
  modified_base (89)..(91): a, c, t, g, unknown or other
ttataattaattaaatttaaaaaaggaaagtctaaagtctacctattaataacctactattacaggttaaagaaaaatgtaaccatatnnntacaataaaaatgtaaccattgatgacacgaattattcaaatagtgtttttcatgttattattatggttttagttactagcaaggatcattgcaaactaaacatggtcattttaaattggaagaggtacgtgtgtaaattaatttttttcgttaattaatattataataatgttagtggagtttgaatatcctaaatattcattcatagtaaggtagatagagttttaccaaagaatttctatatttttaccaaagaaaatcaagcatgtagatagaatttttttttcaagtcttataagtgtaaaatgttagactataatataatatatgtaatatagcatatacatacgatatgaaatgcggaaaataaactgtaaccatatcgataatatatgcaatgaaagatcgat

SEQ ID NO: 133598 - DNA, 866 bp, Cannabis sativa
agaaagtaaatccccttctacatgcattgtgtgatataaaatagcacttgaatcgttaatcgtctacatataggttagtcatggtacctggatcctttattgcagcatgtacaagtatccaggtagcttcaactaggaaaacttcaaagtacccctaacgtacatatgtgccttctccctacaactccatgccttcacataactcatctagataccataggcggtaaacatgtccctctgtatgtctttagccttgtacttagttctatctagggtgtacttccccttaataaagtggtcaaccacccattgtactgcttgacggttatctaaatgtctcgcatttaggttacatgtgtatttgttgtgaaatacagtaaccttaaagttgtcagaatgcatcttcttcctccctctcaatatccatttgcaatctagatccttgcatataacgtataacacatcgggggctgccttcttcaccatccactgaacattgttattaattacaagcctagccactacttgtctcagttatttcttattttcataaaaatttccaagttgtatcttccatgattccttactatgtaaacaagtagttagctcatgattttctattatatctttctttgcccacgtaggatctttgaacatggtacaaacttcaaatgatgagaacgttgacaagggtgcatgatgaggagaagcatgttctttggatctaccttgtcgactactgctagttgtaggtgtattgtgatatttattacggtgtcatcgttcttggtgtgtaccctgctttctcggtgcacactcttgttgggttttatgccctaaattaaactcattacaatctgattagt

SEQ ID NO: 133599 - DNA, 507 bp, Cannabis sativa
atctagatcctggtaaaataatatccaacagtgtgatccctgagtgttatcatcatcataggaaagaaccacttcatcttcatcttcaagattgacaattccttttattttatttgttaaaggatccatgacagcaatagcaagatcacaattaagaggatttccggtatggatgcagattagttaagatgtaatactgtaatagaggctataaactaataaaaaaccgtaaccttgggaccgaccataatggaccaaaactgccttggagcaaaaacgacaaacactctttgtcattgattatattttttaagaataggggtgagcataaaatccaaattttttttaaaaaaaattgttcaaaccgacctaccgaacatcgttggaaccgaaatcgatgaaactaaaaaattgaaaaaactgctaacggttaaaaccaccattgaacagtcagttttttttgggtaataaaccgaccgaaaaaaccgaaactgaccgttatacata

SEQ ID NO: 133600 - DNA, 1526 bp, Cannabis sativa
  modified_base (1195)..(1196): a, c, t, g, unknown or other
aatacttacaacttgcaaatattcattctaagggaataataattttttttttctcatcatcacttatacataaccatgaatattttctcatcaataaaactttcacacttttataaacacattaaacatcaatatctatggtgtgaaaaatgatgaataagtttttttttaggctcaaaagtttattgtatagggttaaaaagaaaaaacaaagatgtcaacatttaggctccaattaggtaaaactatggaattacaaataaggtaggcttgaaaagctcaatcgatccaaaaaaaattgcctatatcatatctcaaaatcatgtgtaatttatcaatttcatctcaaatgattatcaaacaagttctaaagtggttgagactttaaattaaaagtcaagcatgcacttatctttccaagcattcgcaaaatcatgtatgaaagtttttttaaaaaaataaagcttgaacagtaattaatcatgagttaagcacacaaatcatgagaatctatcacttttctaaaattataactatcacacaatcaagaattttattatcaacaaaattatttttcacaagaccatgcataagacatcaaagtaaaaatacatatcaaatacgagcaattattgtcaacagaatttcattcaacccacactcactaaaattaaagtaagaaaaattaatatacactaaaaaaaacgataaaaaaataactaaggaaaaaaactggatagatacgatagttaatcttccccccacacttaatataagcattgtcctcaaggctcaatcaaataaaatcaatgcaaaataaaaagaaaaggatatgaaaaactcccgtaagtttactttgtttagcgtcgttagcttgactgcatgttgtactcatgtggtcttcaagtgaggtcttctaacaaagactcattctttatgtacctatctatagaatttaacacattgaatttgagtgtttcaccatcaaattccattctaagtatccatgcttttgtatccaacttcttacttgcagtgagtaagaagggtctctcaaatagagttgatgtaggattggtcacatatatttttgaaagcaaactaaaactaaaactaataacttacatggtggatacaaaagcattgatactcataaatctgaataagattaactcgtggactatgcagaattttnnctgcaaaaccacgtaaaaaaccttgtgttcatattctttattttgatagcttttatttttttctgtgtgaaatcaatattgtgaggctcaaatttggttaacgaaagtctgtgttaacactggtatactcgaaatatcttgcttcatgactcctccccttctttagagctttaatccaacttgtattcttagcacttcttttgttcctagaatgactcacatttaattcaaaacttccatttgttgactcgtctgtctgggggcgacactgttgggttctatgccctaaataaaacccattacaatctggttagttatcaatttagaatt

SEQ ID NO: 133601 - DNA, 595 bp, Cannabis sativa
tctaccaaaataaggagaatagtgtaataccaatgaatctccaaatctctcaaaaggatcatatagtacagtagtttgtgttttttttaattttttttttagtaatttatagcataaatatttaaatttaatttttgacggtaatattacataaattatattttcgaaacttccataagtgtatttggccattaaatgtaaagtcaatgaccacatgacaatttttaattgctcaaagtgattaaatttaattgattgtaaattataatgttttactaattctattccttttaaagaagatattaatagtaggaaaaatagaatttccacaacgacggcaaatccctctaatattatttgagaaaaaaaattattgtacctaaaattagattttggtttgaatcattagcggaaataatcaaatgattcaattgatacattagagaaattaaacgttttacaattagtagattagatttattgtcataatctatggtgtcgtttggtaacacttttgttttttaattttttaattgcaaaatgaaagtaaatttttttttttttaaaaaaattatttttgaaaaaaaaaacgttc

SEQ ID NO: 133602 - DNA, 632 bp, Cannabis sativa
aaccaccaacacacaatacatggtcaaaaatcccttctaaggtatacatcatcttcacaaacacattttttctcaattttatgagaatcaaagcaacaaaaaaggagggaaaatctaaaattttccttgttcttcaacattcaagaacatattcaataaaaaaaaaaagttctataattattcatcttttcatcaaatttcatcaaatcaaagccaaaatatattactcatcatctatacaacaaaatttaatcaccaaacacccacatttcatcaaaaatcaaaaaccccaataaatcactattaaattcagccatggcaaaaaaacaccaagaaaaagtttcaaaacttcatagaaactcaaatttcaagcaaaaacctgtaaagaggagatagaaaacttacccaaagtaaagatgcaatccacaaagctcccaagaattgattcaagctttaaaaatgccacaaatggtactcttctatgcttgggctgaaatggtagtgaagaggagaagaaaaattgaaacttttttgtgtgatttttggagggttttactcttttcttataagccttctttttgcaaaaaaaaaaaaaaaaaaaaaaaaggggcatttagttggaggtaatacaa

SEQ ID NO: 133603 - DNA, 1080 bp, Cannabis sativa
  modified_base (1053)..(1055): a, c, t, g, unknown or other
tggaggcttgaagcggggacgttacatatttaaccgtcagtatattattataaactaatttataaaaacacacatgcagcgtccctagcgcatgacacaaacttaattgcactaaatatgatatttaaaaaaaacttaaaaatatagaataaatcaattatagaggaggaataccataaaaaaagcatgatttttttgcgagatagcaactacagaagttgttttttttttattaaaacgaaactatagaagttaaagcaatactaaaaataattttgttaatgcaataagctaagaaattaattaattatatataaacgaaattaatttcttaatgaaaaaatcagttacaaataccaaaactcatataaattttacatgcttctcagaagctccaagactcgaccatcaacccaccaccaaaggtaaaaccaacacaataatcaaattaaaatcagttacaaacttctaagaagctccaagattcgaccatcaaccatttaccaaaacactcaatatccactaagacaaaaaagaaatagaatgagaatatttatcagtagagttgtcatcattgtcagaaaatcatcaaaaaagtcattagaattgtcattattaccaggaagtctccgaagttagacatccgagttgtcaccagtgttggatgttggagttgttagcgaagttggacattggaatatgagactgagaaactaattatatttatcagctagttgaaaatatgacactaaaaaacaaattatataaatttatcaaataaaaattaaatcttagaactaattacgtaaaataataaaaaaaataattacatctaaagctagttttataatacaatcaactaattatatgatactaaacataataaaaagataaatcaaatacgaaattagttacttaatttatatatatgtacttatttattaaatcacagaagccaattacattaagggctcgtttggaacgtcgtattatgttgtattgcattatattgtattatattgaattgtattttatgtaatatttttatgtaannntatatgtggtattaacttttatgga

SEQ ID NO: 133604 - DNA, 2170 bp, Cannabis sativa
  modified_base (1967)..(1969): a, c, t, g, unknown or other
  modified_base (2120)..(2127): a, c, t, g, unknown or other
taatatatcacatcgtctaatcaggtgagcccatacattatgtccatagtatcatcatattatcattgcctaattagacaatcgataattttaggaactagcaaacagcactttcaattcatagtcacgactttataacggttgccccacaggtacaacctaaatgtcagtatccatatattacattacctactaaagcaagattatgccatggcctgacatccatcatatatataatatgtatattgcatcgcctaattaggcaagctaagcctatgccataacttggcatcatatcacctaatcaggtgtacttatatatcatattgcctaatcaggcaaacccatttcacaatctgaaattcatatatcatatcacctaataaggtgaagtcgtatattacattcatattattactgtctaatcaaacagtcaacgattacaaaacctgtcgtgccatgtggtacattatacttttcttacctttaatccagattcatgtatgttggccaacccaagtggagaaatatccctgatgatctcggccctatgtcacaataatggtaaaccaataagtgtttatccaaaaacattgctttacagctgcaaaggacaacttagggtttcttaccaaattatgtagcataaatacactaaaataaaacttatattttggttctaaaacatataccatatggtagatcttgttgcaagctttgaaacggtatatagaacgtccaaaatggacacttgagtgaaaaattatgacaaaaatacgatttccgacctcctaagaattttaaaaaatggtagaacacgaaaattccaaattttgcactcaccaaaacactatcgaaacttaaccaaatcactccaaactttgcaaggcacatatataccataaatattactatctttacgtaacaaaaattaaaatcgagcccttaaatgaaaaacgacattaacgttcagactaagctttaaaaacttccaaattcaatttctaactcaaaatcacctcaaattcaacaagtaaacatcaaaactagtcccatagctaccaaagaaaaattctataaagttagaaatccatagttattctaattcacgaaactcctatataaaaccaatcgttctaagcttaaaacaaaattaatccataccttaggttttccttctccgaggatttgctatcctgctactaccggagcttatatcgctaaatttcgggttataaatcaaagaaaatagatagaggggaagagaattttgttcgtacagtggaatgagggttttgttgttgggatatattttaccagaatataaatttactaacaagtatgtttattaacatcctaagtgtgaatttctaaaataatagaatttaagcacatagaaagtttaagtaaccttacatttattgcagcggaatatatgactcttctcacttagatttctaacccttgttcctttctatcgcagagtattatcaagatctgagccaattttccttcaggtgtttggattcttcacagtcttgcacactttaatcaaatactagacttgctgtgagtaggaatgccctcactcactgtaggctcaaaaattatgaagaataatgatgaggaaatcgaaaatacaagaagaagaaggaggtctcaagaactctctctagctgtctggcagaatgtaaactaggttatgagagattaggttaagttattggataatgagaccatcctatttcttttatactgtttcacttagggttaggattaaattatatggaatagaaaaatgataaaataatggtatgattaggactaagtggaaagccacatagatgggccacactagttataattttgccattttttaattatttatcttttatttgacaaatgccatattttccaattttaatcctataaatgccaaaacaatttatttaataattataattaannntcaaataaaattgtcatttatattacttattaattagactccacatagtctcttaattaacaaataaacactaaaacctcttttcttcacaattaagtcattgcataatgaaaattcattaataaaacatagtataattttagaattatannnnnnnnattaaaactaattaattgagtcttacaagcaatattgtctcaa

SEQ ID NO: 133605 - DNA, 653 bp, Cannabis sativa
gagagagagagagagggagttgttcattattatttaatgtaagaatgattacatcaaaaggttagtttaatgggaattagttaagtctatttatagtaggactaaactaatgtacagggctagtttagtaaaacaaaaactaaactaattcactgacctctaactatataaactataataactaattgtcataatacacaacagtactttaatatttttattttaatacagatttcaaacctactgtcagcaacattcctccaaattccagcaatgagaggaatacagatttcaaacctactgtcagcaacattcctccaaatttcagcgatgagaagaatcgaaccggtttgactatggggatcatttttgggccactctctttcatccttttgtgtgttttagtggccttctatttttttcagaagaaaaagaagtctcaaatgaaagatgataaaggtaagcacctctttttgttgtcgttgcaaattggttgttccctgaaagataaattaaacatgaaagcataatgaattaatgattgttagctaatgtgttgagcaaacaccaattcgatcacaccagcaggtgtgagtttcttcacaccagaacactcacaggttcaacaactgaacctatgtttaaggaactcg

SEQ ID NO: 133606 - DNA, 1249 bp, Cannabis sativa
  modified_base (627)..(641): a, c, t, g, unknown or other
ttccataaaaaagcaataccaccttttctaccttgggccggcacaaaaaaaactattctcaaagcccaaccgaaccttgagcctatccacaatgtcattgttgcataaagtttcacataggaaaataaagttgggcttcttttgtacacagagatcaataaggaattgaatagcccgtgggttcccaagcccgcggcaattccaactaatagcattcataatgattggtgggcctgaacaccaggacccacctgttccacggtttttggaagcccataagcatcactaccatgaaaactaattggctcagaaatacacaccacatcctctaccactatcttagccgaatttgtagagagagaatcgcttcttttcctcttcaaatcatagagatccatgttatcctctgacataaatgttgattcattttcatgaatatggaaagttgcctcatttgtatgttccaaatttgaatgacctagatgcctagaatcaaggagagaattttggaaatttgcatttgtgacagggatttgattacgctgcctggttggactcacaatcggaggctgcgattgagccttcgggttgaatgtggacgactgtggtgatttgctacctccggcnnnnnnnnnnnnnnncttgccggtccgaagccaaggagaagccgtgagaaattttggcgtcgtgaaggagcacgcatatccttgctatatggctttttgatcgattccggtggcgtatcgtagagttgactgcaaaaattctctgaatgtcccatgatgccgctaataaaacaaaaggtggggacgtactcgtacttgaaatttgcataaaacacatcaccattcttcttcttgaacttcatacgcctttttaatggtttttcaatattcagacgaacacgaacacgtaaatattcacgccaaataccttgaaagttgttaggatccgattcaaggtacatgccgatgtagttccaggcttgacaaacagccctctcggttttgaacccaggttgtaaatcgtggacttgcacccaaatatcaaggttgtttagtggaattgttctcggatttttaccttgtttgagtcgctcgatgataagttgtttacggtcatatgtccatggactgcccgtaagaacacgcttgatatctatttcatggtagaactgaaatagaaatcggttttgctcaagaatcttgatatacatgcctttcccgggtttccataaatccgctatcat

SEQ ID NO: 133607 - DNA, 547 bp, Cannabis sativa
  modified_base (508)..(508): a, c, t, g, unknown or other
acctcacttgtgtgagtttactacttgattacgtacacttgcgtattgttcatatttttcgtaacatttgccaagctatgaatatgtgtttaggaatacacagtttataccaaatacctgttgcataattaaaattttcagtcgagattagggagagatagaaagttttagctttgaatttcccctaaatcccaaaacgatgcaaggcaagtttgtttatagtattcttaagcttcaaaagctttttaaaataccaaatgtaatcattttttagaggagctgaccatatgtcttgatctttgaggtagatggagttaatccatttaaaccaaaggttatcttgcttgtttaaaatggcccaaagaaacttggtcatcatagtaatattccactttttcttttccctaaagccaatgccaccataccttttggaaagacgaactttgtaatgaccgccttagtaattggattagaaaaggcaattagcattaatttctgtcattttatnattatatgtgaatttatttaattgtgaaccccaatattt

SEQ ID NO: 133608 - DNA, 864 bp, Cannabis sativa
attaatttcagtcatttgatcgatcgattttattaattgaatgtatttcatgtatatttattacatttttagaccaagtatttgttagctcagattgaatccatctaattttttagatctgatatttattggagttgattggatcaatccaatccaaaaacaagtaaaattttaatcttaatttttatatatacacatatattttaagtataacaatataaaatctaagtaattagattagatcgatttatacgcatcaacacacaaattattatactaaggatatatttacgtatttaaccaggtattcaagaaaaactaattaactcataaaaaaaactaataagtatatttgttccttatattaccatactattgcctcttaaaattacaatttattaaaaatgtctccaaatttttacgtttatgaaaaattagtatttattaagttttgtcccatttttctatttaaatgttagatatgtgtcattataaattggtatttctatttctcgaaccgaactttcatcactacctagtcgtactcctaaaaaaaattcaagatctttttcttttaataattcttaaaaatgaattcaaatattaaaagataagaaaaaaaaaagttttgaatgactaaaagaataaaaaaataccaaaattttaaaattaattaagacattttaataaattattttttatttaaaattcatttagacaagaaaaaaaaagctatactaaaagttaaatttcatgggaaaaagcttgaatatgttttatcttaaaaaaattaagtttgtttaagtaaacatatatattgtgtttaagtaaacatatatattgagttttttttttaattttttt

SEQ ID NO: 133609 - DNA, 706 bp, Cannabis sativa
tgataattaatgaatgtgatacggagttgcatatccaagtgcccttttattactcatctgggcacttttcttgacattattcgggcggctactgtgcaggagaaccatcttttttggatgaaatgtttgtctagcatttggaagagtttactttggtaatggatttgtcccattaccttgattgggccttcggttgggcatgttgtaattatactgaatcatcttagaatttcatgtgtcttctaaccgaaaacacaaataacatttactccctaagctttcataactcaaagtgttttaaaggcttgcattctcattccaaatggctagaggacaggtggatgcttaaaaagttggaaaccttgttgaattctaggtagactatttgtggttgacaacttctagctttttaaaatgaagcaacatttggcattatttctttggctcgtgaagattactttcatcaatggggtgcgtgcagtatggatttatgagaaaacttattttaccaagatcttatttactattcatgtatgttaaattaaagttaatctttaaattaaggctaatctaacatcctaatatggatactttaaaataatgaaattgacacataagggctttaagaaaaccttacatggattgcagcagaataattgtctcctttcgtttagttctctagcccttgttcctttctgtcacaaag

SEQ ID NO: 133610 - DNA, 624 bp, Cannabis sativa
ttaatgtaaaagattttggtttaggtaaaaaatatatttatttaatttggtattgtaaaaattatgttaatttagtttaggtataattataaattgttattagataaaacaaataattattagttaaatgtttaattattttttatgaaataagtttaatttaattatttaattaagtgttaattaataattttttgtaggtatttgataccgtttgaaaaattatatttaggcattagtggtgatcttgttcaagtaagtttattggtagctttattagacttggacttggtaggttactaaaattgtgttgttaatatacttattagtgaagtttaggtattgtcagcaatatatatatttgtgtattttcagtttatacatatttatttatatatatatatatatcagttgaaaatagtaataaagataaaaaaaaatttatctacttttactataatttgataagtttagctatttaataggtgtcgagttctttgtggttattaaagagtgcacaaaagtagctatttttattggagaaaggtataatcactaaaattttaaaattctttatttagtggagtttgaatatcttagatatttatttgtagtgaagtaagt

SEQ ID NO: 133611 - DNA, 1724 bp, Cannabis sativa
cagatttctgagtatgttttttttcagggcctctcgcgtaagagtttttttttcgtcccctttttgagattgtttgccactatttataattgcatagtggcagttaagtacaaagatgaccaaaatataattacagtcattatccctaaaatcgtgggatctgattacatattatgaaatgtaaatgtggtgtatgattttgaaaatcatttagttgtaattttcccgcttttactgggtcagaaatatcgtgttttaaacacgtctttaatagttgaatctcgagatgtcttgacagaaactagattgaagtgattccaagggcgagctgaaaccatccttcttttcgaggtcgacttgatatgctttacgtcgattgcgggtatatggaaatcttttaacctgccagggttatgagcctcgcttctattagttggatggactatagggagcttcctcgtagcgagatggtcatcttgcattcttgctcttcgagccgattcgacttttatacttagtttgcttattgcaagttagggtatgtgttacttttctccggtgcctcgctattctcctttagcaatatatggtttctcgttgtacactaagtatcagttcgtacattgattcctcgcttaagaccttacagtcagtgggttacaaaatatattatgatacttacgcagttaatgagttattccataaaagatatggcaccgattcacattccctttaccttgacacgtgtcctccaaccgaatttcaggtataacaattgccccttaaaaaatttttagtaaaaagaactttttaataattacggaaggcattttcgccaaaatcttctcttggaaaggacgcctcctttgattctggcagttgtatggtttcgaagattattatgaatcgcctattcatattctgcatgattcctagtcgttagatttctcaatctttggctttcttgtcactgaacttcgtgtataaaagggcggcataagcttgtcatttttcacaaaccttctggctttttagtgaaatccattatcagaatggattacttccttcctgccaaaatgtctcttttgagttcaaaagtttatccttccaaacttatgatacccagatgcaccaagagaataaagtaaaagaagataagaagagaactcaatgtaatataagaatacattataggtatgacaataacataacttgtttaagtgtaagatcatgaggaataattttttttaattattattaattagccttaattaacaaaattccacacctaactccaaacctatattttttttttattttcaattaattactttttttaatttgaaagttatatatttatttttaattaattttattttctacttaatacaataattgtagctagaacagtgtaaaatattcaagttatttaatcctacaataatcaatacaactaataatataatcatagtataagtagtaaaattatatcaaatcaagtacaatgacatgagttcaatactatcaaaagacatgaactttttttaatttaaacttttaaattaatttaataatttgattttttttatttttttctaaacaataatttcaatttctttaatatttattagggtaaatggcggcaaaacccccaaaattttcattttggtttcacttaacccttaaaacccaaatttgggcagtaaaacttccaatactcgtgt

SEQ ID NO: 133612 - DNA, 1048 bp, Cannabis sativa
ttaatttttcactatagtatttatgcttatgatcagggacggacccacatataactgaggtgggacagtcgtcccctgaaaaaaaaatcggaaaaaaaatatatatgcaatttaattagttacaacatgtatttgtaataaaagatgatatttataagcataatattaactttggtgtaatgattaagctacttaatatataggttagaggacaaaggttctaatcccattaaatgcattttttttaagtttactttttttgccccttctcacttaccaaaaaaaaaattatgcctcctcactttgaatcctaagtccgtttatgtttatgattgcagaatatagtttttatatgttattgtatatattgtagaaaaaaaaattatttaatagtatattagtttaagtttatagtatatttatattggtctaatgtatatcgtctgtatgtgatatgtacagagccgtctcaaggtaagaagaggcctagggcaaaatttgaaaagaggtcttatttttttatataaaaattaaaaaataaatattaattaaattttaacacaatattaattttaatcattttatctctatgtaataaatatgttattgtcgtacaaactaatttaataaaataacatttaattacgatgaatatttttattgaagtgttatatattttaatattttttaaaaaaaataataaaaaaaatatataatttttttacatacatataaattttttaaaaaatatataataaatatacattatttattattaaaagtactattaaaaaagtgcataaatatcttaaaaataaaagaactacagtataatttttttttaaacagttttatacaaatatttaaaataaagtattattataaatttaaaatatttcttatcatctttataattttttccacgcatgtgggtaggatcgagcatttgatctcaatgtacatataacactctcttgaccatttgtgccacaagaacttcacgtaatttacttaggtgccgtttggtaatacttttgttttttaattt

SEQ ID NO: 133613 - DNA, 717 bp, Cannabis sativa
  modified_base (37)..(39): a, c, t, g, unknown or other
ttgatactttagtaattgatttcattctctgggcgtnnncccgtggactaggagtgttcgggagaacactgatactacgtacaaatctcttgtgtcaagttacttaaatttctacaattatttttatattctgtctattttgttttgttgctgcaaaactggtttctgccgtaacataattacattctgcttctgcaggcgtatacatttttatattttcatatatattattgacatttgcaaaaactcgatttttcacatttagttataatattgtaaggaatgatgagaaaagaagagaggtcaaacctaacacttataaatattagtaaattgtaataagtgtcatttttctctaatttgtaatttgaggacattatctttgtaatactcatttagggatatttattataacttctcactataaaataagaagcctaaaagcttagtcgaaatccttcttcaaaacaactacttacaaaattcataaaatgaccactgataattctcaaggttgttcactaggtgtaggtccacgtcctcgtttaccacgtaccctgtggcacatctctaccacggcctctactgggtggagaaactactctggctccagcttgtctttgcttaatgattctaattatccttattggaaagttagaatgagggctttcattaaatctcaagatgagaaagcttggaggatggttctatcaggtt

SEQ ID NO: 133614 - DNA, 754 bp, Cannabis sativa
tttttttttttttttagagataaatgaataaaatatagttagactatagtaaaatgaatttatttttgtaagaacaattacaattgtatagataaagaaacattataaaaaagaaaaattaatatgaaatgtgtgaatcaaacaaatcaatacgtaggctttggaaaaggatgaacataacttttgattgctttaagaaaaagaagcgatttagcaagcacatcacctcattttagggggttttgaaagctaatctatgagctaaaagtggcacatttaatggtagtgatcaggttcgatcacatccaaaattatcaatttaatcttcgtttattataatttacaacctaagaatttcaaaataaatgtgtaagagcatctacgaatattaaatttagtgaaacactgacactaaaaaaatattttttatcattatattattttttttttttgataaaataaaatatttttttaaaataatatattaatttattaaaattatcacaattattatatctaattaattacaaaataataatactataaattattaaaagtccatagattaaaatattattttgcatatagtataaatattacattactggagaaaaaatattacattcatgaaatcactaattttttttacaagagtattcgtatagttacaatatataatatccagattaaaatagtattttttttttttgatatgaattgagcgaggataattatcttgtttctttgtgttgtt

SEQ ID NO: 133615 - DNA, 541 bp, Cannabis sativa
gttacaagataggcactattaatatataaagatattgatatacttatttagttacaaccaaacaaaaacattgaattcaaatttaaaaaataaagtataagcacatcataatattatataaccattgaaatttcatttaagtgtttcttaaaaattgtctctaaacgatatatgctaaaaaaaattaagaataataattatttaaaggagcaaactaagtgtagaatctcaaaataccataatacatcgaacaaaaaatattaagtaccaaaaccaatccaaaaaattgtgtatatttcttttgaaaatttgaacaatataattataaaaagctaaataacatagatacatgtaaaaattatttatagatagagaataagaaaaagattgtacaatcatatttaattgatagaaattaatatatacaaaaatcactaatatatatatgggcaagactatggtaggactcaacaaaagtttcctaccggtagggtacttttttcaaatatcaattttaaatcgtgtggttattattgtttaa

SEQ ID NO: 133616 - DNA, 594 bp, Cannabis sativa
acattcctaacacttataattataggtaacatgtttatctatagaattgaatcttgttattatatatattatgagtgattaaaaattctaacattatattgtttgagaaaatttgatttgacagatggtgtgtattttttataattaaaattaataataaaagtgggttgtcatgtttgtgacagattttttctaattattaaaaataatggtgaaagtgatgagttctcacttgtggcaattttttttttttaaaaaaaaaaaaaaaactaatgataaaaatacttttaaaatttctcctacactttttatctccaacttaaaagcatctcttctctctcaatacctctctccttttgtagtaggtataaaaaaagagtatgtgaaggaagaagaagaagatgaattgggaaagatatgagttttgttctatctccaacgtaccatttaaaatttaacaattctagttctatctattcttctctctcaatacctctctctctctctctctctctctccccctcttctctctctctctctctctctctcttatctctctctctcttctaagagaattggtttctatgagaattg

SEQ ID NO: 133617 - DNA, 2263 bp, Cannabis sativa
atacattttggtgttgcgaaattcactcgacaacagtggccatgtaaacactttctatgtcgtccgtccagatcgtaaatgtagtatacttggtaggattctcccagggagcttgttcggttttgcaggtgaactttcccttttccccattcccttgcctattattgttgctcgaacgtttaccattcgagcttgaattgcttgggtaatgggggagctggagagatgtcctagtggaaggagcttttgacttgctaggtttttggccaccttctgctcgctgaatagcctcttcaagtttgataaagacttcaacacagtcaagaaaatgactcatcgagcctaccagaccgttcttccttatgtccttccaaagctcaccaaggacttcaatgcccccaagtatcgcggacaactttccctctttggttactcgtgtaaccttaattgcctccgtcatgaatctgttgatgtagggttggagcggctcgcctggtctttgcttaacttcgaccatgtctcttaggtgcaatggaagttggcgaggaaaattgtgcatggaattccaaggagaaagctttccatgagttgaactttcaaggtgccaggttgaaataccattgctgggcggcttttgagagggtggcatgaaaaattttgtagcatgcgtttgcttgtactccttgcagatccatttgcatctcgaaatacttgaggtgggaaagatgatcttctttgccagtgtacatcttcgaggttggcattttaaacttgtggggcaactctaggagattgatctcgggggagaaaggggttccacgtgctcggtccaactcgagatcattgtttctctcaccggccatgccttggaacatactctttagttcgtccagctgtgcttgcaccactggactaacttgttcagcattttgaccgatctgagtcacgttagtatctttttgagcaggaattcgagcgtgggttccgggctgcacgattggcgtgtcaagttgatcatccactcctctcctcctattcagattgttattgaggttattaatcatccccaacctatcgaatacgaaaatgcctggctgtctcagtgattcgttggtttggctaatgtgttgaccgacaccattaacctggttggaattgttcggtatgacttctctcgatgaattattagacacggtatatcaacctaccacttggcccacaggtgtaccctgtaacaggggatttggtggctgaccatttatagtctgagaggtattcattgctggatcttcgtctatttcacccaaggggattacattcgtgggttgctgcccaaggggattacgattgtcaatgactacatgatgggaccttaacgcttccatctctttgtccgtccattcggcaaacatgcatctctactcttcaaacgcgagatttcccacagcacatagttcctcctaatcatgatgtagggtgtttgtatgaacctgcatgagtccaagagcggcacagaggttctggatcttagtgtcatctccaatggtcgtttgaacattggtagcgggcagaacgactgtgctattgaacaccctagtcagctgctgaactggtattcccagtctcttgcacaccaggcgtgatctcatccacaggagttgtcacatcgcgacccgcaattgatggttgtccaggatttacggctggcggaacccttgtgtttcctggattctgtagtgcaggatccaccgcctttggattttctagatcaaccatgcccctacgagtctgtaccaccatcgtacttgtgattaaatttacaataaagagcgatccttgagttcagctctcaatgaaagtacaaaaatgttgacctcgcttttagccaacgacaatgagtctaattttctaagcaagaagtaggttaatacgatttaaatatagtaaaataaataaagacacaagaattttatagaggttcagtcccgagcagttcggtaatagcctaatcctcgttatttttattgacttaagaacaaggagaataattccttttcttagagctcttacaatagtatctatgaatatgaattcttagagaaaatcttttgaccctctgcccagtgaatatgtatcactatttatagggctataagcttggatatatttggtaaatgaggtatctttatactaagaagaagtatatttggggtatcttagattcttgttatgggttcgcaggctaagtcctattaaatggacg

SEQ ID NO: 133618 - DNA, 1323 bp, Cannabis sativa
aattttttatatagcaatgtttcttatctttacaacattaattattttaaaaattctcttttgtaagaaaaattccaaaaaactcatatggctaaaaatgagtttaaagtttttccaacatgcatacaaaaattagagtattaaaaattttgttgttgagactataaactatttaaaattctttaagagcttcataattataattaaggttgttatggtaaaaattaaaaaaaaatatatatatattttgtatagatttgtttttttttgttggagtaatcgataaaaattaaaataataaaagtaacaaggttacacagtagataaggcatttcttccatctaagaaagtttattgtctatcctaaggatatgtttagccaatctatgatgagagatatgccctagaaaaactagacaataagactttaatatcagaaaagataaccccccattcattcaaaatatatatatatatatatatatatatattttgtatagatttttttttttttttgaaatcagtatagatttgttttaagaaagaggtattggtcaaaattaataaaggaaaaatatcattttaatccctacttaattattttattattatattttaaattttttttagtaataatatgcaagtcttattttgcatttttttaacaatttgcaattaattttattagaataattagtatttttgtcacttgaattttccacactacttaattttgttctaaaaaatatacgacttgttaaaaaattttctttaaaatataatagttacatattatgccccttctattacgttatatttcttttactgttaaaaattaacatttttacccattgaattttgattcatataaaattttgcacttttttattaagaaaaaggtaaataccattttgaatactgtgttttgctaaagttaccaattagaccctctattttgttaaatggaccttgtatttttttaaaattgtacaaatagaacagtgaactgattttttgttaaaataaaacttaataatgatctgatctagagatgttataacaaaactgattatatttcctgtatctgttcgtgttagaaattatcttaaagttgattatattaaaaataatttttttaaaaaaaaatgagcgcatggtcatatttttttttttatagtgttggaactatttttttttcacaacacaattataactgttattaggggtgttcacaaatcatccgatccaatccaatctgcacgatccaatccaatccaatccgcaaaatgcggatatccacacttgtgcggattggattagatt

SEQ ID NO: 133619 - DNA, 2397 bp, Cannabis sativa
  modified_base (826)..(832): a, c, t, g, unknown or other
  modified_base (1217)..(1223): a, c, t, g, unknown or other
  modified_base (1359)..(1359): a, c, t, g, unknown or other
  modified_base (1592)..(1592): a, c, t, g, unknown or other
  modified_base (1939)..(1941): a, c, t, g, unknown or other
  modified_base (2365)..(2372): a, c, t, g, unknown or other
tatattattattgataatatttattaattattaatctaatatatttgttatgataatatttgtgatgatatatagatatatatttttattaagtttgtgatgatatgttgatataatgtgtttattaaaatttaatttataaataaaacatgtatgtttattttatatatatatgtttagatgtttattgtttatttttaatatatatataatttatatttaaaattaagaatatatttctcatacttaataaaatgtatgataaattgtaaataaatttttatgtacatataatataattaagtactataacgtagataaagttataaatttctctattaaaaaattgaaattctaattaataaaaacataactaaaacattaaattcattttttttaaataacttcgtatgacaatacgtataatatcatagatgacactattactgttattatattttagcaaaatacaaaataaataaataattaacaatgaaagttttctatttttagaacttcctataaaaactagtaaatgcatagtaactaaacacaaattataaaaaacacaaaactaagatataaagccaaatatttgtcttactagaacctaaaatagtaaaattattatgaaatattatatataaatatctaaatcactaaattaattattactattaatatttgattgtatttttttattattattatattgatttagtttctcatttttttgttatatttttatataaatagaggttcaccctattggaataaactaatgagaaaaatcttattcatattaggattttatgctctaaataannnnnnnttcaatataatcatatttattagttaataaaatatcagaaattattttatgttgcatagttcacatgattatatgtttaatgtatagattatattaaatccataatatatagttattcataattatagtgttgtctataaagtgggaaataatcatgattatatatttcaaagttaagtcccatgatttgtcagcacattaaatttctactgacgtgataatcaacgataaagtttacttacacattgatatgtggtatgtccttttcaaggcattgacaaagtatgctagtattggatgtatatggagtatacatcgaattggaccgatattgatattagataagatatcataaacttatcgttatatatttctaagtcaatannnnnnngttgatcttaggtcaataaatcttaatcttgaaatggttaggttctggcttaactgtattattcatggtctttgaattgttcgttaaagttaaccaagtggatcttcctaatacttacattttgggaacatggtantacaattgagtgggagtgctaatcatagatatggaatctatagcttctataactattagaagtaaaatgataattttcttcgagcttggcttaacgcaataaatgattgagagctcattgtagtaattatattagtttactgaaatatcatttacaagtagctaaagtattttaaagattaaatacattgaagggtagaatggtaaaattgtccctactcgatgtagatcatntatagaggatctttgattatttaggttgaaacaatgggtaattcaaagtgcatctatttttgatgtatagagtgttctatgtaatcaagagtgcaattctgaatctatagtggagtcaagaggaattaataagttagaaaatttacttggtaaattttggatctacttattgggagcttagttacatagggtcatggtccccacactaattgggataatattattttgtagtctcaactaattagttttgattaatcaattagaattctaaataattatttgtgaatttttcactaagcaagggctttttttagaaaaaaaataaagaggatttagggtttatttgnnnattaagagactttgtaaggtcttattaataaataagttaaatgaaaattttattgataattaattataattattaaatagataaaattaatatttatagagttagaactaaaatatggtatttttgaaagaaaaaataagttgttaaataaatggtaaaattgaaacctgtggtaaattgagagtgtgcccactcatgtgaaagtaatacctcgcataatgaagaagaccgtgtctaaccaaattgaaggagagaagattcaggttcagatcttgataatgatatgctactgacaagaatcaagggctagagatctaaatggaaggagtcattatattccactgccatcaatgtaaggattttttttaatctcttatatttttatttaattattttaggaaattcatatttaagatgttagatnnnnnnnntgtaatcaacatacatgttagtaaa

SEQ ID NO: 133620 - DNA, 1111 bp, Cannabis sativa
acatattaattaagaaaataaaaaccactacaaaaaatgtcatttttgtcagtatatttttgcgtcgacaaaagtttgatattgtactggtaaaatgaaatttacttttaatgtgttggcaaatcattaacgttgatattagaacttttaccagcgcaaaatgaaagcactggcaaaaatgacctttctcagcacgtaaatgtgctggtaaaaattagacttttgacactgtaaatgtacactagtaaaactttgaccttattgccaacgcatacttttaccagcacagtaggaaactacattggcaaaagtgagatttcttgtagtgaacgtaacactcaattaataatattattaattgtttctcatgttatatttttaattattttcaaattattacaaggtttcatgtgaggaggagcttgttgaagcaatgaagatggcaacagaagaaaaaagagagtgtttgtgcttcattgaagtgttagtacacaaggatgacacaagcaaagagttggttgagttctgcttaagaacatcccttttcacttctcgatcacctaattatattttataatcttataaattaattacaataatatctcttattttaatttagtctcaataaattgaacttgtgctaaaaacttatcaatcataatttatataatatgcatggttattatatatatatatatatatagacatgacctttacagaggactactgtatgttatgtataataatattaaaaacaatttgatctacacttttttcgctatttatccccgaaattatacccatatattgattataaattaaattccaatcataaaccctaaaaaatacgccaatttctcgtcgttttttggctgaaaaatgttaagacccgattgacaacgggccttgtcgtgtgggtattgtagcaaggttgaagatgactctactgggacgaagcccacttgcgactgtcggacagtgagggagagtgtggtagttttcagactccattttttattcttttttttcaatattattagaatttgatttctaattcttttggtaatttttaattaatttttgactctgtttaataattattattaattta

SEQ ID NO: 133621 - DNA, 1056 bp, Cannabis sativa
ttttttatttttttttctattataactctatttagttatatcctcccaattagaatataatttactttgtcccaagtgtattattggatagaggttctactgtatattgttttgttttgttgcatttttatgtagagggtgctaattacaatttcttagtcaacttccatatatacttgaaattgtatgtcggaatatttttttcataacagtattcgctatagttataatatcatccatataaatttttaaaaaatccgaatagttatttacagtacgggaaataaaattccagatattttaacttaccacgcataaattattcaaaaaattttaaaaatttacagggatgatattatgaatataactagcactactatgaaaaaaaaaatattctgatatatatgtttgagctcgaagattaattaagagattataatagaagattaatactaacactcatcttttaagatattggatcgtaaaagatagataaagaaaatcatcataatgcaaaataataaaaaaagttatcaatttatttttatgcatattaaaccctattccatttttatttctctcgaccaaaggtactcctaaaaaaattgagtatttatttatattatgacttagtatttttatatattatttatatttgaaactattaacatgtctataaaaataattaattttttttgttaaaaattaaatcttaaaatctttagtaatttatattgtcaaacataatattatttgtgcctattataattcttttaagagtttttggcagctaaaaactctcaattattattttatttgtatttaatctttcaaattcaaattttagtggtaaatttttttaaattattgaacagttagtaaatttaaagtgtcattcgattaactactatcatggtctacttatgtgcatactcttgtacacgttgtatgtttatattggtacactaatattattatttcaaaatttattttaaaactaaataaaattataatttttaaataataatattatgttgtaacgtccccgtttcaagc

SEQ ID NO: 133622 - DNA, 882 bp, Cannabis sativa
gtaactctggatatgattgttttgctggataatgtagttgagttgagcatggatatgttgcatccccgcatcaagaggagtgggaatggaactgcatgaggcatttcttcatttggattttcctcttctttggggacatgaacttcttgttgttgattacgacgaggaggtggcggttgaccatatggatgtggtggcttaaggtggcgcaccatcgtccaatcaatcttccgttgtggctgtacttgattatcataaggatattgtggcacaccattagcaacacacaattcagttataacccctgctaggccaattccagcatgtgtatatcctgcgaccatgttatcaaagctttgcagaattatacccccaactggcacagtaatccccttcattattgcataaacaaccctgagcctatccaatggaaaatccgataaatgtttactaggcataagcctagcactcacaaaaaacatccaagcacgagccactaggttcaattcacagcggtaaggcagttgaggttcttcatccacctcatgcaatctcaaccccggaaaaccaactgtttccgccaagtccacagggtcaaacgtttttctcataaacattttgtagtgttcgctattcaccattggtaagccaaacagtctatggatggtgtcaatgtttacaagcatatttgttttgcggactcttacccttgcattttgctcctcaggccagtttgctagaaattcaagagccaaagtttgattgactctctctggaacatccacgaacttttcccattggcggttctgaatttgttgcctcatggtctcgaataatgggctattcggagtgggatttccatcatattcgatacctcgatcc

SEQ ID NO: 133623 - DNA, 824 bp, Cannabis sativa
ttaaattctttccaatttcaatgtgagttatttttattttttatgatatttgttttaatttcaaatatacgaggttaaatactagttttttccattacgatgttaaattgtttctattttttattatatttatttttatttcacatatatagtgttaaatgctagttgtttctattttgaggttatatagtttccgtttttcgagattaaattgttttcatttttgaagttaaattttttctattttcattgtgagttgtttctattttttttataatagttgtttctttttttttttttttttttataataggtgtttccatttcacataaatgaggttaaatgctagttgtttctattttacaaactatagtttctatttcaacattaaattgtttctattttttgaggttaaatgctagttgtttctatttcataaactataatttctacttcgagattgaatgctaattgttttcattaaacatgaatgataattgtttccgttttagaaattttagtttttattttgaggctatattgtttttatttttcaaaattaaattctttccagttagttgttttcatttgatttttatatttgggcaaaatggtctcttagataataggaataggataagtgatattatagaattgagggaagaaggaaagtttgacacaatagtcttctcttctgccaaagcttctttgcccttacaagattacatgtgtccttactctctcttcatatataaaccttttcttctcttttagttttcaacttcaaatttcaactccattcccattcccgaatctctactgtg

SEQ ID NO: 133624 - DNA, 542 bp, Cannabis sativa
aagaagccaaaccttctctaatattgtgatcctttttcatatcatcctctaactcatcctctatattgctttcatcatacttatggtgttcatcatcagtagcatagccatcatcttcctcgtcatgtgtggtgtcctttggcatctcttcagtgtttttatatgcttcatgattattattattatcttattcagcattggtattctatgtgtgttttccaatgttttctcctatccaaagacaagcaacaagtcgacccaattcttcccttgacaatccctcagtattttcagatgcatcattaccaccctaacataccaatgaagaaaacaacaataaatataatcaccttcaaaatacaagaaatacaaatatagttcacagataaatacaagtttctcaatttgttctcatatcaatttcatccataaacaaaaattaagtgactctttaaatcataaaagggtaaattgcggcataaatacctaatgttttttattttatacacttaaataccgaatgtttatttttggtggcaaaa

SEQ ID NO: 133625 - DNA, 678 bp, Cannabis sativa
  modified_base (64)..(64): a, c, t, g, unknown or other
ctaattctaaatatcaaaatttctcgtaaaccaacaattatattatatagccacattttatatngaatagatatatatatatataattaagggaagggagttttatttataagattaatatatgttaaattatcattagtagtgactatagtaagtggttatgcatcatcacttgtacgtgacaaagataattttttcttttcttctatttgaaatttttgaaataggtgatttttcattattattaattttgtttttggtgtacttttattctttttgatttctctatatacctgttacgcaaattataaacagttacgctaatgtacataatttagtgtatttttatttatacaagtgaagtcgattaataaaaaattgatatcgagtaccactaagcaaaatttatgtttctatttagtaaaattgagaatgatttaacaagaattaaattttaaaaaacagtaatataaaaacaggaaaaaaaaataatgttgtcaaatatagatgaatgcttaggaatatgaattttgttatttcacttacccacactataaaaaattttatttttattcacaacaaaacttgtgactaaaaataaaaaaagttgtaattaattataaattgtcattcttacgttgtgactaaaaagtcggtggctaaagtattagtcacaaa

SEQ ID NO: 133626 - DNA, 933 bp, Cannabis sativa
ataaaatattcatttatcagaatcaataatattattttatttccttaattagaaatattctaatagaaggatgttgtgatcataaagcatgaattttgttagctattgaagctaagactcttattctttctcggtcatattgtaagtctatgtggtttgagaggttggggtcaccctgttttgatttcgaattgtaagcaagcagttagtggataggattttgattaaggctttggatctcttagctctcattgattcttacaatgtcactattagatggttgtctagaattaaggtggaagcatcccataatttggttacttgggcttttaattctaattatttaagggaaacttacaaaaatactgggttaacttttacaaaaatactgtcacacggaaatttttcaaaaatactgtgtttttttataaaacaccagtcgaacacaaaacggaacaactcaaaacaacaacaaaacaactaaaaaacaccagtagaacaatagtgaaaacttaacacagtatactgcaatatgaaacttataaaaaaatacagtaaaaaagtaaaaaatactacctaatggcaaaatttagtatatcatgtaaatttcctttatttaattgacgtgctttggaactatgagcccatcgggtaccaattgtatcatttagaagtgaaaattaggagaatattatattatatatttattttattttattttttttaatttttatttttattttcacattttttaaaatatactcgctttcatagataatgtctttattaaatctcttaagctaatgtaaattatatgctagacttaagtagagagtgatgatatattatacaatctactcataaaaataggtatattttaataaaactaggtgattgttacgtgtcaagccacgtagtgttagttttatttaa

SEQ ID NO: 133627 - DNA, 703 bp, Cannabis sativa
  modified_base (674)..(677): a, c, t, g, unknown or other
ttttaaacagttttttttttcttaattaatgtttaaactccgactccaacttggaccttggaacccgtacttcggcctcggccccagtcctgaactcagagaccacggtctcggctccagacctaaacccgacttaaataaaatcaaaaataataaaaataataataaaagttatagaaaacacttttgttttctatttttaaaattaaaaaacgaaaatagttatagaatacattttaatttttatattatttttttaacaacacatttttattttttaaaaacacaaattttacttttatttttataactaaaaatttaaaaaacaaaaatattactaaatgtatgtctttagttaaattaattagctttttttagaaggtgcatgggagattaggtttaagttataacacttatttaacaaaaatagatataaattcaatgatcagcaggcaacaatcaaaatcactaacctaatcaaatatatatatatatatatgtatatatatatataattggaattggaataatagagactcataccaatatgaatatgatgatgatcatcatcatcaaacaagaaaaagttacaagttacgaagtaataacctctccaaataataaaaccaaaattaatgaatatattaatatattaatatatctttatatattannnntgcctatctaacggcaattcttggtt

SEQ ID NO: 133628 - DNA, 513 bp, Cannabis sativa
tctcttactctttcattattttctctatcatcattttctttctcctcatttttggtctagggcgaatcgggttcaggattttgtttgaggtttggggtttagggttatgttcgggggccggggtccgagtccagatcaggattgggtctagggccgaggtctgggtcaaggttcgggtttgggctgagtggggtccaggtttaggtcaagactaggtctagggccagggtctgggtccgagttcaggtcagggttcgggcctgggtctgggatgggtctagaatttgggtttgggccaggtctaggacgaatgtgagtttggaggccgagttcgaggtccagggtcgggggcaaggtgcaagtgggggtctttgtggtcgggggtcttgttcatatgagggtctcaataaattaaaattaaaaataaaaattttttattgaaaatattagctaaataggatttatgttttaaaatcttcaaaaactatttttttattctcatttctaaaaata

SEQ ID NO: 133629 - DNA, 1631 bp, Cannabis sativa
  modified_base (523)..(524): a, c, t, g, unknown or other
  modified_base (612)..(616): a, c, t, g, unknown or other
  modified_base (729)..(730): a, c, t, g, unknown or other
ttgttaattaagagactttatcaagtctaattaataaaataaattaaatggaaattttatttgataattaattttaattataaaataattaattttgacatttaactggttgaattaaaaaaatatggcatttgtgaaagaataggataaataattgagtacaattgtaaaattgtaattggtgggcccacatcctaatggtcggtcacttaatctcaatttagccatttatttatcaatttttagtgccaaatatttcaaacctaaacctagaaggattcctataaatagatagtgatagacccaaaactgacagcttagaatcattagcctttaagtcaaaattgagtcttttctttttctctctaattttcaaatcattccccctattttcttcttcaattttcacccctcttagtgattgagtacatgctcgcacatagcaagtaagtactcaattatagtgtgtaagactatgaagaatccaacacctgaagcagaatcgggctcagatcttgataannctctgcgatagaaaggaacaagggttagagatctgagtaaaagaagtcatttaattttgctacagccaatgtaaggtttcttgaactnnnnntgtgtttaaattctattgttttagaaattcatgtttagggtgttaaacaacatacatggtagtaaatctaggttctagtaaaataatccccaacaactagcctcagagccatnntaatgatttactttcatgaaataaggatttaaaaaaatgattgtgttgaattggatgtgttcatgttggtttatgtgcatattttatgattgtatggaaattgcaattttacgatgataaatatttttagtttcgttttgaaagtattttttttttgtgaaaagtagatgaaaaattaataaattaaggcttttataaaattcaatttagttttttttatgaattagttatgattttttgaatttagaatgaaaatatcacaatcaggtgcacacgtgcgcgcagatgggtcgagacaccttggttaagattgagcttcagacagctcgtgaccgaggcatctcagatcattatgactgacttgttgacatatccaatgatctgattttaatcatagtccaattatctatagatcttgtaaataatttgtaacaggtaaatttagtaatttatttcatttgtgaaaaacctagtaacatgataatgttcatccaaattatttgacttgtgtgagcctatatgtttgctcttgggcttagatgcatataggaagcctatttaagtttacttaattaaatagactaggttgttaaaataaaatatcacattaatagttttatttaagcccaattagtattggacttattcaatgagttatttaattaatggttaaatttctctcctttaggccttgtgtgagagttagggggtcatagtagtgggtacgatatactgaacccagccctcccacacacaaactacctcaattgtgaagacccatttaacttatttaaataattatattagtttaacataattaaaattaaattggcaacataactaattttaaaacaaatttaatgagatatattctagatagttatttctagtaactaattat

SEQ ID NO: 133630 - DNA, 581 bp, Cannabis sativa
tttattttattgggcttttgaaatttatccatcaacatgtagcactcagtactcacccagctataattatgtacaaataataatccaaactcagaacaaatagtaaaaagaattaacatctgtgttttgattaatcaagcctaatctctatgttcaggtcatgataacataacagaatccatgttaattattatacatgagaaaattaatataatttgaaagatatatatacacacactatgtctatgtatgatattataacattgacatggatatgctaattcagaggaattaataacagaagcccatttgtcattggttataaaaatcttaatttgaccagcatatgttgttttataggaacttgtctctaagtttaataatttccttaacaatgaagcttgttatctctagtgggttgttgatcccaaccaccaaagctttcaaatatcaaattaagtcatttttgtcacaacagtacaataattaaagggattttttcaataatgtacttaaaatataaactatttactaaaataccttaataaatcttaattacaataatactttgccacgtcatt

SEQ ID NO: 133631 - DNA, 588 bp, Cannabis sativa
tgggccatgggccatggttcatggttcatggatatgaatatgaccatttcttaacagaatcagatccaaatcctatgtgagatacagcagccgatcctaattttgagacactgaaaattttcagacatttgttgaatgcacccattccaatacgaggttttgttttctcttactatattttgttttctttttaaaatggaataaattccttgaaccaaacaaacataacactaaccaaatcagtcgacgtaattgcagatgcacagaggatggattacgagtgtttccactattaaatctaattcaatcttgctcaattggcttcagaagtaatttcttttgtgcttataatttctagttcaacgacattttcactttaaacaggttattttttggagggcctacaagaatagggaatttactcataactttaattttatatataatttttttattttgattttcaacaatttatatttaggtgttagtatgttgttagtagccaaaagggtaatacctttggctagttattcttagtaattttattgttttttattttttagcattgttgagctagtgatatgagtt

SEQ ID NO: 133632 - DNA, 2417 bp, Cannabis sativa
gataaaaatagcaaatattttcatgcttatgcaagcactcgaaaatgcaataatcaaattaatgttttgcaagatagtcgtggggttctgaaagattgggattcgggtcttgaaactgtcatttctgattatttttctgatctctacactgctaaagtttcccagtatcattcagttactaatggggttaattgctcggttgacattgctcaaaataacgatcttctacagcctatccaagatgaggaagttaaacaagctctatttcaaatgcatcctgacaaagcgccaggtcctgatggcatgggtccaggtttctaccaaactcactgggcaactgttggtaaggatgttatcaagtttgttaatgattttttcatcactggtcattttcttgctgggattaatgagactaaccttgtcttgattccgaaaaagaagaatttctcctctatggctgatcttcgtcctattgctctgtgtaatgtgctttacaaagtagctgcaaaagtccttgctaataggatgcgacatattattgacaaggtaatctctgacactcaaagtactttcattcctggacgtcttatctctgataatgtcatggttgcctttgaagtcatgcactgcttaaaaagaaagatgaaaggaaaaaaaaagttttatggcaattaaattggacatgagtaaagcctatgatcgtgttgaatggggctatcttcaggctatcttgtctaagatggggtttgctgacagatggataaatttgatcatgcaatgtgtgtcttcggttcgttattctgttgtgcacaatggatgaatcattggacctattgttccttcccgaggaatccgtcaaggcgaccctctttccacttatctctttatcatttgtgttgagggattctcctccttgatacaacaagttgaatcaagagctagtcttcgtggtattcgtgttgctaaccgcgccccgtctattacccacatgctctttaccgatgatagctatttgttttgtcaagctaccaccgatgctgccaccaatcttctccatttgcttcactctttcgagaatgcttcaggtcagaaagtcaatacttctaagtctaatattttcttcagtccgaatacaagctcctctatttgtgaaagcatttgtagtatcatgggcatggtcgaagctttcgaaggcagtcactacttgggactccctaacatcattggccgaaacaagaattctattttggggtttttaaagaacaaagtcataaaccgtttgaatagttggcatgataaatatctctctagagctggcaaggaggttcttctcaaaacgattatccaatcacttcctacttacgccatgagtgttttcctcattcctactggtacttgtgatgagattgaaaagcttatggcctcgttttggtggaaaactagttcaagcaaaggaaatgtgattatatggatgtcttgggagagaatggctacacataaacacctcgggggaatgggatttcgtcatttaagtgatttcaatcttgctatgcttgctaaacaaggttggcgtctcttatgcaatcctaactctcttgctagtcgggtctataaagcaaaatactttccccactcagatttcctcagtgccgaccttggctccaaccccagctttgtgtggcgcaatatttggagtgctcaaaatcttctcaaacttggagtccgacgcactattcgtacgggtatgcacactagaatccttgatgctccgtggcttcctaataaggacaatccatatgttacaaccaacaatcctgggctcttgaatcagaatgtttcggcattgttctcgattgattcaccgtgttgggattatgatttttagtctcatggatatgttcaatccccgagatgctgctctcatccttggcctcccgctgagtcatactcttgatgatgactgttggtactggaatggcgaaccaaatgggagtttcagtgtaagtagtgcgtactctctgctgcaacaaagcaggtcctctagacctgtatctaacaacttcgggttctagaaagagctgtggcagctgaaaataccatcaaaagttaaaaacatgttgtggcatgccttgactaattgcctcccaacttgcctaaatctcgtcaccaaacatgtaaatgtgtctatcctttgccccatgtgtgctacacaacccgaaaacacctctcatgccttgattgagtgttctttggctactgcatgttggtagtatcttggtgttcattgcccgactcccccaggtacttttgcatcttggtttgaactcacatttacttcttctacaaccgaagatatgtgtaaaattgctatggtttgttgggcattgtggaaagtgcggaataaaaaagtgtggaag

SEQ ID NO: 133633 - DNA, 758 bp, Cannabis sativa
  modified_base (654)..(659): a, c, t, g, unknown or other
tgttttctgaaaactgttttcaaaaaacaatgccaaacacgccaaatcaattttctgtttttaaaaacaaaaaacaattttttagttatgatgccaaacatgcactcggtctcctccctcacaaatttttaaaattctctcttaagcgttaatggtagataggactaaaagagaaagagctccttttttttggcgtagatggtagcttcaaatttgctcaacatcagtgttgggaaagatatcttcattctttgcgactaaacgagaaaacttatttgagatttcaatttaaaattcttttcttcaaattaaatttggttttgagctttaatattaatgcgaacaacactgatatttgttcggtttagtttttctagaagaggtgttgtgttattttatttttataatgttgtaattttctgttatcccatatttcgagtaacaaatatggtcacgacacgtgttaaaaggttcaaaaacgaacgtgctcgaatattgaagaaataaatatgttaaataactcacctcggagaatacaaattgtaaacgtatttaaatctcttcctaataaattaaggagagttataaataccgactgtcattttgtaagaccaagaagttaaaaaaaaaactaagggcccgtttggcacagcnnnnnnaaaagctaaaagctgcttttcaaaaaagctgtgacaaaaaggtgtttggtaagcagttaaaaaacagcttattgaagaaattatggaaaagctacagct

SEQ ID NO: 133634 - DNA, 526 bp, Cannabis sativa
tatatgtgtttatttatatcattttagaagttcatatttagggtgttaatcaacatatttgtgagtagatttaagatcttcgtaaaataatttccaacagagaagtcatggaaagttcaaggtatagattttttatcattctcttatcaaaacagacaaagtggattatgataacaaggtgtggcataagatgaatacccctaaacaagctataaatgatcaaattatgtcaattccttctgatttgtatccagtgtatgaagctagtagagaatctcattgccatttatttgtggattgttgttatgccaaaatagtatttactgaagtcatcatatggctcggtttgcatcagtggtctcatgattttgaagattggaagaggtggttctctaaatctcttctcagctcgcaggataaagttgttataggcataaatctaccctccccgcgagaaagacttgtctatagagaactcgctgtattgaaggtggctcgcaatattatagtactcgcagtaccgaaa

SEQ ID NO: 133635 - DNA, 508 bp, Cannabis sativa
taagttagtagtgtccaagattgagagagagagcttctgtagtgaagagagaaaccagagaaaaagagaggaaatcaccatgattattgctgaaatttttagctagttcttgagttgattgagggctgtaaaaagagattgttcaatcctgaagtgacttctctcagtgtgagctttgattgtaattcttgtattcgtgattggtgatttcaagttgtattctttctctctctcaaatttcattgcaatgttatgacattttatgtttcattcatctcaaatcaaattcattctttcattaagattcttattctggttttgattacatgattactgtcattgtaaattgttgtccttgaatttgttgttatggtgatcttgatcaggtttattatccgcaacaaatggtataagagctggtatagctcaagaagatcaagaattggttgatcatagattcaaggtttaagaatggcaatggctaagttcgaagtcgacaagttcaatg

SEQ ID NO: 133636 - DNA, 656 bp, Cannabis sativa
  modified_base (77)..(77): a, c, t, g, unknown or other
atttgatacacctgaggatgagatcgttaaaccatatgggagcttcatgcgggcgcaaccacgaaggaaaaattatntattgagctctcagtatttgcgtacgggtacggagttggatgaacaatttgcccaggcgtctccggtgcaacaggaagatgaattcgatcagccactggtgcaaggtgggaagtttccttgcttggaattcgacagtaatcaacagtcaacggacggtaatgatgttcctggtttgggggttgatgggaatattcctattagtgagaatttgactaatcatggaaacaaaaagaatgtttccatttctagtgctactgaaagaggaaagtcggttgtttttggaaatcatgtgcaaggagggaatgggcagccttctctttttcttggtggactggtcgggccacatggaggactagggggtcgtgggccttctacagattctaagaaaagacgtcaacatgaagggataggtgggcctgaatatgttgatatggatgcggaggatagtgttgaattggttgttgatggaccctcaaaaaacgggttcgaggtgggctctggtttccagacccaccgggcattatgagtacgttaagttggaattgtcgtgggatgggcaacccacgagcgatacaatt

SEQ ID NO: 133637 - DNA, 776 bp, Cannabis sativa
  modified_base (490)..(493): a, c, t, g, unknown or other
tatatatatatctatatataatcatgtaaaaggtaaaattaatactctcgtacgtatttgatacacattcaataaaaaacacttctctttcttttttgtttattcgaataagatctgtgaattggatcgagctcaagctatcctcaagatataggacaaaaacagtggagctaagaaggcaaaaaagatacgatgtaattagctcgagttataacaccaaacaagtggtcttggaatttgggtgaatccttgatgagtcttggatgggtctttcgagaatgttaagcatgaaggtactacctaccctcggcatctaggggaggtgacccaccggtagtatctcggcgaacattgggattagagcttttatggttatacccaagaaggtatggccattttaagcagtttgagggccttgagcgaaatattaaaatctcgcctttgattaaaaaaaattatcaatcaatattttataaatttaatttttttnnnnaaaaaataataaataaaaaaaatacttcataaattttaaaataaacaaaaattttagaataatatatattaaaagcacaaaattttattagtttttttttttttttgtaagttcatattattatctcttatgaatatttattagggttaagttaaaaaatacctttttaagtaacaattaattaaaagtacctgcactttaaatttgattgaaatatacccaattttacaagtacattacccaatatgccctccacacaagtctccttcatgtttcagccata

SEQ ID NO: 133638 - DNA, 589 bp, Cannabis sativa
actggcttcagagccatggtaatgatttactttcaagtaatatggattaaaaatgatgaatatgtttattgtgttgatttggatgtgttcacattggtttatgtgttatttgacgaatgtatgtgatttacaaaaattttctatgaaaataattttatttttattctgaaaatattttatttggattccttgtgaaaaattaaataattttggtttttacagaactcgattccgataaaaattgataaagttatggttgtttgaaaatctgggtacacatgccccaatcgcaagcaccagtcactcgtacaaggtgacatgcacacgtgcatgagggggacaaaagctatctgaagcttagggtgctgccttgctcggacacgagatcccttacccaaatgctgcactttgcccgtgtcccatgatgcaggtgccgagaattctcagtgtgagaccctacaagtctctttctcgcgcgtgcatgagggctgccggcagcctctcgtgggctgcaggtgcaccttcaccaaattttcaaattttttgggatttttctaattttcaaaccctaatatctaaataaaatatt

SEQ ID NO: 133639 - DNA, 1492 bp, Cannabis sativa
gacctcagcccactagaaacttccttaaaataattcttcaatcagctcaggaatttctatttctgtacctacagaatcgtgggcagtaagtacaactttcgttttacagaaaaggaaagtttagctccggttttctcttcaagaaatctgatctaagaaaatgagaaactcacacaagatcagaatatatagctggttatataagaattaattgtgtaatcaaacttaccatttttaccacaatttccataaataggaaagctagacagctttctttccaagtttggatacacaaaataaggtaaccaaattaaacacaccagctgaaattaataaaaaataataaaatatttttgtcaattaattatgtcaaaaatagaattaacaaatagtttttaaactcctttttctcattcattattgtcaccaaatagaatttagaaatttaattgtttagtaattaagtactgttcttgcaggatcgatcttactcttgtgagtctattacttataaacgatacctcatcatgtattttgacaacacatcaataatattaactaatattgttgagaacatatggctctatctctcctccccaaccattgtttgtgaagtttgttcatgtattgacatggaaaagaagttaaaaggaactcaagttcaactcagcattagaggtaagtcttgtttaatttatgtttggcttacaacttaacaaagtgatctcttcatgaaaaatgacactaaacaatgatcactaaaacggcacaaggcaagacccaccataattcaaattcctcaaacaagaatataacacattccaaaaacaaatgctttacagcaaattaacgcaacaacatggggatcacaagcctttgacttttgtaataatgcattttatcattcacattcacttttcctaaccacccaatagcctttgatttttgtaggaataatatagggtgacaagtcagggttctaaacttccaatatcattattacaagtgcaaacaaggagtagtccatctaccttatatattatagctcgatcaatcttagacagctcgatcacaagatattttgagctcacaacggatcacaatgaactcttttatggttcgtctttttagactagtagcattttgaatcggatactcgttagagtttagtttggctctgattccatgttggaatttgagaagtgtgcggttaaagtgcatgagattttatctcaaaactaattgacaatgagaggagtaactcatttaccttatgatatccagctaccattttaaaatggctactcaatcatattaccaataagtgagcattatttttggctagaagattttggatgatcgtatataaatttaattttccacatgatatatttagtattaactagggtaaatagcggcataagtactcaaagtttaaagtttgtaagtggcatactcccaatatttaattttagcggcataagtacccaat

SEQ ID NO: 133640 - DNA, 768 bp, Cannabis sativa
taagagatgattaactgtttaacaatttgaaattttcttacgttcacgattattatagtgtgatttagatcactctctaaaaaacaaaatatagttaattgattgtttagattgatcaataaatattttaaaattaaatttttaaaaattattggcgaaatatctactcttattagttatttctacaattcacatcatcatataatattaaaaatagtttcgaaaactaaaatgctgtaaccaaaaattgtaaaactaaaccctactgtaaaattgtcctataatgattgtatatattaataaaagagcatagttcttggatataacatataaaaatatttaaaatagttataatttcgtgccgaaaaccgaaatgctgaaaccgcaataatagtaaaagtaatatttttcgtagaaaaaaaaaattaatataagagcatagttcttagatactatttattctaacactattatgttgccattatgaaatgttttaattattttaaataataattattaaattaaaatatattttacataatatttaataaaatattattaattattattaagtactaataatgtttattaaaaaaatattttattattagttagtcatattctataaaattattttattataaattatataagttctctatctaattgtattaatagtgatataacatattagagaattacactactacaatgttagcctttagaggcagttttttcaaccccatttataaaaagggaagctaaagg

SEQ ID NO: 133641 - DNA, 656 bp, Cannabis sativa
aagaagaagaagaaaaagaggccatttggaagaaaatgagtgatgaatgaagtttggttattttttctttttggcttaattgcttatgaagggtttaaggaagagagagagagagagtttgtgacagcttttcgtttgtggatattttttcttttaattttttactgagaaaaacagagttggattaagtgttgtagatgagtgtatttatatataaatgaaattaaatatgtaatgcattgcatgggagggagcaggaaaaagtgtttggcaaatggcaattgtagggaaagagagggaaaaagtagtgaatcgcacggcaacgagtaacgaccattgaattcttgaatgtcaacgctttattattttaattcatttttctattcttcttgccgtctaattccttttatttatttatttattttcaattatttacttgaaatacatgtttttcttaatttgtttctttttatccaagtcattttgataattttttcaacgttagaaataattagattcatataacattttactaattgattaaaagatatttatatgattcaaatctataaaaaaaataattagattattcacttttttttaattactaaattattgttatatacattgttagtatacttagttatatttttaat

SEQ ID NO: 133642 - DNA, 1303 bp, Cannabis sativa
atttttttgaaaagatatttagttgaaacctaatttttcaaaattgatggtttaattttaaatttttttaattttttttttaaaaaccgaaaatatttttttattattttcgaattgtttttatataataaatgggaaatttgatatattatgctaaaaaatgataaaaggtgtttaattataccaaaaatttacacatagtaaaagggtgtcaatttttcaatttccttccaaaattacccccatcctttcactttccccctttctctctaacaaccctctctctctctcctcattcactctccattcgaacatcaccgtcgaacccaagaaaaaccattggaaccatcacccacctccctctccgtttgaaccaaaaccctccgccgtcacatacatttgaaccacgacccacccacgaacccacccacccccttgatttaatcagacgccccaagaaccacccaccccttcgttttgaagcagacgacccacgaacccgcccaacccctccgtcgaacccacccacccaacttgcaccgtcgaaccagcaccgtcaaacccacccaccgcactcgcaccagtctcggagcaccgtccctgccactgccaccgtcccaatcgagtaaaagaggtattttttttatatttttttaatttatcttagaaatatgccttaatttgtggttaaactgaaattgttatttagtatgtgttttttgtgataaattgtgcaagaaaaatctgggaaaattatgagttttggggtaaactcttttttcctgatgttgtgttttttgcgacattatgcaatttatatgcgattttcgccaaggtcaatacatttaggagatgtttagcaatttttaggcggcattttgcgatgtttgtgcgatgtatggggtatggaataggttgtgcgattttgcgatgaatgtgcgatgttaactgacagaaacttgattttttagttgttttgttctgcatttttttagcgatattatgcgattaatgtgcgatatttatgcgactctaattgacagtggcctattttttgctgtctttatgcgattttaggcgatgtttgttcgattaatatgcgatataatctaattaatctttttaaatgtagatggctcctgaacttattctcccattgtcagagcactttccaaggcgtataacatacagagggaactgatactttgcttcaataaaggctaaatttgaagcttttaacttgactctgaaggtgaaggagacgccctttggtgtttttcggaatgccagtgaattgaaattc

SEQ ID NO: 133643 - DNA, 671 bp, Cannabis sativa
ctccaattctcatggcccctcatgagaattgagtgtaattacaaaaaaaaaaaaattattttaaacattagctaatgttgatgaaatttttcgtcaacaaatttaagaagatcataaaaataaagaggaccgcaatgaattaatttgactaaataaaattgcaataaataaaatagacaccatggatttatagtagttcactcccatgtcgcgatggtaatgaggctacatctacatttatttttattaattagatccgacacacaagagttatgttctcaagagtgtggacaataatacaacaatgaatttctaggtgaaatctctatcgagacttatgaaaacaagactcataggagactcaatattcataaacctaatcaaagttggtgattataaggttcttgggaacaataaaccaataaaagtaagaaaagagaatggtctctgttcttggaaactgtgtatgtcaatggtgtttgagttgtagaagcttggtgtcgacaaagtatggaagccttaggaaaaagatgaaggaaggaagtaatgttcttagcagtcgtcccataagcaagcaatcaattctctttaccttaccctattacacttctttatatagaccttagggtttgttaatgatcccccacatgtcggggcgtcccattaacaaa

SEQ ID NO: 133644 - DNA, 1125 bp, Cannabis sativa
acatgaggcaacaaaaaaataagcgataaatacacacactaaaaaaaattatacttttgtgattaaaagtgaaaaaattgtaattaaacataaactagcattcttatgttattactgtatctaaatattattttttaataacaaataatattatgttgtgactaaaagtgataattaatcataaaattaattatgttgcgaataaaatattatcgtaactttttcgatagtgatattataaattatcacaagaaagccatatcaatattttattaatcatctcatctaaggttcatataaattcaaattcaaaatttagaaactaatgtggaatcaaaatataggaatatgaatgagaatgaaaatataaaaataggaatgtaatacaatttaaaatacataaaaaaattgataaaaaaaattattatattttttctcttattataatagaatgctctttcttccattttaaaatagaatagttattctattaaaatagtagaaatagcattctaatagaatgcattccaatattttaaaatgtaccaaataaaagaatgaaatgaaaattatttccttttcattctattctattttattaactctaaccaaacgctacctaaattcaaaaagatatatttgaattcattcacaccaaaataagtaagtttcaaattaagagattcacacttaaacctaatcttaaagtttggccattgccaatcaacctccatgtgcaactccaatgcccccgatctccatgccttggcaaacaacccaatagtaacaagaaagaagagaaggtaggagagaagaatattaagtaaactaaatataaaaataaatttatgaattaaagtaattttgtttacacatcttttttagtgtaattaatttattaattaaaaatattttttgttcaaaaaatacttttattatgagttgagctaatgaggatgtgacattatgtgtggatccgatcaaaatttaaccgaatggataagttgtcgttaaattattttatttatttatatgaaaaaataatatttggatatccaaatactatatatatatatatatactagatgagagttacgtggcgagccacgtaaatattagttatat

SEQ ID NO: 133645 - DNA, 942 bp, Cannabis sativa
aatctagatcctagtaaaataatctccaacatggagaccgtaggttacattgacatgtactccttctctcactcactattttaagaataatgtattttagttattagttttgagaattaaatacatattaactcttttgagaattatgattaatttatttataatgaaagccttaaattataaataaattacctgtcataattatcaaataatgatttaaaactcttttaaacttataggttaattttaatttaccaagttaattctaaaattaattttagctcatttacatgctttcagtttcaaaaataataaagacataaacacgtaggataatcctaatatatcatgttttttcgatgaggtgcatgataattaaaactgtgtgagatttctatgtatggcatattattcactaatttatgattatgtaataaatcaactattaatgaatatttatctaagaaataaataaataatgatagacagcgtaccgatcgggtatttctaattttacaatctttgaaaaatttaaaaataaattacaaaatcatgctccgtcttctttattcactctatgggtaatttggtacgtttttaggatcacttcaagcccataaactagttaaaacactttaattagtttcttcttaaataaaaaaatatttaagacactattcgttaagtccataaattaattaaaaattttaattaaattatccttaaataaaaaaaatttatttaagataattttcatagtattttattttaattatttttaattaaataataaaactcgttttattatttaatttagcttaacacaatttttgtcttaaataattaaaagtgtttttaaattcaaaatgtgaatatcaaatacaaaccatacataatatctcattttaattaaatataattaaaacaaatattatttaaaaa

SEQ ID NO: 133646 - DNA, 521 bp, Cannabis sativa
  modified_base (419)..(435): a, c, t, g, unknown or other
  modified_base (496)..(496): a, c, t, g, unknown or other
tttgccaacacatcataagtaaattctattttaccaatgcaataccaaacttttgtcagcacaaaaatatgctagcaaaagtaacatttcttgtagtgatttgttatggttacagtattaaccctataaatttttaaagttttttttttttttgaatagtttatagtatcgaaaataaaattttcgatatttaaatttaccacgcgtgttcagaaaactccaaaccttatcaacactaaaatatttgaaaattttcaaattttataagaatgattttttagctataacaaatactgccataaaaaatttttaaaaaaaaatatttcaacatgcatttttaaacgcgcaagttgagaaagtgttatgatatgattattaagcactcccaacaagtgttttcactacaaaaaatcttactnnnnnnnnnnnnnnnnnttgtgattaaaagtaaaaaattgtaactaattataaatcattattcctatgttgtgactanaaggtccgtgactaaaagtattagt

SEQ ID NO: 133647 - DNA, 531 bp, Cannabis sativa
aagactaactcagattagattgtaatgggtttaatttagggcataaaatcccaacagtttagtctagccaaaacttcactacaccatttcaccctgtttgaaggagtcaaaaacaagttataccctgcagaaatagagtagttttgtctctgaaaagcttcagcatctgttaaaattcgaatttgatctttgagggctatcatctttttccaataccaactagagtgtactgaagctgagcagctccaccactcttggtcactgatatacacaatatgaacccaccttagccatagactctcttgtgtatttgagatggcccatatgtatttgcacatggcagcattgttccactgcttcaagttcttgattcccaacccaccggagactttaggttgacaaatatttctccatgcaatcgaccctgctccatgaaatacagcctgccctttctaaagaaatgccctacaaatggcttcgatggatctcagaactttctttggaaatatcatcatttgactccaataagcc

SEQ ID NO: 133648 - DNA, 1150 bp, Cannabis sativa
tctctctctctctctcttttatttcatatttccttgaatggatttgatttatagattcgacgtctttaagatgcaggatgattttctttccaatttggatattccatgcagttgttgcacggggaaggttctcattgcctgctccatcagttccacataatcgtcatgtatgctttcccagattctatttaagttctactgcacatttcataagaatgattgtttaattaagtttttggagatgaggatgtgaatatcagctttattttacttttcttgacagtgggcaccttgtcatgctgttgttgcaacaccattgctagttgcatttgaattgctcctttgtatataccttgagagcattcatggtaagaactaatgctacgcaatttttcagagccaattgttggtctcttgttattcatgagtaatttgcatgaaatatgtagactacactgaacttttgaaatggatctagctcactaattgcttgctattattcatcacagtgataactttgtattttacaagtccagactgatgatgtatttgtgtacattgaaaaaattgcgagtaataccatgcatcctttttctcacatttatctgtttcatactcttacagttaatgattcagcagctgttaatttgaagattgtttttctacccttactggcatttgagataattattctaattgataatttcaggtaactttctttcataatgataatgttattctttctccatcccttgcctaacctcattatttttctgcatgccttacgttttttcatggctttatttgattaattatgctctagttcttgccttcaccgtgttattttcctttgcagaatgtgtcgggctttaatgccaggagatgatgaaagcatgagtgatgaagcagtatgggagacacttcctgtaagtcatagtaaattaaaacttgttaaagctatgctaactgccgcactttacattatccttttatgggggttataagtgcttagatatactttgcatttattttatctaacatgttggaaacaaacaatgagattaacaaatggcttcttaaacgaagtgtttttgaaaacagatctgctttcttttttcttttttccccttcttttctctctctctctctc

SEQ ID NO: 133649 - DNA, 811 bp, Cannabis sativa
cataagaaaatcttaatcctctcaggtcccgttaccttccaaagagaactccatagggtctcatgaagaccccgatcacgtatacgagccaagaacgcccttttaactaaaaagaaaccatccggggcaaatttccaaaaaagctcgtccttcgccacaaacgaaagccgagggacctctaggacatctttaaccactccagggataaattaagaatcaagagcctcccagttccaatcaccacttcctggggtgagtaaggaactaatctgtacccctttttcacaaattcttggattgaaggaagctacgtacctctcccactcatagccgggtagccacggggaatgctaaatatccaccaacgcaccattcccaatcacgaaacaagactcatcccggatgaactctctagtggacatgatacttctagctccataagaccaggagttagacttgggagcaatccaaaaggaactagatcttctaaaatacttatccttgaaaaattggcaccacaaagcattactctcagcagcaaggtgccaaccgagtttagccacaagagcgaagttaagatcctcgaacttcttaaagccaaaccaccccaccgtttagcgacacaaatcgagtcccaattttgatctttttcttgatctgttgatttaacttaaatgttcttaatgagcccatgagttcttcaaccttcattttgccaaaaattttggcctcttccattgctagcaattttgtgtcaaacctgtcaaggagcacacgaacaattttttgaaccaagacagattcgtctaat

SEQ ID NO: 133650 - DNA, 905 bp, Cannabis sativa
  modified_base (849)..(860): a, c, t, g, unknown or other
ataaaaggtactattaaatttaaagtgtaatttagaagaagagaaatttaatataacaaatgtgaaaatgaagaataaagagaatcaatatattagaagaattaaaacttgcataaacttacacttgagtcttgccaaagaaattagcctagaaaaggcattgtctttacaccaaaattaataaagcaaaataaagaagaagaaaagaaaagatataattttggtataataactttaggtaaaatctgatgctttttacaataacaaagggtgttatttatagtgaaaattggctctccaaaatggtatttttcgtgtaccatttagtgggatagatggctaaaacaactactgaagtggagtagtgttttctggttgcaattgatggggtccgcatctactggagaaggcaggcatgacccactacacgaacaaagctgtgaagataatgttggttgttgctgtcaaacttgagttatgggcttgtcttcattcttggcccagttagaaattaatatttgagagatgacatgggcatggataattcacaaggtttggaataataattgatggtaagcaaagtgaatgacttggccttgcaccattgcctctcttttgcaaaagtaccaactattgagttgggtttccaagctccaaacataccaatattttactaactcaaatttgaaaaataacacaaaattaagataaattaaatattttcaactaaaataaatttaccattgataacatgaaatatttaatttatattaatttaatatgcataaataaagatttaaaatgtacaaatttgagtcttgatcaataaattataagtttaaaaatgannnnnnnnnnnntatatcatttttttccttattgaaaatttataaatcatatcttaa

SEQ ID NO: 133651 - DNA, 1551 bp, Cannabis sativa
aaaaagagttttcaagaggattaatgcaatatgtagagccttcattcaaaagaaagcaactaattttgatattatatagtaatatcttgagctttacattgttcaaaatttctttagggatagggtttggattagattagaaattggaccatcatcgtatttcaggattaagaagaaaaagttttagaattaaggtaaaaaaaatgttaaactaaaatcaaccttaatgtattgttatgttctctcgcgagttcttgccattcaaaaatgaaaaagagaagttaaaaagaggaagatatgagaaatcaatataaggaagaaaatggtgaagaaaaagtgtacccaatagaattttggataaaattaataaaaattacattttttttttacaataataaaaatatagattcttaaaattgttctatttgttaagatttataaaacacttaagaaatatatattacaaatctaaacatagtcctaaaagtgctttaatatacaaaatcttaaatcataaatctgtagaacatttgttaaattaaagaagaataagataagagatgagcggaagtactaacttgaagctattgttggagattgcatagaaagttatgatcttccaagaatatatgatctttctaaagtattttatctgatggggaaagagagaatacaaaaaccctagagtgtttcttgaggaccactacctatttataagctcattatataatgagttttggatatttataacttggttcctcaacaaattataaattaacttatagtatgtgcacattattttaatgacaatttaatgctcttttgatatacataacataattggtcacttaattttatatcacactttataatagtatatacattatacatatgtacccacaataagattttaatctcaacactatttgtaataaacttttaatttgagtcatgcatgcgacttgttacattaatgtcaaaaacactcataatcattacaagaaatgtcacttttgccagcacttttttgtgctggcaaaatgaaatttacttctgatgtgttggcagggattggcaaatcaaccttggtattaaaacttttgtcggcacaaaataaaaaatgctggcgaaaataactttttccagcacgtaaatgtactggtaaaagtttgatttttgatactataaatgttcactggtaaaactttaaatttgccagcatagtttgccgaattcgctcgtaaaacttacttaattttcttagaacgacattgaaagcaatcgagcaatccactagtacgaaggttttcacgatggtaacttgtcaggatttttctcccatggtgagtgttgaatctatcgtgcccaagggctggacggagtctcttatgcccctgaaaaagcttataaaaaaatttttaattattaataaagagttgaatattttgatatatgtatgaaagttaaattattaaaatttatatataaatatcgaaaaaaaattatttatatatgagactgtgacttgtagctgtaacgtccccgcttcaa

SEQ ID NO: 133652 - DNA, 1142 bp, Cannabis sativa
  modified_base (886)..(886): a, c, t, g, unknown or other
  modified_base (913)..(914): a, c, t, g, unknown or other
ttgccatttccaacacaatgcgaatggaagtggacttggccaaaaaggatgccaaggatgcgcgggttcaacttggggttgtgcggatagagctgagagagatcaataagaaactccttgtcgtcgagaatagagttaccgaactgaccaaggaactgtaggacatgccctcgaccgagcagcttgaggcagacaatgcttctttgtctttagatgttaccagtctccaagacgaaagagagggtctccggactcttcttagaaggttgggagaagagcttaaggataaaaagaccagggaggatgaactttgggctaaggttaaggaacttggggagaaggtggatgccttagagacagttggtctcgagattttttatgacttttggaaggctaatcccaaggccaatttcgaataccttgaggcttctaaagacatgtttctcgactactgcacggcttaggcggctaatgagatcttaaggcgaccacttcctcctctccgctgagtagaatgtcgaggctccttctgcccagactgaagatccttcagcctcatcaggcgtagctgatcctctggccccttcatacccaatcgatccatacaaagagcctgagactcctgctgttaaattgctttcttttttttaatatatgtctgttcggccagtaggccttcttttgagacaaggtgactggccaagcggtctttaaacttggaatatttttcattttttgaacaactggctgaccgggcagcctttaatcttgggtttgaatgctttgttattcttaatgaatttcatccctcgtttatgatcattgtgcaattgtgtttgttctttatcgaatgttttgtacaggtataggtgcccccaagtgaccnagcagacttttgactcttggtcacttnntttcacaagtatgctttttgtctgtttggggttttgggtacgaccaaaactcttaatacacattaaatgataaatttatgacatgctaatgaattttactcaatttgaattgaaataaacatctttattcatttattggtcggaaatatgtttgttaccgtagtaacttacacttaaagctattgtactgatctggtttgatctttagcttagcataaacaaaaaaaa

SEQ ID NO: 133653 - DNA, 1286 bp, Cannabis sativa
tagtagaatgtaaatttttattcagtaatcttgttgtggacaaggaaggatgtccaagtctagaatgccatgaataggcactattacaagtatgaatattctgtttacagggaaatgaaaacttggaaaactgaacagactacagcaaaaaataaaggttgcctatgcatttagttgtcccaatcttcttgttctgagaatcctgtaatgtgcaaagtttagaggtgaaatgcatactgttagatgtatcatcgataaagctagaaacactgaataggttaaatttgaagcttggaacatagaggacattagagatgacaaaatcctgtgaaatctgaatgtcacccgattgttcaacatttatgacagaaacattgggaagagaaacagtatgagctattggagttttatgcacattagaaaataaagaaaaatcacaacaaatgtggtgtgaagcaccactatccacaatccataaagggttaagagaagagttaccagaaacatgagatgcaaatggcttggatccttcattccgttaccctagagttgagttggattagactctcgaatcaaaacaagtcttggatatgtgccctagaattcataaggtagtcccgccaactctcattaattcgtctcactagcctaaaagatttcaacaacattcaagagaaatttcctcattttcaccttgaggtgcatctttgggcgaagggtattgatagacctcccaatacatgtcctatacacgtaggactaagaagagcaatggttagctagcaacagagaatttataactcatactaatatgagtttgttatgggagttttactactgtactactgaggtgtacggtacacctcttaggaaagcagaaagaatatagtagagttttattgggttaatatggagaatatatatatatatagtataaatatattgtaaggcctcttgttactacctcatgatatggggaaggttattagaccagtaagagtaaagtaaattaattgtccaactgatgtaggtgtatttttatacagctgattttttttaaaattaaaaataattaaaaaaaggaatgcaactgctttattacttgttgtgggtcctacgtgtatggccttcagaagtgttataaacgaggatgaatcatttgggactcgatcatgtcctccagttcaccaagttaaaatattaattctccattattatttaaacgcacttaattaaggatcaaactctactgttttggttgggattaagccgaacagaatgaatga

SEQ ID NO: 133654 - DNA, 1427 bp, Cannabis sativa
taatcaaataccataacattgaacacagagtttacttaaagaataatagcattaattaattgtgttgtgcaaatttattccaaccctttttctattaattcatacctttccatcactacttgtggtcaactctgcttcctctgttgatccacatggaagcttaggaaatacttgattggataaggactcacaatatttgacccaaaacgcctttgaaatttgctgcacaagagaacaccataaaaaaatgttaatggaagataaattaccactaaagttaagctaccagaaaacataactacacatgactgcaacctatataaatcaaagaagcacttttttcaagttgcagagattatgattagggatatatttagaggaatcgaaaattcaacatatcataagagacttactttaacatgccatcctctaattttagcacattgacaatatttccaaagtaaacaaattagacaaacttagggtaaaatttcttttttccacaaaatcacaaatcagggctatacataaatatatgtatacataataaatttagacgaatttaccacaaaatcaaggctatcaagctgtaatatctggtgtgcatacataataaatcatcgaaaaagaatcaattaaagttgatgcacaaagagtagagtagagtagtaataaggtatgcttaccaacttggtgttgggaggagtttgttcaataataatattgaaaatatggtgagcagttagaggaaactgtgtctcaacctgggtaatatgactataagaatcagaagaagccattgttgaacaattttctcgtttaattttgctgtgaaacaaatgattcaaacactattaagtaaacaaaaaaagggaaatatgtaagcaaaagtttcttgtgtatcaagtttggaaactttcctttttattgatatgaaaatcttataattccaatatttttaacggaaaactttcgtttcctttttttttttttgaaaagtcgtttaaaggtataggtttacaataaaaaataaggtataggttcacaaaaataaggatatgtatttttttttttttgttcagcaaaaaaaaaaaaaggatatgtattttttttaaaagaatatagagaaatgggagttatttttacactcaaaatacctaagactaaaaaataggtatgactgtatgagtacacctcaattttattttattttttcagaaaaagttaaaatatatttttattatttagtgaaattattaaaatagacaagttttatttttatttttaataaatatattcccccaaattaatgaaactaaaattgtttttagggcctgaaactgttttaaaagaataaattcatgtttagtgagttataataaggaataattacataagacacaatttttttttttgtaaaatattta

SEQ ID NO: 133655 - DNA, 672 bp, Cannabis sativa
  modified_base (33)..(42): a, c, t, g, unknown or other
  modified_base (519)..(522): a, c, t, g, unknown or other
  modified_base (625)..(629): a, c, t, g, unknown or other
ttcccactgcatagcagatgtcaggtctagtgnnnnnnnnnncatacattagacttccaactgcagaagcatagggaactttcgccataaaccactaccaaaccagctctaaacataatttctatccataatttaacttcgaaaataacatcaacaacagtagcaaccccggagaacaaaaatctaaatcatggaaaaactcttaacttgaaatctaagaaactaaagagaagattgcaagaggctttaccttagcttggattatacttagaactgctgcaaaacactgaaatgaaggagaaaaaataagaaccctagctgtatctaggtgggttcgaaaagagagagagagagattgagagtgaaaatgctatcttttctaacttttcctatttttgtataaaacgaataaaagatgtttattaacttataacatccgcatagaataaattgaagattgattaattaatttatctaaggtcacaaaatgacaaaaaggctaatggggcaaaatgaccnnnntgcccctcccacactaaaagtcaaaaaggacactaagggtatcttgagaaattctaaattcccgattaatctcgatattccctgtaaagaccgcttagtttannnnngaaattagcagttaatcatgttttattatgaaaattatttata

SEQ ID NO: 133656 - DNA, 1014 bp, Cannabis sativa
attatttattttttttttgtagctcgagaattttaacagttttttgtgaagaggtcaatctgaagatggcttacgcctattctcgagccaagtccactactgccaagaaccttgccaccaccaacatattgcagagggaggtggatgcagttgaagaggaagttcaggatgtgaggaaggagctccaggaggtgaacaaaaagctccttactgctaatagcccggttgaggatctgactaaggaaatccaagagatgccctcgaccgagcagctggaggcaaataatgacgccttgtctagggaggtcattgagcttaaagacaagagggagaatctccgcactcttctctcaaagttggagggggacgtccagactaagcagactagaagaaagagctcaagaaggtggtggagagcctggaaacgattgcccttgaggtcttctatgaatttgggaaggctaatcacacatgaaattttgattaccttggagattccaaagggatgtatcttgattactgtgcgggtcagacagccaaagaaaaacccaaggcattctacagttccaaccgaccagagcactgaaactcttgctgctcagaatgttgaacctcaaactcccagaccaaactggtccgtacaaagagcccaggacccctgccaacattttttatttctttgtttttatatatgtatctgttcggcccataggccttttttagagacaaagatgaccagccaagtggtttttaaacttgccccccaagtgaccgagcagacttttgactcttggtcacttgtatttcacaagtatgatttttgtttattcagttctttggattcgagcagaccttggtacgtatttaatggtaaatttataactttctaatagaattgatgcaatcagaatttaaatagatatctttattcattcattggtcagaatatttttgttaccgtcgtaacttacataaaagctattatatatccgatctttagctaaatttaaacaa

SEQ ID NO: 133657 - DNA, 1060 bp, Cannabis sativa
gcgggcctgggatgaggacctggagagggagcgtttggctaacgagaggcgaatggaggaatgtttaagggagggggctcccttttaccccctggcttccctacgggttgccgtcgttgcctgaggagggttgttcaggggtctatcgtaatcccgggttctctatgcatactttgctggcaccatcccgaccgcgagcacttctgattcctaagtttaggttttgttagctgtttgttatttccttgtgcatggctttcgtttgtatacaatcgctgtttattatgtctctttttttttatatttttagttatatttgtgtaacctgtgtttgggttacgatcttttaatgggtttgtatttattactctcggtgtcccttcctatgttttgtgtttgtttcatataaggttgggagaactgcggctatgttaagtgtatttattacttatcatttatacatatatttatacgtacttattccgagtttttttttttttgaatggggtgctttggaaagtggaaagacatatatactcttagggccgcttcttgaaatttgggtgcacgtgtttgcttggcacgtgttttaatgcaaaaaagtgactttttgtttccgtttttgtggcatctttattaactgcatgcaatctttagttgtataaataagcttctagttgagctcttttttttttatctaagaattctttcgactctcttttctttttctgggtaagttcagttgagtttattgtccatccttcctgcattatggcttccctacttaaagatcagataccgcactcaaaagagccttcctcctccaacattttctcaggcttgcagcccctggaccctgcttttctttcattgaatcccttttcgagttttcgtgatttcgaaccactacgcttcccccattgcatttttcagaggtctgcaattgtccctgttttgagcaagctgcactgggcttagggacttacgctgtttctcgagtcgaagttacgccacctctggctatgtgcctttgtgctatttttcctcctgtgttggcacc

SEQ ID NO: 133658 - DNA, 746 bp, Cannabis sativa
atccacataattattaatatttataacacttttctaattttgtaagccaaaaatagcttattttaaaattttccaaacggagccaatgtaatgtagtaaaacaagaataaaatgtcttgttgatttattgttatcaaaatccgaaagaagtgtattgttttgctgtttcttttctttgttgaaaaagattggcatcattaaatcctcgcgagtaaaccactatagaaatcggagagagtaacatgacaatatcattaatcaataaaaattaatttaccaaaaagtactaatacaattggaatagctagactactaaacaaaatgaatctaaagtaagagctagttttgtcaatgaatgagcaacactacagcaattctagaaaaataagaaaaagaaaaatcactaaaacaagtacaataagccaaagcatatacaagtgaccgactatttaggtgtgcaatcagtgctaatgcatagggtccaaaatttaaaaaggcccaatataatttttctgatttttttttttaacccaaccttctatcaatgtgtcatgccaaataataaaaaaaaatgagtttttctatgattttttttccttatttaatgccttttaattttttttttccataaaattttatattagtttgaagttgtattaaaaataataacaattttaataaaattgtttgagtttttaggtatttaattatgtaaaatatattttttgtaatatgataatatttaa

SEQ ID NO: 133659 - DNA, 1660 bp, Cannabis sativa
ttattcttattcttatatatttatttttaaattcatatatattatgtgtttttattatttacaatatattttatataatttgtttctatgatttgataaagaatatataaattatgaatatatcccgaagattatgtgtcatcgataaaatcttacatatattctgaagattatacaaacatgatattcatctttatataattgactaaaaaataataaaagagatgaatatatattcatatatatatatatacatattctttataaattttttgcatataagattatgcaaacataatatttattaatatataattgattgaaatataataaataatgaatatatattattatatatttaataataaaaaaataattgtaatattgctataaatttcagtaaatattctatatttatcaaaaaaataaattgtatttatgaatataattagagaatattgaaaaaatttatgattgatgcaaatatttatattagacattattaatttattgcatatgatatattaaagatcgtattttgcatacatcttgaaaattatgccaaaattatatttatatattctttgaaatattataaaagaaattgttgaataattttttatattttttttgggtaaaaaattaataagtttctaaaaaatttataataatgttatacttattcaacgtcattccccgaagtgaatgcaataattttaaatgattaaggatattatttactactcaaatattttcaaaagaaattaaaaactcaagaagatgaaatattacacataatcaaagagtatgaaatatatatatcatgtgtcaaagatctttgtatgaaacaaagacatgtaagtaaattattatttgaaaaacacgtatgattgtctatacaatataaattcataaattataatgatagatgcttgaagagttttttattatattgtaaatgattgaagaacaaacttttatttctttttatatattgaaaaactaaaactaagcatacgtgccttatatgtaacattaatctaatatgtatatacatagattaatattgacttaaatttaatattagatattttattaattaattaattataatatttttcttaattaattaatccatcaatatttataaattggataaaaaattaaaagtgagataattaagaagagaacaaataaacatattaaaattaattatatagtgtcatgtcaccgcctcatatatatagatattaaatatatatagtttgttcataagtagagaagtcctgaagcatttcatatgcattaagaattacagatatatgatcatttgatatgaaaattaagatcatacaacaagaataaaataaatatatagtcttggagtaccatcattttcgccaataaaaatttatattattattaatgtgttatgttcatatatctacttgaaattttaaactttggtaagaacaaagttgtatatacacatgattcaataagttggataattattgaagttccaagaactccccatccataatttagagtctcacatacactctggaagagttatagataatatatggtcatagataatatacagtgatattttaaaagtgataacaataatctcataagatatattatcaccaaaata

SEQ ID NO: 133660 - DNA, 501 bp, Cannabis sativa
ttagtcacaacaagtagtgttttaggcagaacaaattatgatttttgtgactaatgtctttagccaaagactttttactcgcaacataggaataattatttataattagttacaatttttttacttttagtcataaactttgttgtgattaaaagttaatttttttgtagtgatatatatatattcaatatataaaaattttgatagtattattggtgagaataataacattatcatatttgatccaattttttaatctaaccaatctaacccaaatgaaagttgaatgttagctgaaaatttagttaattagcttcaaaatccaattcagtcattagatatttttaatgaagaaccctaaactatggaaatggtgctcaccatattttgctttaaagtataatatttttcaatttgccacccaattatatcaatcaaaatgtaaattcattccaaaaaaaaaaaaaagaaaaatcaatgaaaatgaataaaatatagtgg

SEQ ID NO: 133661 - DNA, 612 bp, Cannabis sativa
ttcatgtagagaaaatgagcattgataaaattaaattattaacaaaaaaaatcaaactgttgactttattatttttatttattttattactttgtgaattcgatcgatctatgtataatttaattcctgatgcattataaacttgtcatgatattgggtaacaatctttgtgacaactcacgctttattatttatttaacaataagcaatcattttgcttatatgctgtgtgtgaaataatgtcgattgagacaatggcgtcaggttaaaatggttaataatgtaaaaacaatcacgtttgggctaagcaaaattattggaaatctcacactctttcttttattttaattgaaaaatgtgtataaatatatttatagggataatattttattagatgggtctcagcgtcagggtacattaaataagtctcagtatacgtttttattttttaaccctaattactcctaaatcaatctcagccgtcaaatcaaataacttcctcatcttatggctaccgtacatcacgaattacaatccgtaaaagtacaataacggaacaaaatcatatctatttctattctatataaagtgtacctatataactgaattctt

SEQ ID NO: 133662 - DNA, 664 bp, Cannabis sativa
ttcaaaatcttaaaaagaccaaaatcttaaataaaactagcaatacgtggctcgacacgtacattcacctagtatatatatatgtttggaaaatctcctctagtacacctttactcttttttagtattcagaatagtttttggtttatattgatatgtatatatacataatataattatgtgggttggagcatctacaattatttataaatttttaaaaaattataaatattaaaaataaagtttaaacatttacttattatatctacacatataaaaaaaacaatctccatctaaatatttaaatattatttttgatattattaattattcaatttttttaaaaaaagtatagacaattataatgattgcataattaaatatgaaaattagtagtttattagcaattaattaatttattatgaaatatatgtgcaaattagtaataagctcaattagaaaatagataaatatgatataatttcttaattatgaaaattttattaaattataagtatactatatatgtaatatatatgattttgttataaaataatataagggaaatttacatgtgcagccgtcttttatatcttattatcaataatattgtacaacatttaattaataattttaccgtttgttttataccgtttttattttaa

SEQ ID NO: 133663 - DNA, 756 bp, Cannabis sativa
tggtttattatttgagttgtgtaggtttgaaaaccaagatagctacattacagatacactactattactatatagcactatttttcttgggacgtgggttgtgcgcctgtccgtacggatcatcacaggcagctacaagttggcctaaataattaaacacactgcccttttttctttcataacaataatttgaaaggaaaatagtgcataatggtactcataattccaaatatactaataattccaaatatactatttcccaaaactaattaacaaatacttgactaaatcttgaagaataatatatacttccatctatacatggtatatatatatatatatgtatattcatcattacatgtatatcttgctaaaagtattacttgcacttgctgacttgcctaaattaaaaaataataataaaaaggtatctgactgtagtctgtagctagagtgacaaaaaaacaaaataaacacagaatatataattcaaataaaatgccatttttggctgaaagcagcaaatgcatatatgtgaaaacatgttgttggtctgagaaattttgtgaaagagctgttgactgtcttccagacataaaataacagaaatctcatcatggcctatagataattagagtttaaaatgtctccatccatctttgggctttttagttttaattttattcttttgtcttgatcatttccttcgtatctataaatacagagagagatgttagataaattaacaattaaccc

SEQ ID NO: 133664 - DNA, 1326 bp, Cannabis sativa
aagcttttgccaaactttgggatgcacttgttgtttatagatagtgttgtgaaacaacacctcagcaagaacaaatatagaacaagaaagatcaatagaaccaatcaatgacaataatcacaactatgcagtaatgtttaaaccagaaaacatgagcattaaaacataaagaacacaaagaatttacgaggttcgagcaagataacttgcctactcctccggccaaacagccacaattatggctttgagaatttatttgattgagcttcaatgtgaaagattacaacagatacaaattacacactctaagaagcaatgcttcagtaattttcttctctaatggcagtgatcatagtacaatgtcactccaatttctcagcactcaagacaactctcaatcacctttaaaactctctctttctaactgtacaattcttctccaagatcaatctgtgcagtgtgaaaggatggccccttaaatattgatcttgcatcagtgttccaagttacccgaacaccaactgtcataactaacagttggttaagttagttaagttcggtaagggtaatgatgtcatttgatatttggacaattactttaacaattatccaccttggacacatatcaaatgattaggggcagtgtaatgagttgtagctgttctggacttaagcaccctcaggcagtgagaatgctaagcaaattcagacaaagtctgaactttgcttgaggaacatatttggttaacatatcagcaggattttcttttgttccaatcttcttgatttgtgtctccttccttgcaatcacttctttaataaaatggagcttgatgtctatgtgcttggacctttcatggtacattgggtttttcattaagtgaatagcactttgattatcacaatggacagtgatgtcttctcctttaaaaccaagttcttctgtgaaacctcttaaccaaattgcctcttaaatggcttcagtagcagccatatattctgcctctgtggtggatagagccaccaccttttgtaagtttgatttccaacttatgcatccaccaaaagcagtaaatgcataaccagtaattgaccttctggtgttaatactcccagcataatccgagtcaacataccctgcaatttcagtctcaaactttgcattgtctttgtataacagaccaacattagcctgttccttttagattatccttagaatccacttcacagcctcccaatgtgtcttcccagggtctgaaataaacctgctcaccatgctcaatgcataagccaagtcaggtctggtacagaccatacagtacatta

SEQ ID NO: 133665 - DNA, 1861 bp, Cannabis sativa
gtaaatctgattatagtgaaatgagttttatttagggcataaaacccaacaatcagggcataaataaccgcaccaacctgcctactgcaccagctgcaactactggagttaatatcctagcgaatatagccccagtaataacgacacctgggacgactcaaggcaacactgccctagcagggtgtatcgatcaaggcatgcttttacaagcattgaagatgattaagcagaaaaggaagcccatatacaagttgtatgggacttctcctttcaccacggaagtgcgacaagctcgattacctaagggattccaattatccgaatctctgaagtataaaggtaccactaatcctatagattatttagaaaaatttaatactattatggaagtagaccaggtacctcagcttgcgaactgtcacattctcacggcgaccctggatgataatgctcacgattggttcacccaattgcctgaagcatccatttcaacatgggagacttttgtcaacttcttcctcacgcactttcaagccacgatgacctataggccaccctataccactctggctaacattaaacaagaggtcggtgagtctttgcaagattattttgaatgttttaatgccaaagtaataaaagtagagaaggccctccgagtcttcgctagtttgtatgttgataacagtgtcctaccaagaaccgatttctggaaggagctgcaggctcgaagacctgaatcgttggtcgagttttttgctatggcagagccgcataagaggattgaaaattctctagccgaactagagaaagtaaaggataaacacaagtcgcctgtactgcgatcacgatcccgcagtcctagaaggaaaaattccaggggcggagccccagaagacgcagtccggaaagacagcgaagtccaaagttggccaaatcccctccgaagaaggagtcgtctcccaagaggaaaggtggtccacgttttgtgaattacaaagaattggcaattccttgggaccatatctatgccattgaagaaaagaacgaagccttcaaaaagccacccccaatcaggggaaaccgcgataagagagactcgaaaaaattttgtaagtaccacaaggatattggtcacactaccctggaatgttggtttttgcaggatgaaattgaagagttaattagacgagggaaattcagcaagtataagaagaacgaggaaagtcatccccaagcggatgacaaagaagaaaataacaatgggagtggttcgagaactcctcgcaatatactgactatcatcagcagacctcacatcgcaggagagtccaggaaatcacaggagcgatacgccaaggaggccagagagaggccactcataaatgtgaataatttgagtgagcggccagaaaaattgttcaaaaaggaatgtgatgatatcacatttatggaaagtgatgccagatgggttcaccacccacatgccgatgcaatggtcatcgtcgctaacatttgaggagacaatgtccactgcatactagtggacaacagaagttttgtgaatctcttgaactttttaagcttttaagcaaatgggactacaagagaaggatctgcgacccgtcgtgtcgagtatctacagttttactggagacaccattgctttgaaggaaatgatcaaactcccaattactctgggaactgcacctgtggctaaatcgatggctgccttcgccattatcgaccaacactcgacatataatgctgttattggtcgtcctatactaaaggagatgaagattgtgacatccatttatcatctaaccatgaagttccctactcccgctggagtaggatc

SEQ ID NO: 133666 - DNA, 1132 bp, Cannabis sativa
caaaatgaatgtaaaaaacatttagtttttcctaactgattcctaccacttggacatgggtatataaagagagctttttccctattctttgtaatctttttcacataataataagaaatacatttctctatttctgtttatcttatctaagccatgacaatgaggatcattagagattattattattattattagctttattggaggttttttcttttaatagtaataaaaaaagtaacaaaataagagaattaagaagagaatagatggaagtatatttagttaaaatttttctaaattcaaaaatctaagaaattatgtaaatgaaatacaaaaatctctattgtatttattgcaacaatatgtattataaaatattagataacaatgttaaaaatttaaaagaaaataagaataaataataatttatatttttatatatattgatttatgaaattgatattttatttatgagacaaaaaaataaataaaaattaagcgatgaattagaaaagaaagtgaatattggaaaataacacaatagtataaaaaaatatttcaaaacagtaaattgaagtggcgttgaactcgtatagttttcaaaataatacatcatcttgtctattttaatgtactcttccctcagttttttttatctacattatatattttacatgcagtaaccatctatgttttaaaataaagtgtataaaacatgatataaaaagaagtgatgtctttcattttaccaaaaaagtaaaacatcatgatttagcatggatagacaaattgtataagatatatgtcatgtatagtatatcagtaggtaaaaaactcaagccatctttttttattggtgctgtctagttcataataaaagtttgtgtggcaatacaatttctaatttatcaaaaaaaaaaaaaaacaaaagaaaaaattgagaaaaatagtaaataattaataaaaagaattcaatattgaggaaaaaatgaaactctaaattcatcaagtaaaagttaattttcttaacagaaaagtgatattattagtcacaaagtaaaaaaacaaattaaaaattttaaaaaaatttataaagagtttacttaatctgataaaaaaaaactcttaccaa

SEQ ID NO: 133667 - DNA, 514 bp, Cannabis sativa
ggcacaaaacccaacaaaaaattgctttgagaatttttatcgtcattagaaataatgaagattcaaataaactttgggaaaaacctcaaacctgagtccatagaaataaggcctagggcctaggttcacctggtcctgggcccaacgcccaagttgacaattaagctagcatactacttcaatttcttaaatgccaaatctgatgcgaccattaaatccagaatggtcaaaaatggggggagagtccttgtcctcaagttcagaagccttggaagtatgaaaaatagaatcccaaaagcttagtttaaatggtcctacacccaggtcaacaaatggcttggtttgctggcttctgattattcgagtcttatgctgttttgaccgtctgtcaagtttttcacaagggaaatgatccatgaagtcaaattaataaaattcaaaacatcaattttggctcccaaaaatgaagagtttcgagtctcccatttccacaaaatagcaacatcttcgagaa

SEQ ID NO: 133668 - DNA, 998 bp, Cannabis sativa
agaaaggctaagactgagcaccaatgagtccagagctcatggatgattatacatatcaagatggttagacttggagagttcgatctcgggacaacttgggtctttattttgtagttgctgggcgacatgtttataaaatatattttggatatgattgtaaattaaagacgggatcccaactcttatgtatggttgtttatttataaaagtttaaatttgacacgatttttgagaaaccctttaattagcaaggcatgcacagtaagtagaaaatcattgtagcatgcctaagcaaatagggtgttacaaatttggtatcagagtcgttaagttatttaccaaagatcgttaagagatgtacaatcatcattagaaaaaagctcgactcacgattcagtaagcctttacttgtttagcaatttatttaattagaaaagcatgataggaagcatgttaattctatgtcagttgagtaatatgttgcctaaaatacatgtatgcggtaattggattattgtgatcgttgtttgacctacctgacttataggttcgcagactaagtcctctgctttgtcttctacacattatgtttatcttcttttcatatttcattttagatgtatgttgtcttttatcacttgtgttcgtaggcatgcaaatcaaactatcaaggacttagtgaagtacgtgctatagctggatgggagagattccacatcttattttctctattggtgtaaatgacatttgatttgtaataatagtacaaaaatttcaatactaaacataaattgtaggactaatatatttttctatagtacattattaaaaagaattagagtttctcattcttaattttatagctacagaaggttgtctttttctccggtcaggctcgccaacttttcctgggtataagtgcaacttagtcgaggttgtattttgttattgtgattagtcttctctatgtgacatagttttgagtattttagtcttgt

SEQ ID NO: 133669 - DNA, 1002 bp, Cannabis sativa
aaaatctgcattaatagtttggtgctttcattgagagtcttagtgataaaaactcagaaaaagtccctccttacgaacattatctacccaaatgcaatggcttgtgatgatcaacgccataataatcaacctgaggaaataacccatcgtcctggcaaagagcccatgagatctcaaagacccaacacctcttaaatgccatgttcaagaaggaacgatggtaataatggtcagaactcagaaagtaggaatgaggatgccaatgactctatcagataggtgcctagcagtgaggatgcttatgatccaaccaggtatgtgccattagtagagtgagagaatagacaactttgacaatgactggctaaatctaagtgacaaaacattgagctagaaagagaggttgttgtaagccagggcggcacagagaacaatttctcagaatcaacctgatcccgcggtaaaaagaccacgagggagacctcgaggctccagaaccaggagacaggaaacaaaccagaggaatccctaaaatgcccaggaagaacaacctagggatgcaagggatgtccctatagataattaaacaaatcctaataataccaggaatcaagaacatcggcgaaatgttccttaaacttcccatggatttgctaaccaagggaatgagcaagctgatgcgccagaagcatctcacaggaatgaagaagtaagatagcctcgtctagggaaccagagaatcccacgcactaataagagagaccctagaaatcaaccaatgccatgtgggcttcctctaagacatcctcaatgtccttctcgagcagatagagaaaatgtatacacgtacttgaatagaggacgtgtatctaatctcttccatagcagaaggctggtacaagatgaagcaagtttaagcttgggacatttaaggtctcgagggcatagtcggtcgagcaagaaaatgcgagaaggaagcagatctcgacattattatgcaaa

SEQ ID NO: 133670 - DNA, 783 bp, Cannabis sativa
aaattttatcaatacaatcaaacaatttaaaattttatgaattttgaattcaaatttaattatttgattacatataactgagaattatttggttgaattgatattctgaattcaattgtattgattaaattaaatatgtcaaatttaaaaatatgagttaccaatattaagtattattaaaaatacatggtatcaaaatactatatgaatatatatatatatatatatttcctttttataattattaaatactaagataaataaaaaaatagcagttgccaagctaaaaattaaaaagttatacacactatcaaacagctcaaataatcttactggttatattatcatatgttcttgatattataattgcactaaaaaacttgaataatgttcaatgaaacttcacaatgaaattaataatataattacttacttattacacttgtatccattatgccctaataatattttaattagcaatgtggtcatcaacaatttttttttagttactctatttagcattattgtcttttaaattataaatcactttttatacgttatcactaaaagatttataactaaatgtattaattataaaaatcacaatttattgtgactaaatgtgattttagtcaaaatatttattctgactaaaattaattaataaaaacttatacttaaatattatattttagtcacaagtaatttttcatttattgtgactaaaaattatatatatatatgtatatattttttgacaaagtgattagaatcactcatgaa

SEQ ID NO: 133671 - DNA, 2199 bp, Cannabis sativa
  modified_base (2146)..(2146): a, c, t, g, unknown or other
tagcaaatggtgtttgtccaattgttattttctcggttgtgcggtatgaccacaatacttcttatagttcctccggccagttccctttagcttcttcaagtcattttatcaaggtgtctttatgtgtcttattgactgcttcgacctgaccatttgattgagggtgtaccattgcagagaaactttttatggctccatgagtcatacagaaatctataaacaattggctatcaaactgtttgccattgtctgagacgattttatgcgggagtctgaaccgatatattatattcttcaccagaaagtccgatactttcttagatgtaattattgctaaaggctcagcttccgtccacttagtaaaataatcaactgcgaccattgcatattgtaccccacccttacctttgggcgattttccgatcagatctattccctaaatagcaaaaggccaaggactctgcatctaagttagctcgttgggcggtgcaggaggtattttcgaaaatctttggcatttctcacatttccttacataggccttgaattttccatcatggtcggccagaaatatccttgccttagtattttctttgataggctttgacctactgtgtggttaccacagaatccatcatgtactttggataggagtcgtgcaacttcttcttttgttacacatctgagtaatggcatggagaatccttttctatacattacaccttccactatgatgtaccgtacaactttcctcatcatattttgagctttgtttatatcatttggaagttctccagtattgaggtaggctgttataggtgtcatcctattcagagctgtgtctatcatttcaatttcctctgcacaattgatgttgggttcttctaagaattgaatagggactagattggccttatcagttactatgttgctcacacgctgggctaaggcatcaatagttgtgttttcttctcttggaattttcctgagggtgtaacccttcaattttgcgagcagatcctgtatattgcttagataagctatcattttctctcccaaggcctcgtactctcctcaaacatgatttactactaattgcaaatcactgcagaccttaatgtattcagcatgcagctcccgagcaagtttgaagccagcaatgaacgcttcatactctgcttcgttattggaagctttgaatccaaatttgactgccccatgtagatgtttcctccaggtgtgacaagggaaattcccgcacgaaatagatgatctgtagccgacccatttacgtgcaatttccaggtaggtctgtcttcattgttgtttagtagggactcttgtactggctccgagttgtcccttatgctgctttcttctttgccagtgcactcaactacaaagtctgctaaggcctatcctttgactgttgttcgaggttgaaatattatttcgtactaaccaaactctaccgcccatttaagtaactgtccaaaagcgtcgggtttttgcaatacttggtgtaatggttggtcggtgtatacccgaacagcatgagcttggaaataaggccttaacttccttgttgttaagattaggcagttagtaagcttttctatcggaggataccatccctcaacttcaacgagtcttttgctgatgtagtagactggatgttggacgttgttctcttctcttatcagcgcggcatttacagtgtattttgtaacatccaagtatattcctaattcttctctatctaggggttttgaaagtacgaaaggctttgcaagttgtctttttaattcttgaaaggcatttttgcactcctaagtctattcaaaacctcgaaggatgtttaagaaaggaacacacttgtctattgacttcgaaacaaatctactgagtgcggctattcgaccaattaagctttggacttccttagtttttattggcaatttcatatagaggagggcttgtattttctctagattggtttcgataccccgagcattaataataaaaccaagaaacgtacctgagctaactccaaaggagcactttaagggtttgagtttcatgttttattttttgaggatttcgaagcattgatctacgtcctctatatgttagaaattattttacnaggatcttagatctactcactagtatgtttattaacatcctaaataagaactt

SEQ ID NO: 133672 - DNA, 744 bp, Cannabis sativa
tagtttcctattttatttattaaagattaaggaaaatcattcttcatgtaataagctcctataaatagtggcatgatcacactattgaggggacaaaagaattaattcagagaaatactcgagagagagaatagtgatctaagagagaaaataactcagagatctattgtaagagcttagtgaggaaaagtactttattccttctctcaagtcaatacaaatacaaggagagtaggctattactaatctaacgaggccgaacctctataaaatctggtattttttttactttactttgtttgctttctattatttatcttatttaatcgttttattctaactttttggctagaagcgaggtcaacaaataatatgatttttgtcactttttatgtaaaatagaaatgtgcatttttagagaaatataaattttgtataaaattttattatatgtttatgtatatatacatatatatttttctgaaattataattaaaaaaaaaaaaagcagtggcttgttgtgtagaaatagaaaacaaatgttatttttttataagtattgattaatgcaattttttgaaataattgtgctaagtttctttacataaattatttcttattaattgtgatttattgaaatattgacatgaatttttatttctttcccgccattttcaagattcaatattttttttaaagaaaatataaatcttcattaggccaatgcaaaaaaaaaaaaaaaaa

SEQ ID NO: 133673 - DNA, 852 bp, Cannabis sativa
  modified_base (26)..(52): a, c, t, g, unknown or other
ttttggaaagttcatatttagggtgnnnnnnnnnnnnnnnnnnnnnnnnnnntaagatcctggtaaaataaataatccaacagggggatgcggaaaagtatgttttgatggatgattctctcagttctatagatcgtttggtgaatcttaaaaggaagggtgtttggatggatgattcaattggagatttctcttctaatccgaagtcttcaattggtcctcattcaaattctctgtcgatttttccagctgactgttctttggcttccatggatcttcatgaggttcctattatttatgagaataatgtcattccgggagaagggaagaataagaggaggaaatcgaattctacatgtcttaataatattggcagtgctatttcgggattggtctttgctaatgatggatctggtatgagtggttacggtgactcggggagaatttcttctttgcaagatttgatccttgatgctccttcgaaagcggcaaacccaaaggagttgggtcgccgatcgtcatgaatgccttattttggaatgtccaaggtcttgggaacccttggacattaaacactcttaaatcccatgtcaaggatcatcatcctgggatgattttcttgtccgaaacaagactttctagtgctgctatggaaacaattagagtgcaacttgggtatgagggctgctttacggtaaatgccaaaggaaaaagtggcggtcttgctctcctctgggtggattcgattaaggttcatattaaatcctatacgatttctcatattgacgcgttaatggaaaacgatttgggatttcaatggcgtttcatggggttcttgttgggttttatgcc

SEQ ID NO: 133674 - DNA, 1430 bp, Cannabis sativa
ggcatagagttagaaaatccttcgaaaaaacgctgataatagcttgctaacccaagaaaacttcgcacttccgtcactattcttggcctcggccaattttattttactgattctatcttccccgggtcgaccatgatcccatccttttcgactatgtgccctagaaaagatacctccgacagccaaaattcacactttttaaattttgcatacaatttgtgatccttgagtcattgtaataccatttggagatattgctcatgctcctcttctgtctgagagtacacgaggatgtcatcgataaacactataacatagttatcaaggaaatccttgaatactctattcataatattcataaaggtcgctggagcatttgtcaatccgaatgacattgccaaaaactcatagtgaccatatctggttcgaaaagcaatttttggaatatcttcttcccgaattctcaactgatgataatcagattgtaagtcaatctttgaaaatatagtcttcccctgaagctgatcgaacaaatcatcaatcctaggcaaaggatacttgttcttgatcgtcagcttctttcattcccaataatcaatacacatttggagggaactactactacaaaattaggttttagtgacactctttagtgacccgcacaaaaatgcgggtcactgaaaggttaggagtgagttttagtgacacgcacaaaatgactctaaaaattcattgttagtatcctataatgcgggtcactaaaaatatgaggagtcactgaagagtaactcccataatttctactattttttaaaaaaatatattgacttatagtgacgcgccaaacgcgattgggtaaacatagtccgacacacctgatgcgtcactatatcaagcattataatgaaaatattaatatattactattcttaattttttttaaagaagttgtaagtaaataataattttatttattatattaattgtagagtacaaaaaaatcggatagaaaaaaacacaaaattaaaaaccctagacgttaagtcgctatctctccttttacttttttctctcctacgacaaaaggccaaactttggccatgtctctcgtgcaaacacagggccaatcgacctcaacacctctgctcctcagacgaactcgtgcaatcatagggccaaatggcctccggtgatttctcttgtgcgttcaatcagtattttttctttgtttctctctcttttaaaaaaaatttacgatttgaattgctccggtagtttctttggtattttctatgtgtgtggatttttgtacgatttaagttgttccattgattgttatgggattttctatgtagattttcataaaaatacaaatatataggacgctaataaaattatatatcatgtcaaaaaaagtacaatagaaaata

SEQ ID NO: 133675 - DNA, 877 bp, Cannabis sativa
ggcgtacttgtgtataagagtcataagtctgtgggtgtaagggcctagtggagacttgaagcggggatgttacatatgagccagaggagctctcattttataggtgaagaaggtccttaaagataggaataaaataattcaaagatatgaaaaaatatgaattggctatttttgaccgtagatgattatctaacggtaaaaattaactttggaggttgatcgtcaatttttgaaattcgggtcgtgacagcgggacctgcttcgggtaagctatagcttaaattcgtaactctcttgggggtaaactttagagtcgatagctttagaattgaagtgtgatacatgacttgatagtgtattgaattagcttcataacgcaagttgaattgcatcaatcggatcaatattgagtgagttattgcaatttattgaaggttgttttgagcccagcgactaggttcacatccaacgcccaagttgacatgtgatgtcagcctggaagctgggtgaggggaaaaacatgttgtgaatgtattttttgatgcctaagtgatattttgacattacatagtctatttctatgttttagtgaagttgattactagttcttagagatgttattattttacggaaacgcaagactcgaaattgcccatttccaagtaaactccctgttggaaatgtgaaaatatgaagtcatgaatttgacttttctaacttcatggctctcaattactgtgaaaattagacgaatggtctagacggaatcagaatcagaaaagtaaaacccagcgcaccaggccatttgttaaacttaaacgagcttcctatatgcatctaattccaaaagcaaacatataagctcacacaggtcaaa

SEQ ID NO: 133676 - DNA, 743 bp, Cannabis sativa
  modified_base (691)..(698): a, c, t, g, unknown or other
aaataaattttagaaaacaaataataaagactacgacaccagggcatcatagggctgcacactagtcagatttttgagttttcggatggtcgggtttgagtttttgcatttcggatattttaaatgtgtaatcgaacctaattattgggtagtcggattgtaatacaaatctcaagatcgaccctgacgacagcaaattttttttttattatattctaaataaatatattagctagtttgattaagagtatctcttaatagggtgttataaaaatagtgtacatgtaatttttttagtcaattttataaaattaaactttaaatagtagtgtataatgtggaccaaatatgatatatattaaaagttgtgtgaaatttaacacaaaatataacatgactaaataaacaccacttactatatttttatttattcttttactttctgttaatataactaataattttttactttttctttatatatttaaaaataaaattttatatactttcaataaaaaattaaaatttttgttaattttttaagttaattttatacttaatatattagagtacaattgtaaaatttgagtgccatcattaagaatgactccactccgtccccaccacagagaaaaaaaatcactttcaatgatctaaggggggtttggactcggacccgacttaaataaannnnnnnnataaaaataaaaataaaatttgtagaacacatttttattttctgt

SEQ ID NO: 133677 - DNA, 682 bp, Cannabis sativa
caagccaagtccgccatgattctggcacctctttaaagaactcagtcagcgtctagctgtatgacgataaagacagcgctatttgggaggcaacccaaaaattttcttaatgttttagttgaactttcgtattttgttttcttttaattgttattactattttgttcttttttagtttagtttagtgaactggtaaccagattttggttttctctaaatttttgtactgttcataaaaaatatatacatattttttggggtatagcccagtggccgcggcgagaatggtcagacgggtttaaaagggggaaaatcacacatattcaaaatcacatctttttctcaaccctaaaccccctaccaccgaaaaatcctccctataaccacttttcttcatctaatctcattctaaaccctttttcttcaaatctaacaacaatcttttatcacaaatcattctaaaccacttttcctctcatcaaacactcttttcctttcaaaaacatacccaaatccctaaacctaacccaaactcaaaatttcactattcatcatcttctagctcaagaacttcaagattttcttcaatggaggtagagtgtgttgggttttatgccctaaataaaactctatttcaatttaatccagattattcaatatcaataaagtaacaaaagtattt

SEQ ID NO: 133678 - DNA, 1110 bp, Cannabis sativa
  modified_base (1074)..(1075): a, c, t, g, unknown or other
atctcaaccaaacaatctctttagtagtagatgccatggcacgatactgaacttccgtagaagattgagaaacaacaaactatatcttgctcttctaagaaataagaaaatctcctaagaagatacagaaaattgctgtagattttcagactgtgggatcacgaccatgatcaacatcacaataagctcgcaactcaagaggagaggtggaaggtagtagtaggctctgaaagatggcaccccgaagatactttagaatgcgaagaacatcagcccagtgaacagtagtaggagaagcaacaaactgactaacaatatgaacagcatatgcaatgtctggatgagtaatagtgagataaaccaaattgccaacgatggtgcgatacaaagtaggatcttccaaaggagagccatcagaaggagaatactgaacattcaacttagagggattgtccacaactctagtatcagtaagatgagcacgcttaataatgtcagtagtgtaattagattgagaaagaagataaccttttggagaatggacaattttaataccaaaaaaatagcacagagaacccaaatccttcatctcaaattgagaagctaagtctgactttaacactctaattccttgtcaatcatctcctataataatcatatcatcgacatacaaagaaagctgaatatgacttgcagatgtgaactttacaaataaagttgaatcataataacttgacacaaaaccaagaaacaaaaataacagtagagaacttttaaaactatgcttgggggcctgtttaagaccatacaaagccttttctagcttgcaaaccactctttgcttatgaggagcaccaggaggaggaaccatgtagacctgctcatgtaagtcgcctactcctggtgctagatcgtcatcgcatcctcccaagacttagagaaacaacgacgatgacattactcgcttatagatcattagatattttatataccaattagaacttcacttttttttccgattcgaacatcttttaatgttttgtttatatactaattttagtacaacataatatnnttaatgtttgtttatcttttaatgtaaattatgtt

SEQ ID NO: 133679 - DNA, 511 bp, Cannabis sativa
ggcccaggttgataaagtatcaacatacgcgctgggcccagcaccaggtcaacctgggcaccaggtcaacctgggcacaaggtcctagttctgacccccggatgactttgtttgtttcccgaaagcactcaaatcttaattgttgatgagaacagagaaaatgccaactttattatcccaaagtttgcacatatgacatggcacttacacgtggcataacctagctagcctttaatataacaagggacctttgggtagggatgtgcctggaagatcccatgtgagggcagggcccatgaactatggtttgccttctaggaagtagttgggcgggccatcattatactggctagagaaaggcaggtcagtgtatcctccaaaattgtttcgtgagtaacttcatcaaaaaagacaagtcttaaggaaggactggcggggggaccaatatgccagccagaagaaacgatgtcaagagtgtcaggcaaggctacacgagccttgatttcttctt

SEQ ID NO: 133680 - DNA, 1078 bp, Cannabis sativa
tcactaaacttcagaaaataagttgatgtgatatataatcaaagggaaaggaaaagactaatattttcatgctgtcgatttcattattgatttctatcattctcttcgattcactagacttcagaaaataagtcaatatgtgatatataatcgaagagaataatacaaatcttcatggtgttatgctgttaaaatttttacaatgtgaggatcgtttcaaaaaaataaatacctaaattgaataaggtacctcacgaaaattactacaatgagccaaaaaaattaataattctgcttcagttgtttaccctcgattgaatcaaagtgcttcaaattttctctaaaaaatgattaaatatgtatatgttaatccttgtaaaagaagagagggtaataagatatacaatgagcgcaaacttatgaatgattcacttggtatacctttttcgttttcttagcaattaaaaaaatatatatctgagtaaaaaaaaaaaagaagaagaacatacatcagaatatatgttcagatccaaactctaaaatatattttatataaagaaaacgaaaaaaaaaaaaaaaggaaaaaagggaattagaccaatgtgaaatcatgtatatattatatacatatatgtatgagtcagggtacatggagtagtcactgtcttgttgtttctcacacaaaattcacacaatatgtatatatatataagtgtgaatatgttgttaaaataagtacagtttacatatgtacacggcatatatgtggcttgcgaaagtcaattttacaagtccaacttcaacttcttgaagcaatacttactgtatatagagatttatggagccaatcgactactttcttcactgtctcagcggttaacaaaattttttgggctccgattatatatcatataatactttccttataattcaattgcgaataggaaattaaaaatgataatattatatcacataatatcttaaattttaactgccaaaattatatttgagatattattggatatgaaatagataaattattattccttaaattttggaatagataattaaatatcag

SEQ ID NO: 133681 - DNA, 1294 bp, Cannabis sativa
gtgcataatgtcttccatatctctatgttgagaaagtacgtatcaaatccgacacatattttgagttatgataatatcgagctccagacaaacttatcttacgaggaacaacctatccagaaagtactctgaaataagacaatccttctagttaaagtattgtggaggaatagtaaagttaaggaagcgacttgggaggtagagtcgcagatgtgggagttgtatctcgagttgttcaggtaaattttgaggacaatctttctataaggaggggatggttgtaatatcccaataagcctaatggtaaataattagggtttatatttatattacgggttaatcaagtaatcaggttataagtaggattatgatcctactagtatatcttagcataaattttaaatcggctatcagtgggtaaataagcgtaatttattaattacggaaatttatatagcatgtgtgaatgtaatatgcgctatttgtggaataaaaatattttcaagtttggcgactttaaagactcgatcgggagccaaaaatatcataacagatttaattgatagatttgacgggaatattatgataaatttatagtgtaagtattgaagtaattaggagtatgtgaaatttaacttagtatcctagaaataaaaaaaatttaatagctaaaaaataataagataactattaataataaaaattttattactattattatattaatattaatattattgttattattattatataatcaatattattattattaaattatattattattattattattataaaacttatcattcggataggtttatgtatatataatatgttttaaaacagtaaaacgtacgaaacgaaacccttcattcttaatttaacgaaattctcatctctctttattcatttttttaattatcaactcgaaacttaacgatccaagctctagttgtagcgagataacaaatccttaaagatgaaaagcttaatgtaagaattaatttcattttaagctaaaaacgattggttttacctagtggttttgtgaattagaatagttatggaggttttgaccttatagaattgttcttgggtagccatgcgactagctttgatattttcttgatgaatttgaagtaattttgagttaaaaattatgtttggaaccttttacagcttaagtgtgaatattagtgacgtttactgtaacgccctgtccaacagggacgccacgtgtgtgcaatttaataaaattcttatatagatactatataattataccaaa

SEQ ID NO: 133682 - DNA, 695 bp, Cannabis sativa
tcttaaaggtgctaagcatcactagtggccaatagcaatgctcatgatttttcttttccttgtattagatttgcttttaatttgtataattaattaccacaaaatatatatataatgattaataaaatataaaatattttctaaaaatatataatatatatatatatattgaagagttaatggaccgttacctaatttcaacaatcattaatttattatcttcagaagatatgtgacaaatgcaaatcggggaagaaaatgggaagtacacgaagacaagtagaaagtatttgatttgaggttactgatatagttataatatacagaaatttccaaatatatatactttttaccaattaatgtccttttttgagttcacatagctgatatggtctgattttgaaaaagaagagttggcaagatttggcaacctattgcactaactagtgacactactatcgatctgtctggattcttttattgccaatttctatatcctaaattaataatcttcttcttcttttaagtatttcaaagttttccgtggcattaaaaaagtaaaataaaattaaaaaataggcttacaaaaagtaaaagagagaaaaaaataataataattgctaaaaaatatcattgatggctagtacccttttcgtgttttttttagttttttttttttttaaattagcgtgatg

SEQ ID NO: 133683 - DNA, 512 bp, Cannabis sativa
ttttttgataaaactttatcaatataattaaattatcttcaattttacaaattttagattcaaatttaattatttaattacatataactgataactgtttagccaaattaataaaattatattgattaaattttactttaaggtaccaaatctgtattattatttcaaaatataaaatattaaataagtattattgaaaatacaatgtaccaaatgtgttttaacagaaaagatagggtaccaaatgagtatattccctttaatgtttattaattattattagtgcatggatgatgatgtagctattgcaaatgcaaactctataatataattctattttgttttattatttttttgatgaaaatttttgttacattattaggcatcctagatgatcgatattaccttttaaatttttagataaaaaaaaaaagaaaaaaatacaaaaaaaatacaaaaaagaaaaaaaaattacaaaaatattatgggccggcccattaaacatttataca

SEQ ID NO: 133684 - DNA, 1009 bp, Cannabis sativa
aataatataattcctcaattaactcatcattatctagttagggttttgctaatccttttcttaattccgggtattacacaaccaatctgagtggaaatcgtttgacgattcggagattagcggtaaatgggtaaatgtcatgttataaagcttttgaagacttatacttaaaattaaaagttttcgtattgataaattgtatggcaaaagcctaaatattgagaaaatacaaaaactgaggtacccatgggactaaccaactggtccaccagatttacaagacgatccaccagtttttcaggccaatcggttaaccagttcgtagaattggtctgtcagttttgcgacagaaaacccaactcaatattctaaacatattgcgaaactcagagcttagaattatacaaaaactacaaatctaccattgatgctcaagcttttaagtttcaaaaaataaaagtttgatacttcaaacaaaaccgaaataaagaacttcaattacacttaaattctaactcaaaatactcattaaaacaggttctaatccaaacaatataccacagaacctaactccctccaaattctcaaagaaacctagcttaaaccattaaattcaaggctataaacaacatacctcaaacctagacaactcctaacttgggtaaaattacaatgaaatcgaagaagattgatgagaaaatcagagtttctcctggtacttagcttggccgaaggagagaggtttagaaaaagagagagctgacttgttttgtttttatctttgaatgtttctacagatttctatacctatccccaaacatctaatagtaataataataatgttgttgagcgttggaccgctcctcatggtaatagtgtcaagattaatgtagatgcagcgatattcaacaatggtcagaaatatggtattgggctggtgttggatatttattttactaggatcttagatctactcacaagtatgttgtctaacaccctaaatatgaac

SEQ ID NO: 133685 - DNA, 964 bp, Cannabis sativa
cattgatggattttttggtgacttttctagtgtcggtgtcttctccgacgacttttccggtgacatttgttattagaagttttacaaatttatttatattcttttgtttggtttcttatattttaaactttgattactttttaatctcatattttttttgcattatctatttatgacttataaaagtaactttaaattatttttccatatttatgaaaaaatcccataaataattaaagaaaaagtacacaaactactatttttggtaaaatatttacatatttaccttcaaagtttttttctatatttttacggtattatataaaaacacaaaaaaaaaaaaaaaaataagacaaccacataaaagtaacaggaaaataacataaaaaataataaactaataacaaaaaattaacaataaaataacaagagtacaatataaaaatacagcaaaagatcatattttatataaataaaatcttaaaaaatatttaaaattccgtaaaatcttatttttgaaattttttttttaattattttatgtttttttgaaattatcccaataattaatggcccaccttgaattgaattgaattgaatcatcaactaatttgtagtgggcttggacgttggagcacggaaatacttgatgaactgtgattgggttgaaaaaggcatgggaagatgcttgagccaatttaattgggtttgacacagttttcatatatagcactttattttaatttgaaaaataacataaatttaaatttgagtataaatatatatgtaaaggtaatggttaattaagagacgacgccctaagttatctgagagtggttcggttcggctcaacgacgtcttcagtttcagattttgatttttatttattaatttactattattaatttaattccaattaatgtttttatggggttaaaattaggaatatttacatcaaaaatat

SEQ ID NO: 133686 - DNA, 1475 bp, Cannabis sativa
  modified_base (1417)..(1427): a, c, t, g, unknown or other
tttaaaaataatataaaataatcaaattttaaagaaaaaaataaaaaaaaaaaaccaattaagcaaaaaatgtagaaattatcctttttcaacttcaaaatttactaatatctaaaattaattaataaataataattaattttaaactgataattagatttgagatttgaaaaataaaagtctacataaaattttacctaaaaattcgaaattaaattccaagtaaaactatgaaaaattgaaaattttgaaaaatattgcatttggctcggatggtatgcatcgcataccattcgcacgcgtgttgggggacatttgatcgaggttggccgcatatccatgttgccgcagcatttccacgcgcggaggaggttccaaacaagaaccctggccgagcttcctcggacaaaacgtgtctgaatgcgcatgttgaccgagtgaactcaggtgtgcgcgcctgcatgggagtgatccccacccttattttttccaaattttaaaaatttataactaattcaatttaaattaaaattcagttctgtaaaaaaataaattgcttaattttttccacactacatatctaaataaaataattccaaatcgtgaatccaattatttttcgtgaaaatttcgtaaacatcaatcaaccattaaataaatacatagtcaatatgaatgacatccaaatcacacatttatcgttttaaatccatatttcttaaaagtaaatcattatcatggctctaatacaagttgttggaatagattttatcaagatctagacttactaacatgtatgttgattatattttataatctaacaccctaaatgtgaattcctaaaaacaataaaaataaatacatataaagtttagaaaatcttacattggtggtagtagaatgtaatagctccttccactcagatctctaacccttgttccattctgtcacagagtaataacaagatctgagtttggatatccttcaggtgttggattctttacagtcttccacactttgattgcgtacttgacttgatatgagtggacatgtactctatcactaaatgctcgaaaattgatgaagaagaagagaggggatttcgaaatagcaaggaaagaggctctcaaatttctagttgtctgacaaggaatgaaaactaggctatcttagattgattaggttatcagagtgagagcatactattccttttatagtatttcatctagggttaggatttaaattatatggaataaataaaaataaaataatagcaaaatattttttaagtggtcggtcataggatgtggaccccatagttacaattttactattttattcaactatttatcctttttttttttcatttatgctatatttttcaattttaatcctattgttgcccctgattttgccnnnnnnnnnnngaccaaccggacagggacacgtggatcaaaacatcttgatacatgaat

SEQ ID NO: 133687 - DNA, 726 bp, Cannabis sativa
attcaagtggttggtgaatgttagatcacaaagtaggttgtttattgaaaaacgaaaaaatataagtgaatgtaatataagttttagagtggttaaccaagtatgaagatattgatgattgcaaggaaacaatagtagcgtatgaaccagggaatgaaaccttagtattaataattgaaaaagaacaccagagtctcaaatgttgacgaatcatcatcatcaacggaagactcaccataagttagtatggtagttcataccaagggattgttagtaaaacagagaatatacttgagatctatatatttttggatgttttagaaatattatcaagatttctaccaaacacaaaaaagaaactttaggatcaagaaataattgggattgttgatatctagtaggagaaatgttgcctctgccacataggttaaatcaatttactttataacactgattaaccttaaataattgggaaatttaaaagttatgtcagttcaagagaaattgatacgagttaaaataactatagatgaacaagattcaaattgacaataagatggaaaattttcaagttaagtgaacaaaattgatgaggaattgtaagaggctaatgaaggtagtgatgaaaataagatttaattaacgaaagaatgaaagcgagaaatagaattaggaacgacaaagaagcatctactttctgataacccaccatgagcttaccttgga

SEQ ID NO: 133688 - DNA, 539 bp, Cannabis sativa
caaaaaatttaatgataaaaatatgaaattaatttaaaaattttaattattcttaaaaaaaatattttcaaaaaatattttatttataaatatgtatcttaaattattaaaaatctaaaaataatttaagcaaactagtttttttaaaaagaaaaattcaaaattctttatatttataaatccatatcttaaaaaaaataaaaaataataattaaaaattaaataaaaatataaattaatttttttaaaaaatagaagttaaactcaaaaaaatattgtgtttacttaaataaatttaaatttttagaaaaaaaaaaataactcaaatttatttctataaatttaatttttacgaaaaaataaattgttaatatatatttgttatatatgaatggattttttgaattacttaattagttttaaaattttaatttttttaataattcaaaataaattttttaagatttaaattaatttttttcaaaaaatattgaaactttctcatttttattttgagggatacgatttgatagttgtca

SEQ ID NO: 133689 - DNA, 990 bp, Cannabis sativa
aacaatgttatattccaaagcgattcatctaatgctattgaagccatactcctcagtcccaaagatatcaagctgctgcatcacaacatccaagaaatcctaaggaagtttcacctaaccgttactcatctcaacctctgggaagcatgttggatcccgaggtcttgcaatcgtgtggcccattttgcggctcaagaggcgaatcggaacttggtgtttggccaattcgattctctcgctgttcttggttccctacagtctccgattgtagatggccatgacccctcttagttctttcaggggtataagttacttagtttattacttttctttttagttcagttgctctgtttttttttttgttagtttccctgtgctgttcttagttccctgctgtgggagtttgccctgtggggcgtttgcttgttttttctctctttgctgtttgtttgttctgttgctcttcaggagcctctaatcaaaaaaaaaaaaaaaacacataaatagttgttattctattatttttataagacaatgcacactttagctatttagcttctatatcaattaattctaaataaagttagcgccaaagatatgatcatatcagaaaacatgttatttaaatcttatttttaaaaatataaattactctaatttttttttttttaaaaaaataattacataatattttaaatgagtatacaatatagatcaccatttataaaaataaaattatacctatataaaatataataaagatgcgagtacactcatttttggatcctatatatatcaccatgtatatatctacgtaaaacctaattatatatattggagaattatgtggtgtacctacatagaccctaattatatataagagaatttcatggtgcacctaaaaataaaaaattacattaatattttaattagtgataatttttttctttaatagtataaaatatataaagataaattatatttttagta

SEQ ID NO: 133690 - DNA, 1153 bp, Cannabis sativa
gtcactaaatatttctaaatatttgaagatttgaagtgtcactaaagagtactaaagagtgaaatagagtgaaatctattttttttttttaatttttattaaatgaaaattattgacttatagagacgcgccacgcgtgactgcaaaaacatatcccaacatacatggagtgtcactaaagccaatttataaatttaaataatatttattttatttgtttatattaaatgtacccacggctcaaggtgggctgaatgcttttattaaatgcttttattttcttaaagataaaatatttttattaaaaaccctttcagattctttcatttttatttaggtttatttcttcttcttcttcaaacacaataggcgcagcctctctctgtgcacaaccatccacaaccgcccatcaccggccagaaccatcgtcgctcctctctcttttctctacgcaggatggaccagggaagaccttctctctcagtctctttgttctcgcttcgcgtgcggtggactccatgccaaacactaactctagccaccattaacgagatgcactcgttatccctgcgaccgaaggccaaaataaagaccagatctgtgatctccgcaccttgacgcgtcatggtattattttcactaatggccattctcttagtctctttgttctatgctcgatttttattcttcttcccttagtctctttgttctttgtttgattattttattttttatttctgggtttttgttgaaatattgttggtattgtaaattttggcttccaaatctcatatattattggtagacgaactggttcttttttgtatatgcagagattgaaattagaataagaggctaatttcgggtcttatgttgttattttcttgagtgttgtataaataaatgtgtatataaattgatttttgattgttcttctaactcttcattgaacaggtacggcggagcgatcgaccttcaacaaagcatgcatttgttttttattaggtacatgcctcttcttcttctaattcttttttaatcagattttttttgtcttctcaactctccttaaatttctctgtgtatagatctctgttatatggtattatctatcactctcttgttgaatctgggtttgaatattttctctaca

SEQ ID NO: 133691 - DNA, 1582 bp, Cannabis sativa
  modified_base (28)..(31): a, c, t, g, unknown or other
  modified_base (287)..(288): a, c, t, g, unknown or other
  modified_base (552)..(552): a, c, t, g, unknown or other
tgtaattaatggactaaatttgtacaannnnaggaagggtataaattttgatatggcttgtattattaaggccaaaaattgaaatttccctaaatcaatcaatatatatattaattaagaaacaaattatgtttcacgggcgtgcggttgtattttattaaattaataattttaattaaataaacatatatattttttttaataaaaatcataagatctattaattaataaattcgttcaaaacaatagaacacatgcacttcagaggaacaatcctccaactgaannacacgacctgtagagaaacaagagtctcttgccaaacaatgagccaacttatttgcagatcattttacaaaatacaacatcagattctcatttcgattgaataaaaagttgctaaaacggtgtccattttagacgagtcgacaactctattaaatgaatgatatttttgactcttgcctaaacaggacactgatattgatttgttggaaaccttaaaaattatttaagatgtgtttagtttgtatttttacatgtctttgttantttctaaatgcttaataatttctgaattgtgtatgttatccaattttttgcacattgatgtggcgataagaccgagcgacacgtgtcctatatttctgatacttggggcggaggtaaatgtccctagcagcctgcacataatttatcagcttctataattatcgattactcgaacagagctgtggagaagacatctgaccaggtagaagattgttatgctgagcaacttacaagagatagtcacttcagaatgatcttgttatgtccagacatgaagacaatccctataatcgtgggattgagtcagagaaatatggcaacctgttttagtttcctatttcatgtatcgtaattatgtaatcattgcaatttcctatgttatgcattgtaagcaaaagggaaatcatccttcatgcattaagtccctataaatagtggcctagcctcattatgaaggggatcgaaaaaattgcttcagagagagattctagagggaaaatagtgatctaagagagttactcagagatcagttgtaagagctttcaaaggggaagaacactttattccttttcttaagtcaatacaatacaaggggagtaggctattaccacactcacgggaccgaacctcttcaaaatcttctgttcatcttactttattatttttgttctcttttaattatattattcaatcacttattatttgactcactatcgttggctaaaagcgaggtcaatattttgctggtttcattgagagcaaaaacacaagttattggtcttaagttttgaccagaaaataggatagttgtacaaacccatagaggccttgttgataagggcaacccaatggtgacggatcccaacgtgcaaactcatacaaatacgagaggaccaccagggacaaaccctgagtaggtcaatacacaaccacctactgtgggccatggagtgatttcttctctggttgggatcacaccatgcgtacaagagactgggaacaccagttcagcagccgatcaatccaatcc

SEQ ID NO: 133692 - DNA, 507 bp, Cannabis sativa
tttatttttaataattaatcataacagtataattttatgagtttttttgcaattaaaccctctcaattattattttatttacacttaaatctcaaaatttaatggtaaaattcgtcacctctactgtcgtctacaagagtagttatgtgccagcatggattatcccatacgtaaacaaatctacaagtgttacattcatattggtccatataattatacatatttaatattattaaaaaaattaaaataactaaaaatatacctctttccccgtaaataatatctctgccctagattataaaaaaaaaaatatctctcccctaaattattttatatttacttcgaactctcttggtctcagctctaatggtggttggtgatctgcgtctgaagtgcagctgagagggcggtagggctcctgtaattggttctcaatgttcgacgactttggagaagaaggcctctataatataacttgaggaaattacattctataccctttttata

SEQ ID NO: 133693 - DNA, 651 bp, Cannabis sativa
ttttagttgaagaaaaaaaagagcccactattagggagacccacaaccaaaaggaaaaggtgattagatgttctcaattttgttttttttttactgtttatgaatatttttttatgtatatatttaatttttgtttcctatttttttcaggctgggttggctgattttgatgttttgaagccgccagtacgtcgtgtaacacgtgctggcgtgaaatgtgtggcttcgaagggccctagtccttcgattcctaaagaatccattaagaaatccacaagtttttccaatggggtaagtattttaagtttttctttttacatatatattttgttttattttcatgtgtatttttttgtttatggaaccagttatttctaaatcatgtttttgttatttttttcactgtctaaattttcttttatcactggttatttttgcaggatttttacttaaaaatgaaactcgagcaccgttttgcaagtaaacttcagatttggaataacccatgggttattgatgagcttaatggaaatctcaccgcttctcaaaaggtgttttttttacgacgcctttttctcaatttctgaagatgggcaatattaagtggaacatttccttgcctcaccttgctttagtgagggaggttcatca

SEQ ID NO: 133694 - DNA, 818 bp, Cannabis sativa
aataaattaaagcccccttaaaaaagaaattatatatgattattgtcacttgagatctcatttaatttcttcaaaaaaaaaaaaaaaaaatctcatttaattttttggacatttaatttgctaatactctttttaaccacaattatacaaataaggaagatcgatgtttacaaaagaaaacaaaatgagaaagaaaaaaaaaaatctctatggactatggtgtaattaactttttatatataattagagataattatacaatttaaatatttaatatatttatcaaaccatataattataaccatataattatactgtaatgatataatttgaagtaattgaaaattttcaattgcatgcacttgagtgtaattattaaaaacttttaatttcaaatattaactactaaaaaatattattttttttgtgtaattattaattgttttaccaaacaaaatattaaaaatttatatgtaattactacactttattataatttaaaatgtatagtaattaccacctaataattatattgtgtaataattatataattacttttaaacacaccttaaaggaatcacatagtatttataatattgataaatactattttaaaattttatttattttgcaaaataagttgttctttttttttgggttaaattactacaatattcatttttttctttccaaaccattgaggagatttcactacaagaaatccagcttttaccggcgcattgttgcgccggcaaaagtacactgactgcgccggtaaagctttgccggcgcagttgtgcgccggcaaagcttatctg

SEQ ID NO: 133695 - DNA, 566 bp, Cannabis sativa
attttagtgtatttttaatttagtcttactcgtgtttggagcaattttactcttgttatcttttatttttgcagatttaaaatagaagaagattaaaaatgtatcaatggaaaaagatgaaaaaaaagataaaagatcgcataaaatatcattgtgcgaaatcaggatcctgcctaggaaaaaaagattgcactccttgaaaacatggggcaattgaatatgggctgcgacccatgaatgggcatgctgcaactcgtattgtgaaaagcagcatcctcgtgtgaacaatgcacacgggtcgcggctcagtaaaggcatgtcgcgacctgccctattatgaagtagaaaaagattgcttttctcaacgtgggcttattgtgatggcctgattcaaaggtagataggatttctagcatgtgcgttttttctatctttttagtccttccatggttatataaggagtgaatttcaattgatttgggggagcaattcagaaggaaatcaaaggcaaaaaaatgagtacaaatttcagagaccgaattcaatattggaggcattcttcaaag

SEQ ID NO: 133696 - DNA, 1672 bp, Cannabis sativa
  modified_base (1479)..(1497): a, c, t, g, unknown or other
gtaaaatattcccaacagtactttgcatcataaggatttatttctagaataattaatatttttggcccctgaacttatgacgctaccagatcatgtcccctaaaatatacgacttgttaatattgacccctgaacatttacatttataaaaatttagtcattctattagatttcatcctatttttccattgaaatactgatatgtctttataaattagtaattttatctcctaaactttaacaactatattaaatcatatcccatccaaataaaagtgagaaagattcaactttttttttttttggtaaatcataaaatattaatttagatctttcaaaaaaatattttgaattgctaaggaaattaataaagaaaccaaaattgtaaagttaactaagcaatttgaaaaataaattattttttattaaaaaatacatttagatataaaaaagtatactaaaaattcaatttgtgtacaaattaaattttaccagaacaagtttgagtctatttgtttctccaaaaatttagatttgtttgagtaagtgtaatattttttttagtttaattttttagatttattttaagaaatattttatatttttattgtatttttaattattttttaaaatatgtgcttataaatataaataaaatagactttcaaaatatttttttatgaataatttagattttttaagtaaattattatttttaattaatttaatacttttatcaaattttttaataattttttaagaattaataaaaaattaatattttaaaataaacttttttaaaaggggcaaataaatttatcaaattttataatggtaaaagaaatagaacctaacagaagaggtatgattattttaccacccccattttgctagaaagactttattcatctccataaatttttgaaagcccaacccccctcgcgatttgggaagataaattttatcccacgttttgagacaaaaattgcggttcccttttttatttccccactaaaaatccttggccatctattttggacgccaaccgttaagaaagtcttattgtttgcaaagtataaactgagagggccagacaaaccgatttaataagcatgacacgacccgctttggaaagagtttttacttttcaaacttgaagctttgaagctaggttctccaagataaagtttaaattaccatccttttgatgggttctaaacacacaggaagcctcaagtatttgatatttctattcgagctttctatccctagaatatcttaaacacaattttcattattccatcaatcgtgttttttctgaaataataaatgatgttttaagcttgactttttgactcgaccaagaaaattttttttccaaacaaccccaaaagttacaggcttccttaatattagctcttccgacaaggaccctacaaaaaatagctacctttagtgataactttttagtcacaacannnnnnnnnnnnnnnnnnntgtgacttttagtcacaacaaaacattacttgtgactaaatcatagtatattagagttagtcccacattgcttatgagtggaaataaattgccctatataagataaatggctactcctcccattaccaattggttttgagatggaactccattcaccttatcccaaattctaaca

SEQ ID NO: 133697 - DNA, 834 bp, Cannabis sativa
attcaattttactatttcagtgattgtttttgtactaaaccatgctccccaatatcaataatgtctctcgaactttgatgtactaaatcatgctccctaaactttcatccatgttggacttatttactaaaattagacaaaagtctttaaatgcaataatctcaacagtttagggggtatttttaacgactttaaaaattgagggggtatgatttttgatacatatcaaaattcgaaaggcaaaaatcctaattagtctttttttttattatcttatagttgcattataatttttatgagattgttttttagttatttttaattattttaaattttaaatttatagttggtagttggtaagattttttttttattattattttaatcatttcgttactgaaaaatatatttttataattttaaaattttactaacctacttttataattaaaaactttaagtcataaataaaaagaaaatttaaaaattccccaataatacattggtctatttacctctcggtttttacaagctctttttaagaaaacatatatatttttttaattgaaaagttttttgagagaagataggtatataactttttctgaaaaaatgaatttcttataagtctatttttaaaatttagaataatttactcactatttttttagtaatatcaaaacactttttcattaaagaagattttcatatatttaagaataaatttaaacttttaattagtttatagcacacattttttaaataggtgtttcagtagattcttatttgtttcgatatacaagagaattttttagtttattttttttttatgat

SEQ ID NO: 133698 - DNA, 529 bp, Cannabis sativa
aacattttgagatatttaaaaaatatttgatgacataaatatatttttagtattttttaatttattatttaaataccaaaaaagaatatcatccttagagaaattaattactatgtattattattactagtaatagaggttattaatgtgtggcaacaccattcgttgatcgtgggatgacactgcaagaactaccaataatagcaactaataaggaattaatatctaataaaataaactaaaaataaaatttatgtaaaacttattaatccaaccaattatcataggagaattaatggagataattaaacaaaattgattcgcaaaaatcaggtccagtataaccacactcgcactatcactccactcaatttgacaaagccccttctcgaaaccattagaacattaatcgctagaataaagaaatcaagaggaggtagcatccattgagttgattaattgtacaatttattaaggaaatatgttatatatattagatgctccgctattcattcattggaataattcg

SEQ ID NO: 133699 - DNA, 782 bp, Cannabis sativa
agagagagagagagattttgaaattgagttgatactaggggctgagctagtttctaaggcccggtatagaatggcaccgacagaattggatgaaaaaaggtctagttacaaaatatgcttgatttgtggtttacgagaccgagtacttctccttggggtgcactagttttgtttgtcaagaagaaggatagattactgcaaatgtgcatcgattatcgagagttaaacaagttgacaataaagaataagtatcctttgccaatgatagaatatctatttgatcaactgcatggaaagactatctttttcaagattgattgtcgatctggttatgaccaattaagaatgttgggtttttgtgccctaactaaactctatttcaatatcatcttgaattttcatttatcaataaaggaacaaaattattttattacttgtttaatataatgcttggttcatatgtttgtttcatggtcatttattagatatatcaattctactaaatctttatcacattgttattcttgattattgtgttatctatacagtggaaagtaatcaagattacgtgattaaactttagtctcacgatttatcaatacataggatttacatagatatgataatcaacaatgttgtttacttacacttagctagtagtatctcttttccaaggtattggtaaagtaagcttgtattggatgtattattatacatcggactggaccgatattcacatggaaatatatcataaactgttgaaaattattttaccaggatct

SEQ ID NO: 133700 - DNA, 507 bp, Cannabis sativa
  modified_base (26)..(28): a, c, t, g, unknown or other
ttcaggggcacaatttagtacatgtnnnagttcgggggaaaaaattactaattagccttaatagttcaatggatttgtgaagtttgattatcttatttttaattttttaaaattgtttaatgagtatgtatttatttagtatttgtgttttatcaaaattaaaatttgatatacagtatactttgaataatatttatgtacatatttaatgttgaatttaaatttaataattaaactttattaatatgatcgaattgtatttagttatatgtgtaaagattaatagaagagagagtagaggaaagattttttattttacattgattgaatagtattgagctagagtttatatacatgagctggagtaaaactagctgagaagagaagcaaaataattggacattcagttacaacaacgaacaatgtttaacaaataaataacagaaagttagttaggtgaaaccaattaacttagcttctcttgacagcccctgtcaaatgaagtgt

SEQ ID NO: 133701 - DNA, 546 bp, Cannabis sativa
taattaaattattttatttttatagaaaaattatattagttatttaaaaaagaatgagagagataacttgttaatatactcacttatttttttaaaaaaaaaaatactttgcttttactattttcttaaaaaaaatttccaataatatttacaaattaaactcaatattaaaataatttctaatacaaacaaatcgtattaatttcataaaaaaatgttagatcgaattaatttttatttttatgtttttttttatcaaagaaatgaaattcattaatcacaagaacaaccagtaacaccagcaagctactgctacaatcacacagaagcttcagttcagcattttgtaaagtaatctataattacagcctttcaatttcctatctttgagactatacaacctatgcttaacagtatactgaatttcctttactattgtagtcagagacagacagtagtccttaaacacacaattatttctgttgttccacaagctgtacacagtagctgcaagtgttgcataaagaatgtcctccttcactctac

SEQ ID NO: 133702 - DNA, 1016 bp, Cannabis sativa
gtaagtgtagagtacatctaaaaatggtgaacttttgatgtatttaaaaaaagttaaaatatatgtacggtacttgaatttggactcaactgttaggtattgaataatgaaggaaattaatgtatggagattgaaagggttggaaaatcgcaaaaacacctatacaaaaattgaactaattatttaactatattttatattggcatacatggccatagaagggaagtttatcagagctgtatatatattattaaaacgaaaaaaaaaaaaaaaacagtttaatatttaattaaagagaactgcctatcaatgcatagtgacttaaatttgtacagaactgagataggtgaggaataatgagatatagtaatgaagctttgtataataaacccacaaagctatatggacattaattaaactaaaatgctgtgttctgttttgtgttcaacaaaaatacatatgaaaatttgggacacactactattgttattagatacgagtaggctctacgacttgacgtttattaaatcaaaatatatcaaatttgatattaaattaaactaattgtattttatcactttatagttatgctgccaaccagtgattaattttagaaattctcagtctatatagtatgtatgcctaattaaagttcttgaataccaatagaaaaaaaaaaaagaatcacccaccaaaaaaagagaatttaccttaaaaaaaaagtcctcgtatttgtttctttcttgggagataaaaaaagtgaaagaaaaagattatacatacatagactacaagtatggccatatatcatttctctttttagaatccacatcataatgactccaacaaattttcaaacccacaacattccactgctaaatttattttgaatttttcttttgattttgtattttttatttttaaagttaataagtatttctcccacattccatgtgagaaataagctcctcttactcttgtagagagagaggtttgatctttgtcaatctctctca

SEQ ID NO: 133703 - DNA, 960 bp, Cannabis sativa
atgacttaagaacaaggaataatcccttttcttagagctcttacatgttatctctgaatataaattcttaataagttttttgaccttttgcccagtgagtatgaatcactatttatatggctataagcttgggagggaagaatttcccttctgattacaattgatataatcagaaagattgcatattaaatacagaatacactaatcaagggattcggacagcttgccatatctctgtgatttgatccaaaaattatagggatttcttcggtgactcacaatgcaaaagctgaaattgctatgtattgacgtgctgttcagaattttcacttctcggctaagaaggcttcgtccgagcgagtatatgtggtgctctgttcggcatatctcttgcgagcaggttcataaagttgattccacgtgtcaccatcatgtgatgccacgtcaaagttcaaaaatttggataacaattcccaaattagtcaataattagtctggggaagcaagagacatcaactttaaaagtcaatcaaggaatgaccaagttgatgcatatggcccgggatcactcgaccaaactctagctaaggtgatcacttggccagggttgacaaaagactactcgaccatgacccttgagatgtcacttgaccatgcgcttgagatgtcacttgaccaagctaaggaagaggatcactcagccatgcttaactctaggtcaatcgcccttgacaagaagaaaagtcactcgaccatgaacaagaatgaagtcactcgacaattttgatcttgaagtcactcgaccttggcaagaagaaaagtcactcggacatagtgaccttgaagtcactcggccatgagtaagaatgaagtcactcggccatggtgaccttgaagtcactcggccttagcaagaagaaaagtcacttggccataatgacgttgaagtcactcgaccac

SEQ ID NO: 133704 - DNA, 846 bp, Cannabis sativa
  modified_base (731)..(735): a, c, t, g, unknown or other
ttctgctgtagcagaattactttctgcttctgcagacgcatacagttttatattttcttatatataactgacatttgcaaaaatacggtttttcaacaagttagctgcagatcgggtctgctctgttggtaataattttattttccgctactaattattaatagtgacagtaatctatcgttattgatggttattagcgacgaacttagtatccactatccactagtaataaatattaatagcggcaagtattagcagtgggacgacgaacattaataatgaggtccgctgctagtttatatttttaatgttttaccatttgaggaaagtaaaataaaatataaatataaattaataaaaattatattttatataaattattaattaatttacaagcaactaaaattatgattaactcaaataaactaatacaaatattgtctttcaaacaaacaaatataaatattatctttgaaaatattatttataattttttttaacaaaattatcatctcctaagcagagagtggcccaaagtttattttgaatgtcagcagtaagtcatggtggaaagacagaaataaaaccctaattaaataaaaaaattaaaatatatatctaataccgtaaggaccgtcagacactatttatttctccatattgatatgatattattgttgtgaaatttttcacacgcaagtgcacatgtcgtgacaagtagtaaactcacnnnnngtgaggtcgatcccacgaggattatagttaagtacgttaaaattaaacttttacttctatttggttgaataaaaattaagaaaggattaaaattagaaaataaaaacagtg

SEQ ID NO: 133705 - DNA, 572 bp, Cannabis sativa
aagtgatacaattaaaaattaaaggaaaaatattattaattattaagtgagattattattatgtgtatctaaatattatagtttataattttgacaattaaaagtaaatactgcaatatattaatgtttaataaagcttgataatttaaatatgctcttaaattctggaacttaacataattaccacccataagttagaaatttatcacacattttttctcaaacaataattaaaaaaaaacaaacaaaacaatttttgcattgaagaattaccttctgtgagcacgagcaatgaaaagcttgacatccaaacttatttctataagatactattctaattcttacagaatagttatatctgtcaaagttacaagttttggagcaaagaatttaccaaattcacatcaatcattggaacatctgaactcttacagtttatcacaagaagctgataactctaggaattagagttatttttacattttttttaactaaaattggcttagttcttaagtttttaattaatttagtaagttttgaatttattggctttattataattttatatgttt

SEQ ID NO: 133706 - DNA, 627 bp, Cannabis sativa
tggctgctgtggaaggaaaaagacaaaacctagtgcgccaaagtggaaaaagattgggcttctatttttagggtatcattttgtaccataaagacccaacaaagaagaaaaggagatgtagtacacctccatgaggaggaggatggcagctaccattttttggagagctttaattacagaaagtacagagagaaggaaagagaagggggacccaagtgcaagagaaagagaaggacaaaagccctattgtttgcatttaatttcccttttcttctacttttcttttcttttctttcttgtctttaaatactagaaacttgatagttgtcaaagaaaggcagcaaccatggataaacaatttcgaatttgaattgtatttttcgctttgaacatgagctaattttcttaaggcttgaatggctatgaactcttatgttgggtatgattaatgtttaagcatattttagtatttatgcctttgttcactcaaatgagcttgtcattttatttgattgttatatcttggccataagtaacaatttgctaagctagatcttgttcaggaagggctagatctagtagttcaacttgaatggagcaagagaaatcctagatttaggtttttct

SEQ ID NO: 133707 - DNA, 518 bp, Cannabis sativa
atcgctagccaatcgcaacgcgacatgtcaagaaagtgctagtcagcattggtgcgtgataggaatgctcataatattattattgcttgtttgagattcttttctctttctactggtatggtatccaacccatttgactctgcaatttaccatgggaatatcctaataaaaagaatatatataatataataaatgtatttttataatttttattaattaatttattataaatttaacaattttttaattttgactgaataaatttagatgtgtatcgttattaatttaaattataaaattatgtaaatagattcatattttatttaagcaatataaatacatttacattgataacaaatgggtatttgacttaaaagagcgagagagatttggttaaagaattagggtttcatttgactgaagagagaaagagaaagggatatatatttatatatataggaaaattctataatgcacttcctcaaaagggatacaccgatacatttttatctgtttta

SEQ ID NO: 133708 - DNA, 1095 bp, Cannabis sativa
ctgaacctaaaaatatttttcacaatataaatctccgttaatttataaattacgattatttactcacttatagcaaaatttaaattttctgcttcaataaattagtaggatcataatcccacttattacctgattaacacataatataaatataaaccctaattatttactattagacttatcgggataatacagaagaacactatgaagttgtgatctccatctctttcttgttctctttcaaattttgtagctctagaatgatcaaatttgcagcctgagaggtcctaatagtactataaaatatctcactaaaaaaagaaaactcctctttaagaaaaaaaaagataaaaaaaattgcagttcagaaattgacccctcgctgcggccacaggtttcctcgctgcgatcacaacttcctccccacggccacgaggttgctcaccgcggcgacagctcactgccgaaaaaatttctatcacctaattagtattttggtcataacttcttcaatataactcaaaattagacaattcaagatgttctggaagctaagagcaagatctaaaactttcttgttgagctccaagtccatttctacctctaagattgccaaatttgtaattaaattctgccttgtaaaatcgagctcgtcgacttctactattttccaccaaaatatgctaacatccctctaaatgactctaaatgcgtgattagtctttaaaatggcctaataaattttaatcacactaattaataatttaaagaatcaatttaagaatataaatacataaattagtcatatttataagacaaaatatcgacttatcaaattcccccagacttgactcttgctcgtcctcaagtaagttaatgataaaatgaatgatgcttaaacaaatttttcttgataaaaaataattttatttcaaaaattgtttatccacttataattttcaaaaaattcaaactcttcaatcattagaatttcaactcaagataattacttttcaaactcaatttttggtgtgtgtgtgtgagatcaatcaactcatcatattactaatattattcatccatgccaacaatcaa

SEQ ID NO: 133709 - DNA, 658 bp, Cannabis sativa
  modified_base (28)..(55): a, c, t, g, unknown or other
attgcataaaatacaattcaatataatnnnnnnnnnnnnnnnnnnnnnnnnnnnngcgttccaaacgagccctataagtgtataacataatttatactaattgatttttttaattttgaaagatttttaaaatacccctaaattaaactttacctctctctgtatgtgtctttctctcttcacgcacaccatctcccccaacaaaaccaacccactgtctccccaccgtctccactaactctaaccaaccatgaagagtcttcatctctgacgaccacgaaacccacgaaattcaccaccaaactccccgtcttcaccatagttgcatgaaaccaacaaaactcgtgtcttttcttcatttgcgacgaccacgaaagctaccaccaaacttcgaccatttcgcagtgacacgaaacccaagaactctgccaaactccactatttactgagataactatttcacccaattcaaaaaggtaccattttttaaaaaaaaaaaaaaacagttattattttttattgttgtgttttgttgtggattttgtgatctctccggtgatagactgaagtgttggattttgtacctataaatgatattctagtgaactaatataatcactgaaatgagtactcaactatttatctctgttaagccaag

SEQ ID NO: 133710 - DNA, 1947 bp, Cannabis sativa
gtaatgggttttatttagggcacaaaacccaataaatatatcgcagtcaacaggcgcgtggttcttcacttagggtagcttggccgacagcttctctaagtctggctaacttgagatcttctcccaagtccaaatggggctcaccaattgtaggctggccaactcctagtcctgtctctccagcatagtaccggagacgagatccagttattgttcctaagggttgtcgcccatgtgtccttccttcagtgggaggcaccaatggagggtcctctcttggaggcaagggcctactattcaaatctaccgggatgtttgtgtcgctttggcaagctgtagtggccagacttgtggtgcctattatggcaacatgattgaccacattagtagtgttcataggaattctagttgtggctggaacatgaacattaggatctgcagtcggtgggtctttagggagacctacatatgtagaaggtgcaatcgaagttcttcttgtgttaacataaaccatggaatttgatcagatacaatatccactcgctctcaatgaaagcaccaaactgttgacctcgaaaagtgatcaatcgatagtggggtcgtatgaatctgatatttacaacgtgttacacaattagaattagaaagtaaagagcgtacaaaattttatagaggttcgacccccttagttaacgggtaatgaacaactcctcttttagttgtattgataccgagggataatactattcaaatcactataggtgagatctgatatagatcccttaagggtacaaagtatgaatcaaagatggcaaatctcaagcgttgagaatgtttgtatgggcgtgtgagagagtgaagaagagagttatcagacttagagacttaggggctgtttggtttcataaaactaatagggattgtttggcaaaattttttaaaaacagtttgttaaagcttaagttttaaaaaaactaaaaaaacagaaacatcaaaatgttgttttcaattttcaaaaacaatttttttttttgtctaagatattatattttatattttttctcacatactcggatcctagactcggagccaaatgggttcatattatggtatggttttaaaatattgattatttttagtaagaaaaaaatttaaaatagttttaaaaaacttgtgccaaataccattaaatttgtaaaatgaccaaaaaccgttttctattctcacatttaaaaacacaattttaagaactgaaaactgaaaacacaaccaaacaagctcttagggtgcatttttttaagattcggacttctgaatctgaatgcacatttgaataataagatattttatttgataattaattataattattaaatagatatatttgacatttataggattagaattaaaaaaaaaaaatgacatttgtgaaagaaaaaataagttcttaaataaaatgacaaaattgaaatctgtagagcccacatagtggtttgaccataagggtttaattaagctattatttatcttttttttttaattccatataatttaaatcctaaccctagatgaaattctatataaggaaagaggtgactattattttcataacacttatcagacgactttgtcagacaactgaaaagaataaagtgaaagcctctcttgaatttcgaaaccttcttcttccttcttcataattttgtgtcctatatatattgagtaagtgtttgcccacacatttcaagttaatactcagatatagtgtggaagattgtgaagaattctatcatctaaggagaatcgagttcagatcttagtaatactctgcgagagaaagagacaagggttagagatctgaacggaatgagccattatattccgctaccactaatgtaaggttttctataactttatgtgttaatttatttcattattttagaaaat

SEQ ID NO: 133711 - DNA, 725 bp, Cannabis sativa
  modified_base (678)..(686): a, c, t, g, unknown or other
agggtcagtcatcaatccaggaagcagccagagtggcaactcgtgtataagaggtattcattctgtgggtgtaaggatccaatggaggcttgaagtggagacgttgcaaatatggtatcagagagcaggtctagctagttttgcaatattaggtattcttaattaatattcaattgttcatgtgttgtgtatagaagtgagtcccacattagctaataataataatactcgattcatttaaaatcattccctcaattttatttggttgaattaaataaaatagcttttctaaataataataattaagatttataaaattcaaatcttctatatatactatatactagtctcaaacaagttatatttataccatttataattatattattcagcgaaatacttaaataaaaataagatgctacaaatgattaaattataacatatgatgatgtaaccaaataaaataaacttaatgatgtataatacatttctcctaataaataaataactaaaaattcaaatcctctccaaataataataataataacatttacttagtttgtctcatttttctccaacaacacacacattcaaaaattctgtttattgataatataattgtacattcaacacacaaacacacaaagaattgttcataaaaataataataataataannnnnnnnntaataataataataatagagaattattttatatactatt

SEQ ID NO: 133712 - DNA, 1110 bp, Cannabis sativa
tttgttaaacgatatgcaaataagttggctcattgcttggcaagagactcttgtttctctacaggttgtgtgcttcagttggaggattgttccgctgaaatatattctattgttttgagtgaaattcttaattaataaagcttttgttaaaaaaatatatatatatagatgtatgaatttttagagataaaatgtgatacaataatttaataaaatggataatttaaattaatataatattaattttttttttttgttttattaaatgaatatgacaataagaaatattttttcgtgtaatttttgatgttaaggttggagtgaaagtaatttttaatactaaatttaataatagtgtaattaaatttagtgatataattgaaggaacttgacgcttttcaaattgtcttttcttcttaaatctgaaggaaaagagtgaagaaagctaggaaattatgtattcaaaaaagaaaattagtatgaaattgtaacacattttccccttaaaacataaagtacaacttaagtggacgatcaacttctaaacaagcgttagtgatgtgattgatgaggatgtgaataaattgatgactacacgaaactcacaacaatatggtttccacgtgtcacaccgtcagctaatatattatacaagtgagtggtagttgagtcggcgtaatggctacgagctagtatattaagtggggttcatttcaaatatatgccccttcccttcgttttggtcagtgggaaatatggtcctattgattttggactaataaattcttcaattaaaaattttgtggaccatttttcactaacccactttaattaatatgaagtgttcatcaaaaactttaattagaagaagattatatgcacttttcctctctaaaagaaaaatgaaatggaattgtgatgatagtcccataaagtagaagtggtcgcaatacggatagatggtgtatatttaggctatttttttaaaccactctatatgtgggttttgtaaatttttaagggtaaattacggcataaatacttaatattttcgattttatacacttaaatacctaatgttttttggtggcaaaaatacctaatgttaca

SEQ ID NO: 133713 - DNA, 1251 bp, Cannabis sativa
tgaaaccaaatagcctctaacattatgctgtgacagctaaaaaaagcttatgaaacctaacaacattgcttgcttatttgatttcttttttttttttttcaataccaagattacactttgtaaacttacaatagattttccttcaaatccatgagagagatttagaaaggaaaaaaagaacacactatgattacatatagagaaacattaaaaacaaataaaaaaacaacaaaggaatctcaagtttggcacaaggagaaaatgcttttgataatggcattggctgtgacaataaccaatatcaattgattcagagaaaggcacaaggtttggccttctttcgccttttctttggtttcggaggctgcaagacaaccttgattgctgcatcaaacacagccttcacattctggaaaaagttaccaaaaggccaaagttagtttgagaattacagaaaaagctaaactaaactcatcaaatttcttacatactattcattattattaaagtagacaaaagataaaaaaaaaaatgtaactttggcaaatttcaaagacaggttaataataactggtaaaacagagaaaaagggtgtaatcaaggaaagggaaatgaacagtcttttcataactttagaacaaatgctcttaaaagtgacaactgaaggacattaattttgaaaaatgagtttcaaagagctagaaaagtaaatgcagccttggactaaacaaatgtattaaggtaatatatgaactgtgatcactaatcatagttatgctgcattcaaatctactgttgattaagtatttatttgaaacacttcttttttgaattgagaaaatggaaaacaaatttaaatacctttattaggaaactagaaagctagagatttcatgtttaaaccattatgaaaataaatgaacctgctgagtcttggaactgcactctaagtaaacagcagcacctattgccttctttagatcttcaccctgcaacaatattgaaccataagctacatctactccatggtattaaaaataaaagaatttcttttaaggaaaaaaaaatgatgatgatgatgaatgattcttccttttaatgtgagagagagtgacttgcctgtgctgatgtgattggagtagcaccaggatgatcaatcaaatactgtttgtcatccctcaaatctgcattagccacataaattcagattttaacacaaagttttggctaaattttcaaatggttcctcct

SEQ ID NO: 133714 - DNA, 1605 bp, Cannabis sativa
  modified_base (773)..(783): a, c, t, g, unknown or other
  modified_base (1068)..(1069): a, c, t, g, unknown or other
ttaaacatgttgtaaatcgtaacgcattgggatgcctcgataggaacacgctatcattaaccttgatagcgagctagagcttttcccacatcttctttgaggttaataatgttagccttgttgcttccgcgagcttagtgataaggtgaacttcaacatccaacatcatttaaatgtcaacttcaatccgagcaaactgactcgttgatactatgaatctcattgaaatgtctgaagctgattagtgaaagtaccagaagcgtcccttcctatagcaagatggatgtctcactattcgtcacttataaggttcttctaactattttacttagttagtatattttgtattttacgctaagtgtctcactattgtacttttgctgagatgatatataattctattagcatcttatatatttttatttttatttgttattatatatattttttattttaaggtaaatattttttgttatatagtatattattttattttagatcatgcatgtttaatttttattttattatatataaaggtgatatatataattttgtaagtatggtataattattttatggctgtatatactttcgttaatatggtatatataatttttttttataatactatattattttattttattattttattgtgggtgtatatattttgttgtatgttatatgatttttgttgtctatagtttatcatttatttaagatataatatttagcttctattttattgtaatataaattttttggtatgtatnnnnnnnnnnntagtggtatatataattttgttaatatgatatatatttttttagtattaattttatattgttataaattctttgtggtatataattttattactacggtatattaattttcagtgatacgatatatcaaatactattgtatatatttaatgatttaatatatttattcgtttttatttcaatacaataatatgcaatactaaaaaaattgtataacttaatttaattattatatattttgtttttttaaaaaaataaaattagtaaatatatttttataattttnnttagctaatttattatatttggctatttttttattttttttaaatgatattttctaacttagtttctaaatttatggtcattttgtatctcagtccaagtttaatatcgaatttataattagattatctagactaagagtattgattgtggtcctataataaattagcccatggatatatataattgttattaatttagtgaaaattacatgatatatgggatttcataaaaaagttataaaaatgtggcatttataggtttgtcactctcctatggtattttttcacatttaattttcttatggtcattgatatgccatatttttgtaaacctattatccaaactcatatttcatgtttttgtttctagcttaattagttttttttttttttagtttattttaaatttacattttaggatatctttctatttgtgaaatttgtaccaaatactattttttttttcaaacattacatttataatttgacaagaaattttttacttttatacatttcttaatttttttttctttttt

SEQ ID NO: 133715 - DNA, 617 bp, Cannabis sativa
ggatggcaaaattaatataaaattagaattggatcggatcggatgggtccaaatccattggatgtgatccaatgcacacccttaccgacaggaccctgacccaaaccccacacctaaacccaaacctaggtccgaaatccagaactcagacctttcggacccggatcccggtccaagtttggggttggggtccatggttctagtttggttcagggtccggagtgggggttatgtttgggttcggagtttgggttgcaatttgggttcagggtttagattcaggtctggttctgggtgtcgggtccaaatcgaggtctgaatccaggtttgggtttggatctcaggtctgggggtggggaccgagtctaggtttgggtctcgggaccggggcctggatttgagtccgagttcaggtttaggtctcatgtcttgggtttgaggtgcgagtccagtctagtgttagggtcggggaccaggttcatggttaaaggtatgggtccgagtctaaggttcggtgctgggattggggtcatttgttatatattaaataatacgactaacattgtattaaaatttatagttgtaataattaatgagtaaatggcggcaaaaccccc

SEQ ID NO: 133716 - DNA, 563 bp, Cannabis sativa
tattttagagatattcatatttagcatgttaatcaacatacttgttagtaaatctagaacctggtaaaatattctcaacatctctatgtaaagaaacgatcttcactagtcacaggggaggtctacctactcgtcgcacatattttaatatatacgcaacttatattaaatcctctcggtcctgcttgtctttgactatgcgaggcatagtaagcgactagaccttatcaaggtcgcatcatctcacaagtttagatcaagcgaggctctatttgagtcattaattaacacgttttttttcctcggggatcagatccatatgtcaactttgtaagagtgtgatttcatatttctaggtgaaatattcgcactataacaattaccatctcctgaaaaataaaaactcgaagtagatgtagttccattactatcgcgagatggggagtgaactactataaattttgtgtctctctaaattatatagtgcggtggcacaatatttacgcagggatgtatcgtgtaatatcccagaaaataaaataatatttaaatagacatatttt

SEQ ID NO: 133717 - DNA, 604 bp, Cannabis sativa
aatatttataattaaattttataattaaatttgtttagtaattaaatttgtttagtaactaaatttgtttagtaacaattcatgtttagtaacaattcatggttagtaacaattcatgggtaatactcatgggtaatacccattaagaagtgttccatatatgtatgtgtaataatttatattatttgccattacctttgtatatataaaaattgtgaaaaaaataataatagaaggtatagataatattgagtattttataaaagaataaataagaacataaaaaagaaactaagttgtgttaaaataaataaataaataaaaagtggtaccagctaaaaaaattaaatgaaaaataataattaatatattagataattgattaaatttgagataattctaaatgtaaccacaaaagaaaagggaaatttcattttaaaggcttaaaaaataccttctaacaaaatttagactactaattaatgtatacattcaatgctatttttttcaatttctacccaaaataccctccctttcatgttccttctctctttgtctctttctcttcctcttcctcgcaccaccgagaccaaccagacccagg

SEQ ID NO: 133718 - DNA, 656 bp, Cannabis sativa
tttacataacctattagtacacctcaatatcaaacataatattgtactaaataatagtaatacattaataccatacaatccaaaacaatactatacaatataatgcatcatggtataccaaatgagcccttaaaaaattatggggagtcattatttgtatggttgaagcttatttttttttaactttagatagtatgattggagatgctctaacactactacaagagttgaatgttttaagtaaatagcaatttttcatattatttataaaataataatatgttagataaataaatagtatttgtatcttatttatgtatttatttagtgtgataataaattttaaattatcttatgaactcataataattatcatattcaatactcataaatttaatttgtatcaaccccacattggaaatacatcagctgaaaaagaaagaaaataaaaggtgattgttgtagctaatcaatgtctggtctaaacctcagatttaggtaaacaaagaaaaaagacaaaaatgatgtggagttcaattcaataataactaaaaattatgtttattttaagcattttattttattttagagtgaaataacactatggattgcaatattgaattattattatgcatcactgaaaatcatgtcatcaa

SEQ ID NO: 133719 - DNA, 781 bp, Cannabis sativa
tgtatatccttttcataaattgaataatgacacaagcatgcttgatcctttttcaaatatggttttaccaacatctaatgtttctctaacacctattcaagattttcctcctacaggtactagaatttctgccactaatgatgctttgcaggaacatataccagcagcaatggacaagaacacaccagtccatacatcagttcctgcttctttttctgcatctgaacctatttcaccagcagcaagcgatccattagtcacaccagattctcccaagtcaccttcggatgcccctgctgttgtgccatgtgatcccacaaacagtgaacatacttcatctcagaatttaagacgctccagcagagcctctaaaccaccacaatatcttagagattatgaatgccactctgtcataaatgacagatcttctactcctcatcctcttgataaatttctatcttataataagctttctgattctcacaaggcttttatccttgcagtaacagctctctttgaaccaacttcatacaaccaggctgttcatatcaagatctggaatcaagctatgcaaaccgagatctttgccctcctcaaaaacaaaacatggaccgttgttcccttaccaccaaacaaacgtgccattggttgtcgttgggtatacaaaatcaaatataatagtgatggatccgtagaaagatgcaaagctcgcctagttgcacaaggatatactcaacaagaaggacttgatttttttgacactttttctccagttgcaaaa

SEQ ID NO: 133720 - DNA, 539 bp, Cannabis sativa
tcattgttgattttgacatatttatatatgtgggcagtaaattgcaataattttggaatgtatttagaagaaaaatgaggacaacatgcatgaaggagtgccagtgggactagttgtagtgtggtgcatatactttaattggtttcaggcacctttagttgttttttttaatctttttcaagttcttaattgataggttatagctaccacttttatcttattgctgttaaaagcctatatttctataatagttacacttaatagttactaaatcttatttctataatagagttttagtaattaaataaatattatgtttggtgtgattttataaaaaagaaaacttactgcttttaactcatttgttaatttgattcattacctattaactatatgagagaggtggtaaacttgtgtttttacattttgtcatgtcgatttttttttgtcaaacttggttgaccggacattgctttatctttgcttgcgtaataaaatatcagtaagccaagacccaacaagacaaaaaataatacaat

SEQ ID NO: 133721 - DNA, 570 bp, Cannabis sativa
tttttggggttttgagaaaagtgtcatatttttgttagtttaaaatgtattggtttaaaaataaaatattttagttttttaagtatagaaaatcaaatttcccaaagattttctctagcaagacatttacccacaacactagaaaaaaagggtctcgtgactcgcgtcattactcgtatccaattctaacgaatttgtaatacggaaatttaaacaaagtacctataattctacttttttttttatttattttacatatttgcaaaatttattatctattttttaaaatattttttttttcacttgtattttttttttcagtaaacaatagaaaaacaaccctcggtatttttgttaaaaaaaaaatagttaaaatccgtaatatatatgtggttatataacagaattcttagtttatgagaaattattagggacccttttttttaaataaaaaaaacaaattattagatgttgcccgtaaagggtcagcatctgtagttagttaaacctaaatataattaatctattgcaattaataataaatttgttcatattgtttatttttttatt

SEQ ID NO: 133722 - DNA, 512 bp, Cannabis sativa
caatctataagtcattttgaatgttatgtctcgtgttccttaaataatattttgttccattttacttgtttttatggatctccgattgagtcgcctagacctcaaacttggaaaatactaaataggatcgggagaaataatccgagcgacttttggcttatcatcggggattttaacgctttcctttattctgaagacaaacaagggggcaatcctgataggggaccttcctctaactgcagatagcttcttgactctttcaaccttaccccccttgatgcgaaagggcccctgctcacttggaacaacaatgtggcctcccctaaaaacattcaggagcgtattgattggggaattgtgaatagctcctggctcaacagctaccctgccgctcttctcacccaccttggtttcttcggctctgatcatcgtaccttggagttggctacctctaataccaattccaccactctgggagttattaacaaacactttctttttgaaaatgtgtg

SEQ ID NO: 133723 - DNA, 1450 bp, Cannabis sativa
tgttggtttgtagggccagtcatcattccaagaagcacccagagtgatgtactcgtgtataagagccatccttccatgggtgtaatggcccaatggagccttgaagcgaggacgttacacggttgttggaattagtcaaagattatgactgtgagattttatatcatcacaggatagacaatgtagtggcggattcttttagcaaaaaaggtcccgggcaagtttttagtaccacagagatagcatcccagttggcctcagatatgattaaggctggacttgagtttgtgattgggaaattacataacctaacacttcaatcaaattttttgaaaagaattagaaagacataattagaagaccctgagttagtttaaattcgagatgaggtattggcgggtcgacctaaggacttttcgatcttgaattatggaatgctactttacatggcttgggtttgggtttccaaaaagtaatgagctcaaaaaagtgatacttgatgaggctcatactacaccttatttgttccacctgggtactaccaaaatataccaatacttgaaaccctattattggtggcgtggaatgaagaaagatgtagtggaatacgtgtctaaatgtttaacatgtcaggaaatcaaggaagaacataaaaaaccagtagggttattgcaaccactagcacttcctgaattgaagtgggaggatattacgatagacttcgtagttggttttcccagaacaacgagaatgtatgactcagtatgggtcatagtagaccatttaatgaagtcagcacatttttttctagtaaaaacaacctatacagtggatcagtatgcatagttgtatgtgaaggagatagttcgtctccatggagctccaaaatccattgtttcaaatagggatccaaagtttacattaaaattctggataagtcctcagactgacgggcaattagagagaataattcaagtactagaagatttattgcgagcctgtgtgaaggactttgagcgttcattgagtaaatacttgcctttgatataattttcctacaataatagctatcaaagtacaatagggatggctccctatgaaatgttgtacggtaggaagtgtcgttctccaattcattaggacgaaataggggaaaggaagtatttgggtcttgagttagttcaaagtaccaatgaagcaataggcaatatcaaggctcatatgcttgctttgcaaagcaggcagaaaagttacgctgatccgaagcgcagaggcgttgcatttcaggcaggagaacatgttttcctgtgagcttcaccattgaaaggtatgaagcgctttggaaagaggggcaagttaagccctaggtttatagggccatttaagatactcgagaaggtcaggtaggtagcgtattggctaaccttaccaccaccgctgtcggctattt

SEQ ID NO: 133724 - DNA, 934 bp, Cannabis sativa
aaaaaaaaaaaaaaaaaaaaaaaaagactgtgagatatgagatctggagtggagattggcaaaagcttgcttctctcgagcggagccactaccaagctagtcagccttttatcggacagttcaaatggacccaagcccgaggtccccgtttgcctctccctcctttatttttcttctttttcagatttaatggcaaaccacttcgatagccaaagaacaacaaaatatcatgttctcctttcgcttacaaaatacgtcaaaaacccatagaagttatctcacacaccatgcaaccttctctctcttctcgtgacactctcccttccaacagagtaattgcctggggagatctcaaaagaagaagaaggtctcaccttttttttaaaaaaataaaaagttatttaccgcataaataattaagtttaggtatttatttacaaccgtaagttaaacttaagtatttatccgacaaattactcaaaaataaataaaaataattaattttttgttagaagatgagagatagagatgaagtctttttataattataattataattattttctgttatttatacttatttttcttagttaaaaattaatgatagtttttttaaagaaagttattacatggacaaatagctcatggcatataaattaaagtctatttaataaaaaaaaaatagtaaccaaaataacacaaatataggaaaagatttcaataattacatcaaatatgtaacaatcatggttacatttatttttagtcattggatcacaattgaatggttgtgattaatttagaaattaaaataaataaataaattaataacttgcaacctgatggtaacctgatactttattttcttataaaattttaattaaaattaattatgtttaaaattaaattactaataattatttattaatttttt

SEQ ID NO: 133725 - DNA, 707 bp, Cannabis sativa
  modified_base (680)..(682): a, c, t, g, unknown or other
tttttttttttttttttagattcatgacctaattcactactatattatatatttacatgtttctttttattttaataaatgaataaattatatagattaggatgtttaattatttaacgtacgttataaacattatgtatatactattgttaattaataaactaagactatatatatatgtagatataaagagatgattatatattccatacaccatttatatataatgaactactataatctctaaattaactaataataactttctcaatatatatttgttctcatcggatgaatagtgtgacattactagtcaaatctatttaatttctagaaaaaattagtagcatcattttattatcagatatactaatatatatatatatatgagcattattattacctccctatgttaagtattatattgttgataaatatttaaatttaatttttaatggtaataatacttaaattatatttttaaaatttccgtaggtacttgatcattaagtgtaaagccattatccttatatcattttattagtatatatattttaattagtttttaaataaaaaataaaaattaagactaattgggatttttttccccgtactttgatatgtaacaaattatgccccatgaacttttaaggttattaaaaatgccccctgaactattnnnattgttagatttaaggacttctgtc

SEQ ID NO: 133726 - DNA, 950 bp, Cannabis sativa
aataaaattttaaactgatttacgtgcaattatgtttacgattgaatttaaagatacagttagaattatctattttagtgatggattatattttgttattagttttttaattaatatttattacttcataatttttttttaattttttattaatatattttaatatatatgtcaaatttaacgtaatagttaaaagttaacagaaaaaaaaaaaaaatctagtgaatgattaaaagttaacaaaaacaaaaaaaaaattctccgttaaaccaagtattgccgttagataagcaattttaatatataaagatataggcttaaaaaatattagtaaggcttagtatttttaaattattatattgttatttgtgtaattaaatattaaattttatgtaatttattattttaactattatataatatctctaattatttacaaaacgtcacttcatgatagtagtgagtaccactgctgctaataatgctctctttctatatataatatacatgtttgaatgcttcaacagaataccagttattctcttctattttctatttgctatactactttatgccgcactaaccatttcacatggggtacattcctatcataatagcaaagttttgggtacaaaagtgttccttagacaggaaatatgatagtggaaataaacaggacacgcttattgaaaatttgggatataagatttttatcagtcccgtacgatttttgtcaaaataaatgccatcgagctactaccaaaatgttataattttcaagcacttgacagaaagacattaactaatatttaatgttgctttaaatgccatgtcagacaaaaaacaataatttgtgttaatatctatttatatatgtttgggtaaataatattttggacctctgttttataaaagttaccaattagaccctgtgttttgttaaatgacaa

SEQ ID NO: 133727 - DNA, 563 bp, Cannabis sativa
  modified_base (536)..(537): a, c, t, g, unknown or other
aactctcatggtcgagtgagtttgtaactctcatggtcgagtgactttgtaactttcatgaccgagtgactttttcatgatggggccgagtgacattatcacttacgtggccgagtgactttttacactcttgtggtctagagacttttgtaactgatgttggtcgagtgactctaagggttactctttggccgagtgactttcgaaagctaaagtgaaatcagttttattcaacatacactctacaaaaagtctgggtcttgatggatttggatatggttttttcaacagtctttgggcagagattggtgatgatttatctactgttgtgatggatttttttcaaataggtgtgcttccgagttctctaaatgaaactatcattttactaattcctaagattaataatccatcttctacagctgattatagaccaatcgcttgttgtaataccctttacaagtgtatctcaaaaatattgtgtgtcaggctttcagaagtgcttctaggcttaatttgttgggttttatgccctnnataaaactctttacaatctgattagt

SEQ ID NO: 133728 - DNA, 590 bp, Cannabis sativa
ggtttcgggtcgggtatggagagttttgtgtggtcgggttcgggtttaatggccaggtccgaatgaaatatttttggacctaaatgatattttgtttttaaaaataccatctttttttttttttttttataatttttaatattttttttgagcctgaattgaattgatttgcacattgaatagtagagatgagatgatcggcgccagagatgagatgacttttaggaggattaaacttttgggaaaatacgattgaatattggagatgataaaaatgagatattcactttttagagtttttgctttttagtttttagttctgtacagtaagtaaatgtaataatgataattaaaaaatgtttctaatttttatttttcggatttcagataaaaactcaaaatttattgtgtttctttaaaactcgaacccgatacccgtatagagcattttcgggttagacccgacccgaccatacgggttatcagttttttggttttttttggtagcgggtcagggcgggtggccgggtttttgggtttgcgggtgtaacaccctaactagcataggcgtattacgtgattttaaacat

SEQ ID NO: 133729 - DNA, 998 bp, Cannabis sativa
gaaagttgtataagtttgattaataatgttgggagattgttattgttttgcatatcatcaacatttgaatctccagatataatatatatatatatatatgatacatatatatattcatatataacaagcaaatactaatttttttgattgatttatgtgatcatgaatcatataatgcatatatttataattgcatattgaccgagttgatagttatttgtttgctcattctgttgttgtgattaaaaatataataaggtagatgagtcactcctttcaattttgtctttaagtttatttcttcatatatattaaaattttacaaataaatatttgaaaagctagctataagttattatgtataatgtatatggaaatgcagactttcactaaaaaataaggttaaacaataagtaatttttttaaacactaaatataagtatttttcttgaaattaccctaaataataagtaatttaatatcactaactacacattgacatatattaaggtgtatgtaagctaaattatctaagatgcaatttcattcaaccataggctcaatatgactactccaagtttggttaacaattcttttgaaaatggtactaattaattttgcttattttatttgtttagaattagaaatttaattttcccatcatcctcgtcagcatataattgagtcaagaaaaggttgttgtgaaagttaattgaaaattaaaaactttgattctatgcaatcatgtgttatcgattggagctttgagtttcttttttgagatgttttcaagtctaaattaagagaaagcaaaaacttaacaaaatcatacataatcaaatgtaaaccaaaattaatacattagaagatggtaaatcactattattaattacaaacaacaagatcactatcataatattattaatatatttaataacaaatatattgaataattaaatgataagaaaaataatcataatcataattataatattaat

SEQ ID NO: 133730 - DNA, 2305 bp, Cannabis sativa
  modified_base (1964)..(1970): a, c, t, g, unknown or other
ttttggagtggaggggtttgcaacagttagttcctcaaaaaggtcgataacctcccgggcaggcgccttttccttggaaggggtcccgtcagcacacctctagatttcttggctggaggagatgtgctcgagcttccaccaactctcttcttcaaagcatcaagcatcttctaagacatgctgcatggaacaaaaacaacatggttagagaaaatagacatcagaagcataaagcataatagtcaagaagcttaaaaaaaggacggagtagtatgcagaacgattgccgagcaagactcgaaagtctgtcatcacctaacaagcctcttcccttagacataacaactttcctttttccgagcacgggagaaggcagccgagcaggcaaactgggctccctaatgcgaattgcatgttcaataggcttgggctgggctggaagtttcttcctccttctgagcggagtcacctactcttcctcagcctcatcttcatgattcaagggctcctgagcatattgcttggcccttgcacctcccttcaacttagcctcgcgcttcagttgaatcagctcatcctcttaatgagctcgttcagcccgtctagcaccaaatttccctcttcctccccttcactagcttaggaatgaaatccttcggatagagcctgtacttcataaagttctcctcggaggtcaactggataatattccggtcatcccctggtagctgagcaagctcttgagctctatccgtaagagtaagagtgagaggagggtggtgatatgttggaatctgctggaaccgagtgtgggtgatgcccgcgccatccatcatgaagtactcatcaacaaaatgcctaattttactgatggtcgaatccccgctgcccgtgaaccacttgaagtcttgttgagagaaatagaagtaccctgacctgccttgcttaggggtggacttcaaatcaaaaaaccaactaacctcgtggggagaaggcatatcccacttctgggaggcataaaggatgaagagggcagacaaatacttaatgcccttgggagtgaactggtttggacagaggcggaagaaatcttccacattcttaaagtacgggtgcaaaggcaacaatgccccttgctaggcatgagcacccgaccaggcgcacatccccctttcagggtttgtggctcagttattgtgggcgggaatgtaacagtccaattcgtcgaggtagccaccctagtcgagtgcccgcaggcgcgcctcagtcaccttggatggagggctcacccacctggcacccaaggtaccttgccttctgtgaggaaccgtagtagtaagttcctcattgacgtagtccacgccctcaacctggacgtctccatcaacatcgactggctccccaacctcattgtatcccccatagtttgagggtgcaacctcttcctcttcctccgcctcggagggactgccaggacggacatcgtcctgctcttcaatctcctggacctcaacgtacccttcatgatcctcctgctcctgaatggctagatttttttcggcgctgggcaaagttgcatgctaagccacttaagggtcagaagcgtcagccatacgcatcgtcttttcggtacgagccatcattctatggctggacgaaagattcaagggagaatgtctttcactggaagaaggtgggttagaacagagatgaggatggtcctcgtgcaagagttgaagcaagtcctggtcaattcgatgttccttctcccaaaactcacctgggttcatctacaaaagacaatacacaagatgagtgtttggtcggaatatcaaacgttaaaaacaagaaaatatgccgacaaggagtactcaacagattaaagaataagaatgttcaacgaagagccaaaactcaggaaatttgaaattttccagaattagggcaaaaaatttcatgaagcnnnnnnnaagcaagatgaaagacaggcattaagcattttagaatgcaaacattatggactgtgaaatcgcatgaaccaatgacaaaggagaatcacagagtttctaaagttagggtttcctacatatcttctacaacaaagtcgaaggtggattcaaaaagtaaacataaaggaagtggagaacttactcaaggaatcagatgtcaggattcaggtaacgtcaaaccaaatgagtagtttcgatgaaggcacttcaacaaacttgaagccacaaacctctcttttcgctctgaacttccttagcaaagaaggttggtgaaaatgactttgtatacacatgct

SEQ ID NO: 133731 - DNA, 1604 bp, Cannabis sativa
  modified_base (27)..(34): a, c, t, g, unknown or other
tcttgaacagaaggagtcattatattnnnnnnnnatcaatgtaagattttcttaaacccttatgtgtttatttcattgttacatttaggatgtgaatcaacatagttgttagtaaatcttgatactggtaaaatattcccaacacacatatatattaggaaaagaatattaaaaaaataaaatggatatagtgacgtgcaacatgggtagctacaacttttgcagtctttaaggcatgacgtgctttgagtaactcttaaggggtttagtgacccacactgaaaggtcactaaatactgcattttcagtcacccacattagtgacgagcagtgataattcaccagaaggttttaaagtctctcattataggtcactgaagcctctttttgtagtagtgtaggagtaattacatgttttatttgttataatatgtaattctattttgaaactaaaatcgatcctataatatatcccaacataacttacatgatcaaaaggaagattcttattccaaatagcactaactttatttttttgagtatgcttagctagataataagcaacaaaattagcttctctaaaaatataaatttaaaatcaataaagcaatgtcttggcatgatatttttaatgctccaaagaataccatctacgttgtcaccaaagtatatgcttgaagaagagagaagagaagtgattttagattgaagtctacgggcaactaaatcccatttcttatcgccaataactcgggtctgaggctgttaaagaatctgttgaagacctctcgagcaaagactattttcatctctaacaactgtaatactgatgtacatctcttactatttactatttggattctacgctttgatttgtttataaaatgataattttatataatttatagtgttgaaaatatgaaataaattattttgaaagtgttagatcattttttagcaatttagttatcaaaatattatttaatttattctgcaattaaaataattttcttgtgttaatttcgtggctttgattgctcttttcctttaaaggaaatatttatttacagctgttatttttgtttaggaagcttgtcttacaagagaaggaattctctttatggaaagttgcctatttttggaaaacttaactttcactttctgctaaatgttaatttcggttttgctatgtgtataacaaatcaaataatttttatttagcagatattgaagaccaaatcgtgatcttggtccttttcaaaaagtttactaatctattgtagtagaattcgaatttaatgttgcaaattagggatttttttaggaaagtcttgtacagctttgaaaacgtttttgtggttgtctctagggtttctatgttctataaataggacctatagagaagcaaaatgttacttatctcttcaagactcatattttcatatcttagttttgtgagaagagtgtttcttttgtaaatacatagagtattcaactaggttttggttttcttgtaatgatgtcttgttgttcatagaataggttgaagagaagctttgaacaagttgttggaattattttagcaggatctagatttactaaca

SEQ ID NO: 133732 - DNA, 877 bp, Cannabis sativa
aaaattataaatattaatttctaaaaaggttttattaaatactttaattaaaaaataatttatttaagtctaaaaatagaaatttacctatcagtgacttgttataatagtttataagaaaatgtaaccatcatagttacatttttattgtaaccgttgaatactcacccatatttatatatattatattttatcattcacaacattagacaagagcttttttccatagatgagtccgtgaatgagtaatgatagcacaaaacatcacaaaataattcaagtaaataataatctatttaatatatattgatatttttttttctaatgaattactacattatattatataaagaaagtaaactctttttttatttattttatttttgaaattttatgtgaatttcattaaatgccaatgagcagacattacttatcatagatagattagcacttcaaggccaccaagtcttagaatgatccattgtatttgtaattgtaagtttggacgaggaatgaaatatctgattttaagtgtgttgtgtaaattttttttttttttatttcttttaattttttaaaataatatataaaatttttgtattcaaccaaacaatttatatatttttcatatttttctaatttttctataatcatattctccttcataatattctctatactataatcaaattattttgaacacttatttcaaacctctcctaaaaaattattttgtgtatataaaatttaaaaaattataaaaatattaaaaatttcattcaatcagtattcttttaaaaaaaaaatttattgtttttgtgtattattttttgggaaaaaaacaagaaaatacaaaaaaaaggaaaaaaaaattaca

SEQ ID NO: 133733 - DNA, 1140 bp, Cannabis sativa
ttttttttttcacataaagaaaataattacacaaaggctccctaataagatttgtctttatagaaaatttatcccttaaatcatcatccaatctcaccctagtaccatgtccaaaataattataaccatttctaagaatcaatgaaaatttaaaagtttcctcaaatctcgccactcaaaaaaaatatgaacacttaatcttggcaatttttttaagcaaatatgtgctaataaccatcttaccacaaagtttggcatgtgtattttatactctagaaaattctaagcaataaagatagcgaaattggcttaaaaataacattttacaagaataaatgaataatttctgaaaaatttaaccatgaaagtattaatatgacaaaaattaagacacatgcttaaatatgctaaccaccccaaccaaaatcagacaatgtcctcctcattcaaaaatatatatatgaaatgcttaaaatgagaacattatgagagtaagccaatacaaaatgttatgatattgattcttaggaaaattaaaaataaaggaaggaataaactaataaaacaaaaattaaagcataacgaaaataaataaaaaaaaaaaaaaagaaaaggtagaatctgattagtcttggcgaattagagacaagtctcctcaggttggcttaccaactcaatattcttaactctacagtatcaaaaatgaatttccttttatcttgtgtctcaaaatagaagtattagttacattttcaagaataagaaaatggccattgtctaagtcgtagaggaaatagtgtaaatgactaagtaaaaataattttttattttcctcaacgactttgtctatcacatcagtatgatagcatttcttttcatccagaattaggagaagaatggtagaatgagaaagagcttcattccgaatagtggtggtatcattctcctctatgaataatgtgggtaccacatcagtatagtaaccctcatatgcacttggtagagtggattcttcaaaaattttaccaccagtggtagaggtgacacttacctcgtcaaaattgtgaaggatggtattggaaattagtgcttcattcaccagttgtagagaagaaccattagcatgcgaacttaccaggt

SEQ ID NO: 133734 - DNA, 588 bp, Cannabis sativa
gtcgcggttccacctcaaaattttgagaattcttagaggctaccataattggtactgggtttcatcacaactgttggtgtggttcgtatcaagggaatagaaagcaagtggcttgtgcttatcattttctatatgcctgcaggtatgtctccacccaagcagtcaataacttccaccgcacccttcaagcgtgcatccttattcctgcctaagcgacacatccctccgctacccttggaagtagccttcgtatattcagattttcgaagcactttacctatcgatggaatcgtaagataatggatacattcagggtgcacgccactaatgatctcattcttcgcatcaccggggaagatgaattttttttgcccccaccaagggggggtcgcctttaatgggcacatcatggaatttggcaccactttgcccctccacccactttttgtcgatgtcttggtatatttcagtctggcgcctctccaactttccccatggtgttggaatatatattactaggatctaaataaactaacaagtatgtttttaaacatcctaatatgaatttctaaaatgatgaaaataaac

SEQ ID NO: 133735 - DNA, 522 bp, Cannabis sativa
ataatttgaacggacatgcatgctttttttgaaagagaacatcagttcattcgaaattaaccaagcaaaacaggattgacagggggcaatccttcccctacacaaacatagtccatgatgtttcctagtctagtttgggaagctagatcattgactcccgagatcaaatcacggttagcataagcaaaattacaatattcaaaaaacttaatcaaattcagaatcttaaagaaaccaccagcaatcttccaatccggaacactccgtttgttcaacgcattgacagccaccaagcaatccgagaaaaggaagatggatgtccaacgctgctcaatggcccactgtagagccatggaaatggcttgaagttcggcatcaagagccgaagtgccttcagtactcttgcagaatgagatccaagtagaggaattcctctcaaaagcgacaacagctagaccgcatctcccatctttgaaggatccatccgagacaagaatgtttgaattgaagggggccctttgc

SEQ ID NO: 133736 - DNA, 1298 bp, Cannabis sativa
gtcccagaaacagatccagccatacactactacaaaatagacttttagtgtcggtttgagtgatgtttttttttaaaaaaactgacactaaaaactattctaactctttggtctcagtttataactcacacaaataatgactttaaatgtcactaaaagtataatatacatgcagttgagtataagtgtcggttcataaccgagactaaaagatcatttggtctcggttataaaccgacacttaaagggtataacaagaagaaaaaaaaagaattttttgtatttttttttacttaattatagaaaatactaaaaaaaagtttcagatttaaataaaaaagtaagaaatttatgttttttttttataataaaagaaatactaaaaaaagtttccgattaaaaaaaaaaggaattttttttgcttaatgaaaaaacttgttaataaaagaaaatacaaaaaaaaaaaatttaagatttaaaaaaaattaattttttaacttaataattgaaatttgaatttactaaaagaaaatataaaaaaaaaagttcagacttaaaaaaaacaaaaaagaagaagaagaagaagaaagaaagaaaaaatttgtactttttttaaattaataaaaaaaattatttttaataaaataaaataccaaaaaaaaaatagattaaaaataaaaaaaaaaaagattttcttttataatttgagaatctataaaattgggaaattagaaattcatatattttcatttagaggataattttagaaattagttgtatttaaaaattttattatgaaagttatttaaaaaaattattgtaaaagagaaaaattatttgaggactaaaatgttattggacaattattcgaggtcctaaaatattgttagagaattattttaaatttaattataaaatattatatttaataaaaaaaattatatttttctctcttttttttaatagaataaatttatatttaattaaaaaaaattgttattaaaaaaataacaaaaaaaattcagcaatttaaaccaaaaaaataaaaaatatataaatagaacattataaaatattatattttttttttctttttttgtttacttattaaaaagaatttatatttatttaaaaaataacaaataaaccactctactaacattttgttatagcatatacatcagatttttgtatcatatttttattcttttttaagaatatggaaaaaaacaaaaaaatacaaaaaaggaaaaaaaattacaaaaatactatgggccggcccattaaacatttataca

SEQ ID NO: 133737 - DNA, 1123 bp, Cannabis sativa
  modified_base (57)..(67): a, c, t, g, unknown or other
cacaataaataagtgatgaaaatacttctgtttctttattgataattaaatgataannnnnnnnnnnaaatagagttttatttagagcacaaagcccaacagtaatgtactttgggattatactatttgtaggttcgtgaaagcaaggaagctccaatttgagagaacaatatgtgggctaaaatgcttcaatggagaaggaattttagtacggacactatccgggaggtaacttatgtcaggtaatatgactgtgtcattctgtacaaactatccttttttgttatctttaattttcgtttagaattcaacatattcatttatctcagtcgaacagttgtattgatatttttagctagactatatggaattttgtttccaagatttattgcattcctttgtattacttcttttagtgatgggattctgaatcctgattatactaattgcccatcggtatattttaattggttctcccaaagcaataaagagttactcacgttgactcctattcatgaagaagtatgtttacatcttttatgataaatcattattgtaaacatccataaagatataacacttatatgtattaatgtcactcacattgtaattaagaccattttttggcattagtatatcattggatttaaaacttcatgtaattttgacatgacttttcctaaatgtgaattgaggtagtgactcagattatgtatttatgctgccctatatattaaggatagaatattgagatgacaattgtatatcataacatgcctaagaggggtagcacaaacagttgggcaactacatatcaaatactgtagttttttactacaaacatggtaaacattggtgggttgccaatttaagaaaagaaaacacactattcttttaggtatagtcataacaagtatatttgaaatatatgtgatgaaacataacatatgtacttaaaatagtctacacaaaatttgtgcattttgactcttatgaatttgagtataaatctaagaacaatatagtttgttagtgttattattttgtgacagtgtatgttttgttcaatgtctagtcgtatctggatttttagactgttatatctgcactaacgtttgtttac

SEQ ID NO: 133738 - DNA, 879 bp, Cannabis sativa
  modified_base (70)..(73): a, c, t, g, unknown or other
cgtatcaactttaggagtcagatgccggcagacgatagggttgtcttataaaaattggaaagaagtcaannnnactctgaaaaataaagtttggaaatatttacaagtaagtcaagtaatagatgcactaaattattaatgacaaacacaaagtagctacaattaaatgtcgtaaatggaattaagtcaagtaaacgttgggacctgaagaaaagtcagaattaatattaacactgtttagtttattattttataaactaattaattaactctttttattcatagaaaagctcagtgcctataaatattaacacactcatcacatacagcttaatattatctgctaagctcagtctaaaaatgatgggtctgtttccatgcttctactcactaatcttcaatctcctctttcttacttctttttcttctctttccatgtcttcttctccattgtgccatccccatgaaagctctactttgctccactttaaaaactccttcaccatcaatacatcaaacttctacgaggaatgttctagatttaacaattatacaatttcatgggacataatgagcaaggattgttgcagatggagtggagtcacgtgcgatgacgtcacaggccacgtcatacgtcttgacctcaaatgcaatgggctttatggcattcttgactccaaaaacacttttttctctctctctctctctcatctccaatctcttattctctcttataatggtttttatggctccacaatatcatctgaatttggtaagttttcaaatatggttcaccttaacctttcttactctgttttcagtggccaagtccctctccaattgtcttacttgtccaacttgcttacacttgacttgagt

SEQ ID NO: 133739 - DNA, 594 bp, Cannabis sativa
taagcatacttaaaaatttaacaaatctcttaatataacatatttaaataaatacactaatattctttaaaaacagatatccattatttgaccctaataaaatacctcatatcaaaatttatactctccattaatttgtacaaaacaattttactattactcatttctacccaaaatacccttcaaatttaattttcctattctctctctctttccgtctttccctgtcgttccctctctctctgtcgttccctcttcgacttcgacgctgccccacgacgacgacccaacgacccaacaacgcagtccacgaccacgacccctctccggccatccacccacgaccccgacccaaccctctctctatctactgttctctttctctctttctctctatctcttgctctggagttcgacccacacacccacggccgacattggaacccaatcaaatttcagagaaaccaccacgaagtgtcgccaccaccaaggaccgtgttcgtcgaaaccgaacagaggccgtagccaccacaactacgaaccgtcgccaccacaaccactaacagtcaaaggtaagtttttttcttattaaaa

SEQ ID NO: 133740 - DNA, 604 bp, Cannabis sativa
aatatgtaaatatataatgaaacacaacgtgccttgcacgtatttgccgcctagtaatatataaaatgcctatctaacagtttttgttatgcacttaacagaatataccaaaaaatttaacaaaaaaagttaattttaacaaacacatattcaattcataagtaacccaattttatttacaaaaaattatacagatcaagacaacgttttgtcatttacacaagcaccaattcattctcacaactcacaaatcataaataaataaattgtgactctttaaaaagttgcaagaaaatacattaactaataatataaataatgtttcataatcataatttagaacaattggaatcgtttcttaaacaatacaattttgaaaattgatcagcccctgacaatgatcaagatgttgtgctattgtttgagactgcgtttacactggtcacaacttttcctgatgcatgggattatagtgctattgatgaggtgtcaataggagatcatagtgcttaacaaagaattcttcagggtcattccaataggcttcttcttttctctttccatatctaaaaccttaccatatatacttgcccaagaactcctt

SEQ ID NO: 133741 - DNA, 1235 bp, Cannabis sativa
atttggtaaaaaacaaaacgaacatagttgcacaatgattataaataaggaacgaaattcattaaggataacaaagcattcaaacccgggattaaaggctgcttggttagccagttgtttaaaaaatgaaagatgttccaagtttaaagactgcttggccaatcatttagtctcaaaataaggcttactagccaaacaaacatataaaaaaacaagatagtaaagaaaaggaaatcagacagctggagtcccatgctctttgtaaggatcagctaggtctgaaggagccggaggatcatcggtctagacagaaggagcctcaacattctgatccataggataagtggaagtggtcgcctcaggattctcattggtcgcctgagccatgaagtggttgagaaacatgtctttagaagtgccaaggtattcaaaatttgctttgggattagccttccagaattcataaaagatctcgagactagctttctctaaggtgtccaccctcttcctaagctcctccaccttggatttttggcttttaacctcagtttcgagctcctcctccctggtcttcttgtccttgacctcatcctccaacttgcgaagaagagtctagagaccctctctctcgtcttggagactggcaactacttgagataaacaagcattatgtaatgactgctttagtaatttggattagtaaaagcaattagcactaatttatgatatttttataattatttatgaatttaattttctatggtccccattgttagaagtggacattagagttataatttctcaatttcagagattttattaaactctaggtgtattatatgaactatatgtgaattatgttatttttataatttttgctcgacgacaatggaaaatgcgatggatggttagtttgatcacatgggtaatatagaaccttatttttttagtgcgatatattttaaagaaaatagaataccgaggttgagcggggttatggaatttgaccattttacccgtagttttgaaaaatgcatttgtaatggatttatgggcattttagtaaaatgccaatgaagggataggtggctatctaggtttatgacacttagctatattattcagcaagattaaattaagtaatcttttgtcacttaagaaaaaatcaaagaaaaggaaaaaaaaattaaaagaaaaagacacttttctcttggaagctctctctctctctctct

SEQ ID NO: 133742 - DNA, 1439 bp, Cannabis sativa
tagagtttaataaaatttccagaattaaaacattataactctaatgctcatttctaaaaatgggacccacaactatataaaatcatatataattataaagcattaataattaatgctaattgtctttactattccataatttaatatgtgatcattacaatgctctagccatgagatgaacaacctgattagcaaacagttttacaaaactagagaaacatccttaaaagaagataaaagttgtttacaatctttaacgacaccaccaaaagtggatgacaacatattcgaatttctaatagcttgtaccaataccaaacaattagatttgacaataataacacccgaaaaaacacacttcaaccatgataacacttccttgagagccatggcttcagcaatctttggaagaattttcccaatccgtagtcccgtaatcccagccacgacccgacccttgtgatcctgaacaatgccactaaaaccatgtcttttctcctcgtcaagcaatgcaacatcaatattcaccttgagtttttcataacatgatttagaccatagctcagccccattcgaaagataccaagtatcaaacgcaggaaacaaacttctttcttgagcttttctccactgatcaagagtgatacgagccaaattgataacgaactccactcgacttttcctacccttccataagaggtgattttgtgcgaaataaattgcccaaaccagcatcaccgcctgaacactttattcctcacccaatcgtgagaacaaatgaagaaatcagtccccaaacgactttgcatcaactagaatcatagccaaactcgctagccgccaacaattctgtgcaaaatcacaggcaactaaacagtgaaaaattaatcacttgccccgtgacaaatcgaacccaacaaagaaatattcatatgtttagtcttcaactgaactctcgtaagaagacacccactaacagccctctatacacaattttttgcctttggaagaaactttaattgccaaaacttcttccaaaacgccacaacctccatgtccacactgctatcatgatttgcctgtaataatttaaacgcactcttaatcaattcaattaattaatcatacttttaacaaatttattagttatattatttaaaatatctaattttatttacttattttattgtttaataaaattagttagatatatttttttataaataaatttaaaattgaattaaatttttatatatttaaaaatataattgaattgtattaaatttaattttattattatttatattaagaattaggtaatagtaactattatataattctaaacaagcatgtatctttatatattaaaagtgcctatctaacggcaattcttggtttaacgggaattcttggtttaacgattcttttattttttttaa

SEQ ID NO: 133743 - DNA, 1011 bp, Cannabis sativa
  modified_base (930)..(962): a, c, t, g, unknown or other
atttttttataattttttttttttattttgttggttctattttcaacgtgagttgtttctattttcttatgatatatgagattaaatgttagttgtttctattttgcaataaactatagtttatttcaagattaaattatttttattttcgatgtgagttgtttatatttttcaggatatgtttacacacacacacacacatatatgaggttaaatactaattgtttccattttctatataatttttttccattagttatgatatatgaggtgaaatattagttgtttccatttaacaaagtatagtttctatttttcaaggttaaaatgtttgcatttttaaatgcgagctagttttctattttttaaggttaaatgatagttgttttcatttcgagtttaaattgtttctatttttaatgtgatttgtttctattttttgtaatatttatttctatttcacacgcacatatacatatgaggttaaatgctagttatttttattttgagattaaataattgtttgcatcttttgaggttaatttgctttcattttgttgtttccatttttaatgtgatttgtttatatttttttttataatattttataatatatgaggttaaatgcagacatggattattacctgacctgtggtttatcccaccataaagttaacaagagtaaggagaataggaaacttatctcccaaaaagtgatgtggtacatgcctttaattccacgacttaaacgattatatcgtagtgcagaacattctgaaaatttgatttggcatgagtcaaagagagtgaaagatgaaaaattcagacatcctacagattcccaagcttggaaaaaagtaaactacataaatcctgaattcaaatctgaaccaagacatattctgattggttttatgccctaaataaaannnnnnnnnnnnnnnnnnnnnnnnnnnnnnnnnaagatcagaaataacattttatattgcatggttcaaatgatttatttca

SEQ ID NO: 133744 - DNA, 709 bp, Cannabis sativa
ttttttttttttttttgcctcttataatgaaatatatagtttcttttaatattgataaaactagtttttaaagttagtattatttttagattataatttctcgcactgtattttttttattgtgttgttgatgaaactagttttattttttgttcaattttgattatttaatagtctagaaactggttttttttttaacttgactaattatgtttgttatcatagttgttatattatttgagatttattttttattttgtatttattttttactaattctaattagcaagagtttgacaaaaaacctaaactaaaagatttatgtaatgtaacaccgtttttattatgagatagcaacaaacaatttaaataaaaaaaccgtaaagtaactatgaaaaaattaaatgtcttcattacaaagagaaaataagatgaaagaaacaaataaaggactaaataataacaaataaacaacaaaattgttatacccgaaattaggttgccatttcagtggaggatacgtgtcaagataaatagaatatggatccacgtgatcacttttaatggaataactcattaattgcatcggtaacaaagtgtacttgcaactcgctgactacaaggtcttatgcgagaaaaagatatgcaaactgttgtttcgtgtattaacgagaaaccatatgttattggatgcataaagcgagacatc

SEQ ID NO: 133745 - DNA, 1352 bp, Cannabis sativa
agggcacaaaacccaacaggtggttcttcaagaacacgacgcctatctccatcacattgaaaggaggccaagaacaacccagaatgatattcagaaatttggcaaggaaatcggagggtccaagcttcagacatggctttctcaatccaagagggcttggccgattttggagacaaaagtttgaaaaacaaacagaacgagttggcatcagtaggagagtgaatggaaatgtgatcaaagtcatgtacaagattgtcctcatcatcaagagcagtaataggggtagggtttttggaggaggaagccattgctggtagagagagagaaaggaagcagaggttgaagaagaaggcgatggtgatagggaaagtcgaagggaggaagcatataaatagacaatcaaagaagtaagccacagaagagagtacctggagaagaagggctgcctcgaagatggaaccggtgtctgagccatctcttcaatgcctatagagactgtctggattcggagaagatgcgcaatgatggtttttgggtgtgagaagaagggaaaccaagtgacggttggtttagctgtatgggatcgagctgaggattggaataagtataatttgtgcaggaaaattaaatgctgaaaggatagagccgccataattaaatgcaggtgtgagagagagatggcattaaacagcagctgagctcgagaaattagggggagatgcataatgattagggtgacgtactagtaaaataaaagcaagagtcagggaggagtaattaatgaggcagaaaacttgaacaaagagaggggattcttcgagaataaggaaaaagggagataattaatgctgaaagtaaacgaaagacgaaactgaaaaaagaaaagggaagctcaaacctggttgagaagaagtgacaaagagaaaaaatacagttaacctaactgaggttgaaccagagcaaagcctgtaggaagcttcaagaagaagaagacttttattgcaaatttcattctttctttctttgattaacttttatcatatatagttaattaaaaaaaataattatatatatatatcttattattataaaagtatggtattagtgtctatattgactatgtccattgtacccctaataaaattataaaagtacaataatattaatacttttagactcttctctatatagaaatttaccttatcttgtatctattaaatgccaacacacctttttacaatacattaactattatttttatttttatttttgaaatcaatattattattattattattattattaatgaaagtaacatgagtaatagccaacttactccatctcttttatca

SEQ ID NO: 133746 - DNA, 735 bp, Cannabis sativa
  modified_base (268)..(272): a, c, t, g, unknown or other
tgttgtttttacgggaaaccgtaaaaatgtaaaaaaaattcattaaacgtaaaaatgtaatttttttacaaaaaatggtgccttatgtaattattccaataaataataactctgtcatatattataaaatgatgacaactaatatatattgtcatgaacattgctattaggcactagtagtgcctagcaccttgtcgacatatcacgttgctattggttagcgatactctctaaaagttattatattaaactatgtgggacccgatannnnnttgaaccaatagcgatactgacatataggagggtactaagcaccactagtgccctttagcatttctcatattgtcatatattacatattaatggtttaatacacatatttaacgtatatattatatataaatgatatcacaagtacaataatacatagctcataataaaaaatatatccttaattaattgaacttggtacctaaacataaaatatgggcttttaaataagtgttgcaaaaatatagcaaactcaataccataaagaaattccaaaaacataaaataccataaaaaatgaacaaacaaaaacatgtcatatttttcaaacattgtttcaaaattctatatgttaagtgtaatttccactaaaagaattaaggagctaatgttatattatttttaatataataatatgtagattaaaatgtggtaatatataatattatgtgaataatatatatt

SEQ ID NO: 133747 - DNA, 694 bp, Cannabis sativa
taccactagcattttatttttatttttaagtattaaatttagcattttatttaattatttggaaaaatcaaaaaccatcataatattttcaatccacatgcaccactcaacaaaaaaaagttttaatcaccattgtccataattataaatagtaaaattttaatacatgcattgcatgttaggccccctactatctaatagtcgccatcatatttaagcaaattaccgtattttacttgtagtcgtcactaatttccctaataattttgttctatacataaaataaattaaacaatggttaactactcacttgtttttaacataagtaaaactgtgaaacctttaggtaaaattaacacagtgaataaattaattaaaaaaaataattatcaatattttttcatatatatatatatatattttggaataaattagttagagtatttatcatattactatatttcatatttttttttaaattcaaataaaagattaattagatttttttttgattaatttagtaccatacgactacactatcactactacaaaaatcccctttagagacggtttttaagccctttcagcatcggttttgatgaaattcgctaccaacgctaatcaagacgacgctaaagggtttttaaaaaccaacgccatttatacccctatggcgtcggttattatctaggaa

SEQ ID NO: 133748 - DNA, 992 bp, Cannabis sativa
tatttagcgatgtatttgtaatgatagaacaaatctgatgttagggatgaagtttagcgatatttggcaatgttttgtgtatttagcgatgatattagcgaagtatttgtaatatgagactaaaaaatgcacagcacatcgctaatcatcgtgaaaatttgagtataatttcacgacatttagtgatgtttcgcaatatagagacatttagcgatgtttcgcgatatagtgacatttagtgatgtttcgcgacatcgtcaaaaacctaaaaaaaatatagaaaataatcgagttgagaattccaatgatgggtagggatttcggggtggttgagattttagggctttgggtttcacggtttctctttgtggttttgcgatatcctctttgattttgtcctacgttttgtcttcggagtgggtttcgccagaggcggtgcggtggtcgtgggtttggtctgggtctggttcaatcttgttctgtggttgtgggtatcagttgggtttggtgagagttagagagagaggaagagagggctgagagaaaaagggaaggtatgagaagggtattttgagatttaattaactttagagtattaaatttctatgtattttaatgtggcatactaaaagaccatgcgcaatttttaatcatgaattgtcaaatttctcttataaaattgacatttaatttattgtgtgttgtcttatttttttttagtctatttcaatatctcgaaaaaaaaattagtctaattttatggtcgtgtacattataattatttaagacatcctgtaaattttgagaaatttagaaaaatttaacacacaaaatataaagttcaaattgacagttgcatgcgtgactcttttttattacattaaaaaaataatataataataaagaatatttttttttggctaattatgatttttgcttcctaaattttaaaatgtatcaaatcatgtcccatgaacttttaaggtcgttaa

SEQ ID NO: 133749 - DNA, 711 bp, Cannabis sativa
aacacttgagtttcatattccctttaagtctactctctccaactcaaactcacataacaaatatcctattaagtagcgttatgttaggaggaatgaaaatatagctacaataaaaatgataatctaatatttttaaaagaaaccaaacaaagaaataaaataaaaattgcttccttttcattccatttcattacctccaatcaaatgctacttaaggttacctagttaccattctggtaaccgtaaggtacccttatatggttttcccataaattttttcacatacaacaacttttattataaaaacatcatattttaacatagaaagtataaaactttataaaatatgtaatttactcctctaagtataaatgggagatttcaattaatgtaatgaataattatcataagaaatgatgtttttgatgctatgtttaatctttgggatgattacacaaattactattttttgtaatttttttttccatttttactttaaagattttattttatattttcataatgatttataaaaataatacgaaaaatataaaaaaaaactgcacaaaaataataataaaaaaaataacatctaactaacaacaaaaataatatacaaataacaaactatcaacaacagattaataataacacaacataaaaatacatcaaaagaccgtattttttgtaagtattcatatctcaatttga

SEQ ID NO: 133750 - DNA, 636 bp, Cannabis sativa
  modified_base (563)..(580): a, c, t, g, unknown or other
accacccaagttatggatattacacatctgccacagcctaaggctcgggtcgtgacactgataccatgttaggagagttgaatctcttttacattgaaggtcgagtatgaacaaacaacaaggaatagtaaaggaaatctaaaaacagagaaaagcgagaaaagagaggaaaggaagaagatgaaagatattatgaaagagcttgattattattaagaataaagttgtacaatatatatacaaggattacagaactaaagcaaaattagttgtaaccagaagctaactaactaactaacagaaaagtagttagttaagttactaacaaaacagatattgtactactgtcagctcttaacagagaaatatccaaaacttatcgagatcagtataagtgagttttaatgactctcaaatgaatcattaactctttttattgtagtgaattgttcaatattaaataataggtaaatattaactaaagtacttatgtttatagtaaaattataattttcgttcaatgttgtgagtgtatataccattagggctcgtttggaacgccnnnnnnnnnnnnnnnnnnttgtattgtattatattaaattgtattttatgcaatatttttatgtaaaactatat

SEQ ID NO: 133751 - DNA, 892 bp, Cannabis sativa
  modified_base (862)..(866): a, c, t, g, unknown or other
tttttttatgaaatcctatatttcatgtaatttttacttattttatctttttttaattccatttgactttaaacctaaccttagaagcaatcttataaatagaataggatgctcttattttctaagccaatacatgataacttaattgtctctctttattagaagaataaaaaataaaaaagagcctctttgatattcgaaatcctcttcttcttcttctataatttgaaccctaagtaaattgaggaatcacccacacaattcaagtcaatactcagacttttgtggaagattgtgtaaaaatctaccaactgaagaagatccatattcaaatcttgatgatactctgcgacataaaggattaatggttaaagatctgaacagaaagagacataattttcttctgccactaatgtaagattttctataactttatactgtttattcattattttaggaaattcatatttaggatgttagattatagtcttataatcaatatatatgttagtaaatgagaaatttgattttctatacttacatatacctaatattttattcctaaactaatgcatatcaccattgaaaatatatgaccactttatctaaaacccaaaaatatccctctcataactcaaccccattttttcccaacccgcacatgcatcggacccccgatcgggccccatcggacccgttggggtccccatcggacccgtcgggcccaactcaatttttttcccaactcacaagcatcgggccattgtcttccctaaactgaaattttcccgaatcccagatttgaacctaaaatcgaacctaaatctaacaaaactcacggtgcacacataaacacatacannnnncattataaccctaaaatcaataccta

SEQ ID NO: 133752 - DNA, 996 bp, Cannabis sativa
taattttggagaaattaataggggtttttacacacatattaaaatttttattttattacttttttactgtagggtggaatttgtttcaaaaatactgtgtaagttttatattgtgtaccgtgttaagttttcactgttgttctatagttattttttaattattccattgttgttttaattattctttttattgttttacacttgttttataaaaaaaataatatttttgtaaaaaaattctgtgtaacagtaaaattatatttttttctttctaaaatcaaatatttttgtaaaaaccccaacttaataagtgtagaatgcttaattcaatcaatacaaattagttgatttcctcatacaccacatatttaaaattttaatcaatgaatattattttatacactttccattacttaatctatcattcatgcatgtataaattgtattaaataataagaaatataactatgaataaaaaattatattgtattaattattataattataataactgataacataacaattcatctgtattagtttgtattataatatttaaaaagtttttgacatttcccaaactcagaatttgaatctcgacttcgtacttcgacccagatgctaaactcagccttagaattagacccttaaccctggacttagacctggtctcggaatcgagccccgtacccagacctcagggtgggctttgaaagttagtcgatcataagaaaaaataataggctcttatttagagtaaaatgtggtattttttaaaattagcaaaaaaaaaaaaagtgtaattttaaaaggggattttttcggcccttaagctaggtgggccctaagtacaggtctagcccacctatgctcaggatcaggcctaccctgaacccgagcctcaaccttagtatatttttgaagggaaattatagtaaatgaccccaaattattggagtatgttagtttatgttctcatttcaaaaaaatatagca

SEQ ID NO: 133753 - DNA, 796 bp, Cannabis sativa
  modified_base (651)..(656): a, c, t, g, unknown or other
  modified_base (741)..(747): a, c, t, g, unknown or other
actgtagcgtgccttagcattagggcgttacaaaggacttgagttatttcggtataaatggcaagaactttgaacataaagtcaagatttcacaagaaggccactccataatgcattaagaagatggcataggtcgctactcttagagcaccaaagaagacttgtccaaatgttgtctctcaaccccaaggagtacaacacaagtgaaagaaactaatttttacccaagaatcattctagacgacctatgccaactttgtgcacaaatgagtggcataggtcagccacacaaaatggcaaagagattttgtgcccaaagtaatttttcatcatcaacatatcaaaaccaagtgatgaggaaggcctaagtggtgtagaaaccacctagccaacatgtgccatctttgtgcacaagaagatggcataggtcagccacataaattggggaggaatttctttgcctaaagtatatttccaacatcaacataccaaatacaagtgagaaaagtcaccaagaggtatagagcaccaatgaccaacctatgacatctttgttgggctttgtgacctaaataaaactctatttgaatgtaatcttttctattcaattattaataaagaaacaaatttaatttcattacttgtttaatnnnnnntttggttcatgtgatcatttattactaatttgagtaataaattcatccaaacccttatcatattgatattcttgtttattgtgtnnnnnnnacagtggaaagtaaacaagattgtatgattaaatgcattcctagattta

SEQ ID NO: 133754 - DNA, 557 bp, Cannabis sativa
ggaagaggagaggctcgttgctgaggacccaaagcagctcaaagtaatgacacacggaacaccgaatgaaccatggaatctggggtaactgaagccgataggctgctagaccgatgcaagctaaaactggaaatgggccaaagaaatagggggacagcttctcgttaggccgtttggccacggttcgttggtggtaaggacggagctttacacaaacttggtcaccaatctcaaaactgacatcgcgatgtttacagtgagctcgagtcttcattctcttctgtgcgcaaagaagatttcattttagcaaggccaatatgtcttctcggtctaagaggacttgttccacagtagaaactcgggtacgaaaagcctcgaagcgaagtaatggtggaggatcaccgtggtataaagcccaaaagggagtcataccaatggtggtgtggtaagacatgttataccaacacttagctcatgaaaaccatttgacccactagttgggttttgtagaaaatagtgaatcgaattatgtgtatatttcatagaatagtacatat

SEQ ID NO: 133755 - DNA, 1409 bp, Cannabis sativa
ctaaggccctcctgacgaaactaaccggctactgacctgaagcactcataacttttgatccttctttataaaagttttatcaatgagaatcccgaagttctttctacctaacaagaagggcctccgggtagcttcaagtatatattgcttttagtgactctgaggagcgaaggctatatactatccaggcataatctaacgtggcacccttccgtgattgccacgtgcacttcatctgggaatacagataatagggaaacatatggattacactcaataagaaagtatcaacataagcaatactttatgaagataatactgcttccatcgctcaactaaaaggagggtacaatgaaggagatagaattaaaatacatttcaccaaaattcttctttatacatttcaagagaattcatattggagtccaacatattcaatcaggtgtcaatcttgcggacttattcacaaagttaataccagcatcaatatttgaaaagacgacatacaagattagaattcgtcgattagaagatctccataaatacctaaatgaggggagttaatttatactaccttctttttcctttgaccgagtttcttcagcaaggtttttaatgaggcagttattatagacatcgagggagtgttatgaaatattatatatagatgtccaaagcaccaaatcaattattatcattaatgcttgattgtattttactttattacattgatttagtttctcattctcttagtcatacttttgtataaatagggatttaccttaatagaataaacaattgataaattctcatttagtttctctttctctattcatcttcttcttcttttcttcatatatattttatattatcctatattattttataatattaatcatatttattttatttttatttaattttttaaccaagaaaccgtgtacagttgtgtgtgtaaaggttgtcaaagttgccttatttatttatggaaactttgctaaataagaaaacctaggttcaatgtacctgtttgaacgaactagctgtttgtttaaacaaattctgactttcctgtttgggaatatttttcacttgttgacctgattatttcttggttgtctgaccacgacctagagggattctaaagtgtatacatacacacttaggttgttggtattgttatctctcttggtgtatcatttctaaaatcacttttaaatttagagagagtttcattgttatttgaagaacttgagtccaacaagttcttagtattttattattgtgtattgttttttgttgaaaatgtgtaggttgaacaccttgatatcgtttatcaagcttcggagaagtcttgttcgtgagtcactttttgagaggaaaagtgcaagttagtcacttttcgagag

SEQ ID NO: 133756 - DNA, 622 bp, Cannabis sativa
ttatgaattcacatcaatattcaatacttcttttgatattctcaaaccaaaggaggtcaagcttaaagctagaaccccaatcatagtttttaaaaggtacaaattaagtcttttaaggttatttatctccttttatatacttttttaactttaataatttgtaatccattgcttgtagtgctagaattattagtctattttgttgatgttcaaattttaaggtagagtagaaagtaaaagattatagacctttattacatgatcaaagaaagaaattttgtttattttgatcagctaagtgatagtttataattttactataacttctatattgtatcttgattgtactctgtcacaaaaattgttggataataaaattgattttccattaaaaaaattccatttgtatcatatatattaaattttttttccataaaaatttatatgttcttatttgacaacccagttatttggattttattaaagaaaaattttatgggggaagaaaaataatacaaaaagaaaaggaaaatgtttttgataaatttgatatgaggtgctttttaatatttttattataagacaactaaactttaaacaatcaaataattagcaatgacaa

SEQ ID NO: 133757 - DNA, 1176 bp, Cannabis sativa
actgctgctcaacatgatcctgctactgctaccgctgcccctcctttgcctcaacaaattcagccatggaatccgtttgcacattacctctctgcatcgctcactgtgcgattggatcgcaagaattttttggcatggaaattccaagttgtacccactgtaatcggccatgaccttgatgatgttcttttttctagtattccacctctaagaactcttgtcaatggagcttccaacccaacccccaatatcttcaatggaacaaacgtgatcaaattcttctctcttggctcaaatcttccatgactgacggcattcttgctgttgttgcctcctacacaaattcatctcagctatggcgtgctcttgaacaacgtttcacaagctaatctcgtgcccaattactccaactaaaaagtcaattctctcatgttcgtaagggttctttatccatttctgagtatgtggacaaagtccaatcactttatgattctattatcactgctggttccttcatttctgatcaagacttaatacttcaattgttgaatggattgggtcctaaatatgattctgttgtctcgggtatcacttctcgaagtgatgatctaactattgaagaagtccaggcccttctatatggctcatgagagtcgtcttgatcatcataacaccgttactgatctgaccttaaagatgcaagccaatcttgcttatggatcacaaaagaatggtccatctctaccatttcaacctgctaccaaaggctttgcatcagaaaattcagttcgatcttttggtcgaggtaatggcagaagattcccttccaactcacgtctcatatgtcaactttgtttaaaaagtggccatacagctactgtatgtcactatagatttgacaagaattgggttacccccaaacccaatgccaacaaccctcaggcttatcttggtgaaatggaaactgatcaagataacactagctactcccctcaagttcttccagattttggtgatgactttgggtggtttgttgacacttgagctacaaatcatgtcaccaacactcaagacaaccttgacactgctatagtctataatggaaatgacacattggctgtaggtaatggtaagaaattgactatctctcacataggctctacctccttaccctct

SEQ ID NO: 133758 - DNA, 1481 bp, Cannabis sativa
acagaaaagatagatttatatcttctcacttatcatttacctcttccttagaaagcctttaaatttaaaagactcccattagctttaggattaggatagtggactcaactataaataaatgagttgagaaccaatttttcacacttctcttctccctcccacatgcctatagagaactttgggatttcatcttcatcaagcctccaagccttcctcacttcaaggtagaaaaaaattgatttttctccttctcctcctttgttggtcttcttccaaggactcttaaacttccaaaaacccttgaaacaatttttccaaaacactctccttgtgccttgaaaaattcctccaaattactttgaccttttctaacataaatttgacttttcttgagttgtgagaaattgagttgttgagcttgagatgactaggatgaagagaggcaaaagattgcctaataaatatgatccccatattactcagttcattagagctaagctaactttgcctaagtctaagaacttggacaaggcccatggtggaaaagtaatggcaattgagcttctcaaagcttccattgagagtgttgattcgcgagattgagcgtttaagcttaggccgcttgtatctagtacaattactgtgcttcaagctcaaacaattcgagatgattattgtatccctaaaactattgtttggaagcctcgacatggtgctcccaagggttctcagaatacttgttatagtgcctagtgagattccacatgaattggggtgcttacttgcccttgcatccatgttcatatccattgtttacttcttcagtgttttcccttaccaaataaacccaaatggctatatgagtcttggcaccttcttcatattctaccatcttaaaaactagcctattctaactcatcatgagataaaatttccttgcgacttgaaaagaagtccaacccgcaaagatcaaggcttctaacactttcatcaatttgtcccattcatagaaaagataaccaagagtaactgtggcctttactaccaaaagtacttctatactcctattattccgtcgagagacattaccttccaaaaagtcacctctttctgaagacttactcctcttattcacatgaagaggagagcagaagccatgtttcttgaaattgatgcatcgtagagagatggccgaaccctcttcattactaaaaatctttcagaaggttgtgttgatcatgtcatgccagcaggtttatgttgatactagcttccctaatgattcttggaccataccactcgagcaaagtgatgaagatgctcagagtgctaccgtcattttgtctcaaactatgatggaagaagttacttctatttgaaatgacacaaaatattcacggagaatatatgtgatcttaaaccaggatgatggagaagttaacaagttttttttttcatgcttatggtttaatatatgcaca

SEQ ID NO: 133759 - DNA, 575 bp, Cannabis sativa
ttggatgtgctttaccactagtattaaaacaaactaacaaatactaaacatacacaacaatttacaaaagtatgaattactgtacatttgataaattataatcaaaagactatgatatgtaaaaaaatattataatgtataataaattatatactaatgtcatttgttaatataaaattattaaaataagaaaatgatttaaatattatttattttattaaatttattatatatattagtagtatatataataaataagtaaatatatttagaagaaaaaatttattattattatttatcatgagaagagaaaaaaagttattgatagttctttgaaaaaataacctttataaaaaaatgatgataaaaacatcttcaatggtaactatcatatatttaatactaggaaactaagccgcgcttcgcgcggtgttgttcaacttttataaatattttataattttttttttatttattcaatggtataatctaaaatataatattttaatgtgtgcattataaatcaagtaaaatggttgaaattaaaaacataatttattattttataatacaca

SEQ ID NO: 133760 - DNA, 825 bp, Cannabis sativa
  modified_base (30)..(36): a, c, t, g, unknown or other
catttctaaaaataattttttgaaaacaannnnnnnaaaacaataccaaacatgctcattcttttacaaaaaatagtgtcttatttaattatccctatatttaggattatttcacaaatatacaaaaacaacaaaaaaattacaaaattacagtttcacggaattttaaaaataatatacaacccaaataaaaaaaattacacaaataccacttatacacaccttcaacctaggattcatgcttcctatacaactatcgcgcaaccacgcagcaacctaacgcaacccaggatccatacttcctggacaatcatcgtgtaacaatcgcgcaaccacctaacaactttcgtctgactgaaatattcatctgatgcaatttttagccaaccacccagcaaccaccctgtaattatcgtctgattgtgtaagtgatagtataagaggtattttggtaattaaaagtacataaaaatataaatgttgtctatgaagatatttttagaataatgtgtcaatttatatttttcatgtaataatttttaaatatatgtatatatatatttacagggcagcgcagtttttaggcggggtactattttgattttcctatattatagtatagtgttttcagtatttaagaaattataatcatttttttttatatataaggatatgtagaatgtagttatatttaggggtgttcttctaatttaatatgtactattttgctcatagtacttccaattcgcattggattttatttttgggttaatttcacaaatgcacaaaaacaacaaaaaataacaaaaatacggtttcacggaa

SEQ ID NO: 133761 - DNA, 611 bp, Cannabis sativa
catttgtgctgaaggtctctcaaggttgctgcaatctaaagaaaacaatgggtctttacacaggttgagagtgtcaagaactgctccatcagtgtcacacttgttttttgctgatgatagtgtactcttttgtcgagctaattcgcaatcagccaggtctattcaacaagtgttggacatctatcatcgagcaagtggtcaagcagttaatctggataagtgtgtgctatccttttctcccaacacaagacatcataatcaaagctacttccaacaacttcttcatatgcctattcaaccttgccatgaggagtatcttggtttaccatccttttcaggtcgtgataagaccaagctctttagtggaattacagataaaatttggaagttgttgagccatccttttcaggtcgggataagaccaagctctttagtggaattacagataaaatttggaagttgttgagtagttggaaagagcaattattttttgctagtggaaaggaagtccttttgaaagctgtggtacacacaatccctacatatgctatgagctgctttcgtttgcctgttacactgtgtcatcaaattgagagcatgatggctaactt

SEQ ID NO: 133762 - DNA, 561 bp, Cannabis sativa
cgattatttttcatttattccgttacatttctccattaatttattccgattctgattactgtatagtaaacgtgccattagtgatttttttttttttttttgaaaagagtaattagtgatttgagtgttccattaaattcaaagttagtagaaaagtagtaatcattttatgaattcatatctgaatcaatgtcagatagataatttaaaaaaataaattatatagtatttgatagctacttcgttaatattatataattagttttgatgttaatcacagatcaaatcaagtaattaatttcaaatatcttaaaactcatccaatcaaatagatggacgtaacaagtattggatccacaaataaatgaataaataaacaaagaaaaagagaagagaccaaaatttggtagtagtggaagtggattcattttttagaggaagaaatgtagtagaatcaattagtcattttcaaggcatgaaaattatggatgtcacttatagttgatagctaaagtctctatttgattctatagccttaataacttaattaaaattaaagta

SEQ ID NO: 133763 - DNA, 600 bp, Cannabis sativa
  modified_base (27)..(27): a, c, t, g, unknown or other
  modified_base (562)..(574): a, c, t, g, unknown or other
aacttgtaattaaatactatgttttantcacaagtaatattttgttatgactaaaagtcacatttagtcacaaaaaagtatgttgtgactaaaaagttgtcactaaaagtagtagctttttgtagttgtcctaaaaaatatggtgttgacagtgcgaaaagaatgtttgtggattgcttgaatagggaactaggaaacaactgaacaaggacgcgttgggaaaacatgcttaatgggatcaattttatttttttcataaattaatatttaacgtaaatattaatttcctataatagagtataaaatatgtacatgtgtagcacatcagaatatgtctcctttcatttagtgatctaaccctcgtttctttctgctgtagagtatcaccaatcactaaacctggatcttctcttgaacaagaacacaatctttaatctttagtttctccgtagtcttccacagatatctaggtattgtaacagaatcatgtgggcaattctcacaaccactaaggtgctatttcgaaaacacaagaagaaagagagagagggagagagagagnnnnnnnnnnnnngagagagagagagagagaaatttttt

SEQ ID NO: 133764 - DNA, 778 bp, Cannabis sativa
atattttgaatgaatattagaataggtggtttttgtcccacatagtttttcttttgataaaaatgcacaaatttctaaggttaagcctttgttaaatttttgtatgctcattaacatttagtatcaatattacccatgtcttcaaatattcgtgtattaaatatttctgtatctgtataaattgatattattttatttcaattctttcttgatacctattaagaaaaatcccaaatctgtagattttatcatcatgtatattttattatattagctcagtgattttttgcaacaaactttaatttaaaaacaagtatttcacattaaatatatttggtgatatatgcattatgataaatgttgtatatataataaagttatttacacaaatacattaaaccaacgtaatctcataagaagagacacaataaaaatatttatttattatagtggttgaaagaaaagtggctttggaattggtgatcaaatcaaggcaaaaggcaataattgaagctccactagctttgcttgtatcagttctccttaggagtgttcacggtgcggatggtgcgattttcgattattttttcaaatcaattcgcacatgcagtttttttaatttctcaaaatgcaacctgcaccgcgaaactaaaagaccgcaaaaaccgcaccgcagaaaatagtacggcgcagtgcggtttatgcagtttagactatcattaaataattaaattatcacaaatacaacaaagtttgagcaacacttgtcaaaaatacc

SEQ ID NO: 133765 - DNA, 1194 bp, Cannabis sativa
ttaacgggagatcaaacctaatcgttaaatttaacagaatattttgagtatattctgttaaactaaaaattgccgttagatagacacttttaatatataaagatacaatttatagaatttatgaaaatattaacaagttatctagacttcaattaaagcataactaaaataataatcaattaaaaatatagtacacttctttataataaaaataaataaaatagaaataaatctactcataaaaaattaaatatatatatattcattttatttcttaagtttaacaattagattacaatgaacaaacaactagacaataatttaattgtaaaataaaaataaagtattaacatattatatcaactcaaaacaaattgaaaaacaacacacaaagggttcatttggtataccgtataagagtcgtattatattaaataataaataactctatatttggataaaacaatgtattgtattaattattacgatcaaattttttaatacaatgtatgttgtattatttaatacacaacaaattatccgcattagcttgtattataatatttaaaaaggatttagggtcaacaccaatctctgacccgaacccgaacccaaacccaggacccagacccgggacccaggacccgcacccgggacccgggacctgggacccgcacccggactgggatcgagattgggacccggatcaggacccgaacccggactcggacttggacccaaacccaaaccgagactcgagacctgcccccggacacggaccaggactgggattgggacctggacccaagacccagacccaagacccagacctgagacccgggacccgaacccaaacctggacccacttcctaacccgggaccctgacccgaaccaagacacggggcccacggcccgggaccctgacttggactcggaccccgacccggacttggacccagaccccgaacccgaggacctgaaccccgaacccttgaccctgaccttgacccaaacttggaccccgaactcgaggacccagactccatacccctaaccctgacccggacctggaccccggacccagacgtggacccggacccaagacccggacacggaccccaaaccctagaccctggatctggacccggaccccgaaccggacccgaaccccgacccggacccgtagttggtgt

SEQ ID NO: 133766 - DNA, 1328 bp, Cannabis sativa
tttttctaactttgttatgaaatcccatatttcatgtaattttcacttatgtaaatatgtgattatccttttaaaaaaaatgtgattattatctttttcttatttaaatatatatttatgtgattatcttaataatgataaatttataataatgttacactaattttatgggaattactaaaggcactcgtacacttgtaccacatattttaatataataagatttgtccttcttgaaactgtgactctttgtagagtattaattcttcaatttttttcagctgcaaaaattctctatagactatataaattgtaaaaattattgtaaatatcctttttaattacattccactaattttttttcaaataatttattaatctaccactaatataatataaatttatttcaattcaaaagttcaaacaaaaaataaaagaataaatatgatttaaccctttaaattatgactttggtagaattttatcctttgaatttttctttgttgtaaaaatatctcctaaattataaaaattgttgcgaaaattcccatgcagttgcattctgatcatttatttaaataatatattgatatagcactaacataacgtcaatctagctcatttcatgagtccagccaaaataattacataaatagttgtataatgataaattatgaatgtatgtcacgtgtttattggatcacatctaatggatttggactcaaccaatccaatccaattatttattgaatattgaatttcgtcatccgatccaatccaatcgaattgagcgatccaatccaatggatgtattggattggatcggtttcaaccattggatgcattgacttattttttattagattgaatcggatccatccagtctattttagctaccatttaagttaattttattaaaaagaaaaatatatatataaaaaaacatgatttaaaactttataatccaacatacataataaatattagtttagtccaatctaattctcatgatctcataataaaattcgctaaaaataaaatttatttaatacgcattgacaattttatttgcgtttagatggatgacaattaatactttacatctaaagttttttttttttcaatctcatgtgttaaatgtatattaaatcaaataatatatatttttaaataaaatatattaaatatacaaaattataaatgtattttaaaattatataaatataattggatggcagttgaatgataatttgatcagtttggtcggttatccattggatcggatgtcccatccaacaaccgatccgattcgattggatttttaaaat

SEQ ID NO: 133767 - DNA, 817 bp, Cannabis sativa
agggcacaaaacccaacatataaccacctcgtcgtttggaaattcgagtctaaaatcggcaaggcctatcccttgatggctgatcttggcttgtatctgatatcgaactgactcagttctactaaccatttgagtagtctacctggtgcctccggtttggccaaaacttgtcgcaagggatagtttattagaacttcaatgttgtgtgcttgaaaataagatcgcaactttcttgaagcgatcaccagtgcaaatgctagtcgtttcatttatggataacgagtttcaacgtccaagagatgcttgcttacatattatactggatgttgtataccttggtcttcgcgaattagtaccgaactaattgcgtattcggacactgcgaggtagattgacaaaacttctccaagcatcgacttggatagtatcagggattgccctaagtgcgttttcagagcctaaatagcctcttcacacttatcagtccattggaactttttatttccttttaggatctgaaaaaactctttacacttatcagatgaacgtgatataaaattatttagtgcagcgacttaccctgtaagactctggacttcttttggtttggtgggagatcgcatctccaccaaagcttttatttttgcaggatttgcttcgattcctcgctgattcaccataaaatcgagaaattttcctgaacccactccaaagacgcatttgaggggattgagtcgcattttatactgtcgcaggattctaaacatgacctcaaggtgagtgacatggtccttcgcatgttgagattttacgagca

SEQ ID NO: 133768 - DNA, 1087 bp, Cannabis sativa
aattatgtgaaagggaccccaaatatccatatgaagtaaatcaaacacattcttggaaaaattattattggaaatgaacggtaaacgtttttgtttagccaaatgacaaatgtggcaatgtaaaatcaaattcttatgtgaaatcttattttctttattgaagaaatttgaaatacacatagaggggtgtccaaggcaattgtgccattggcttacactggttttattgaaagaaagaaagggaacagtagctgctgcagtgggaagattgtcttgttgaagcaagtacaattttccatatttttcagctgtcccaatcaccacatttagagtaggatcctggattacacaagaattatgatgaaataaaatggagttaggagtgagagccatgtactcagaaacaaaaaaaaagattcagttcaaaacttggtatgtacaacaccttatggagagtaattttggaattaatgtggacggttccaatgttttggacaggaaccagttgtccattaggtagttaaacatacttaggaaaggaattggatgtaaatgtggaaaagcatgctagattagaacacatgtggtgtgtagcaccactatcaattatccaaggtatagtatttgaattataattgtaacctgcaagactagaagcagcagcaggtgtgatgttgggttcagtatgagtattgtgacttagttgttgacttaggagggagatcaaatgctggcattgagtagataaatcagcattgacagtgagtccatccgagtctggtttggggttgctggaagaggcatggtttgccatagctttgcccttttcttgtttctttttgtctccataaccaggtgggaagccgtgtaggaagtaacacttatcgactaagtggcgtggtttgccacaattggagcaagatggccttgatttcttggctcttgaggggtttgtagaactggcagtagcagctagagaaaccacatcagtagaaccaagtgatctttgacgttcttcttaaacgatcatagcaaaaacacgggacaggttaggtatgggtttattgagcaagatttgagctcgaac

SEQ ID NO: 133769 - DNA, 582 bp, Cannabis sativa
  modified_base (516)..(516): a, c, t, g, unknown or other
ataatgtatttacatattttttaaattacaaaaatattaaaaaaaattcttttattaatttatcatattagtttgtacaataaaacatcatactaattaaaagtattaacggtccgggtgatgtttaatattgattataaccaaactgcatatgcaagttttatgatttctcaaactacgactgtactacaaaattttaaaattgtaaaaatattaaattaaattaaattttaggaaactttttttatttggatcacttttgcccttcatgagtattttttttatttttagtatctaaaaaaattagaaatttttacactaaaaatacaaaaggctaactttattacatatatactacaacacggtaaaagcaacttttatacacttttaccacttgcacacacaatctcgtgggtatgtctggaaattcttcatggcgaaagtaacccagaagattccgactgctttaccgtgagatccattttcggtgaaatccactgccaccgccgccgtcgnagcatgtgggtcgggatcctccatagccggattttctgtggcgtcgcctgagagatacgttgcgga

SEQ ID NO: 133770 - DNA, 535 bp, Cannabis sativa
aaaatgaatttttatatagaaaaaaaaacgatcaaaccgaccgatgctcaaccctataggatgttgtcctctaatatcaacacagattccttgtttaaatagggaacgaggaggggatattttattgttttcaataatattttatattttataatttatgttttttagtatactagttcttttttttataaaattttaaattgtgttttagataaaaattactatattaaataacaaataataagtaatattttaatttttatatagttaaatatttttatatatttaaaattttaatataaattttatttttacgtaagaattttccacccctattaggagattccttgttctgccccgataaataatatgaaggtaagaataaaaattaattttttttaacaggaataggaatgagacaattatattcactgctaatttcttatcccatgtggcatgtgcatccctaataatagtactacagtagaatttttattccagaatagacttgggaccaagcaaattatattctaat

SEQ ID NO: 133771 - DNA, 719 bp, Cannabis sativa
ttaggtattaaaaagtaaaaaatgacatttgctttattattttaaaaaagagacattaactatctatagagttagaaatagagtcatttacttacatttctctactctaaatacatgtatgctgggttaggtctgatttatattttgaaaaacccgtaataatatgaattgtgctgtgttggtccataaaaagatatggatcgtgtcatcccgtattgtgctaatattttaaagggtaagtctcacacgactcgtaacttatatcagactcgtatcgtactttattcgagctgatccatttttcataaataggtcaatctatttaccttcacaaactcaaattaagacttcacttttttactattttttttttataattaatgaattcaggcttcacttttttactattatttcttagatgctgtaaaagcctagtaagaccgtgaggagcagttccttttgctgctttcttttgtactgttttgctcggttttggaataaaatatatttagttttgtccaaaaaataaaaatgaattaatcactaatgatatgtatttttttatagttcctattgttttgtaagctaactaggaaatttttcccccgaactttggcatgtactaaattatgtctcctgaacttttaaggtcattaaaaattccccttgatttaaggacttttgtttaattttagaaaaaaaaaattctaacatggatg

SEQ ID NO: 133772 - DNA, 670 bp, Cannabis sativa
aattaattggatcggatctgatgaatctaaccatccatccaatataatatattatatgattgatcggatctggataagcctaaaaatattagaagtgatccaatgaacacccctagcactatgggtaccctttaatatttttctattttaattggtgtgaaacgtgttggttggtgcaagtaagtgtagttaggactttaatttatttttgttttattttattctgttatgaaaatgttatttgaataatataagatacaattagttattaaagttgacatgtacaatgacagatgtatagcaggtggtggtcttgatttgtacagtaggagatagaattgtattcctacacattatttttggcgtactttgtgtaataaatgtacatataatttcacgtacttagaacgttatttagtgtaatgaagtatatgaggttattttagtacatttaattttttctaacctatctaaaatgcatgagacatgcaagtgtaaattttttgggtttacttgttcttgtatttttttttattaaaaacctgtttttagaaatgatttactattgttattgttatggtgagatttctttcacctagaaactcgagacaagactcctatttaaaggacacgtatattcagatttccaatgaaagctgaattgtccatg

SEQ ID NO: 133773 - DNA, 692 bp, Cannabis sativa
taaggtccatctaattttaaagttggccttgttttgggactaatttgttacaattcaatagtttgagccatgatattatttactaaatacgtgtttaaagttatttacaaaggttaagtgtcacactattggaaatgattaagtacgatctagaatgaaagttctataaaacattataattatttttcttaaaaacataaaattgtataatggctaaccttcttcttggataaaagaaaaaataaataaatgaaaatgtaacatagtttatacacctcccacatcattctacaaggtggcattggaaaattgtcatatattattattataattatatataatattactattaatctatatatatatacatgagaagcgttatttatagttttttagtcaacttttatgttaaaaattatatgttattctgaataatttacagtatcgaatatagttcttgatattctagtttacttggtgtgtttaaaaaaattcaaacttattttcagcacggtaaatgattcaaaaaattttaaaaaattacaagaatgatgttgaaactataacgaacgttaccatgaaaaaaaaaaatatttcgacaagcaattttaaacacaaaaattaattaaaaaattataatagaaaattaacaataacactcctatatacaatactatacataattaatttaa

SEQ ID NO: 133774 - DNA, 1157 bp, Cannabis sativa
cacaaaacccaacaagaataacattaaccaaggaaggataaagattaatcttacctaatccctatgagacctacggcataagttatgcatgtcatattttgtatctcttgggaacttgtggtcatatactactgacactcaaagacaagttatccctttggaattatccctaccaatttctgtaaatacccctgagaaaaatagaaaaagggggatcgatcgagagaaagagaaaaaaaactcaccaagaacattctccgtataaaaactctcattaataacaaagactcgtgtggaatacaactcattaatgcccgaaccacgtaaaaatcatctacattaattatccctaaaattctcatcattatcttatttaattagttgccaaaaatctcgatcaacaacataaaataaaatttttatttataattatttagttatatatctattataaataatattgatgtatatatatcaattatacataattataactttattaataataatctatatacttatcaatcaaaatatagaaaaatattaaaaatttcagtcacaatctatttgagttttcttttttattctttattttctaaatttttgctatctatttaattttctaattattttcagcttatattataatatactattattaatagagtaactcacatccatttacattaaaaactattagttctttagcacgaaatatttagtctttattaaattttaatattaatatgtctattcaaattcctcattcaattgtattaataataatagtaatagtagtaataataatgtgttattaaaaaaaattatttcacatatatctaaaaataatataaacatctattcatataccatattaaattctatattcaatttcaataatcataataataataatatgttattgaaaaaaatttgctgtaaaaagtgaagataaaccaaactcaaataattataaatctatatatatactagataaatcttacgtgtatgttaattttattttaatttttaattttttttaatatcataattctaaaataaataatgttcaatgtagtgataattattgaaattttaaagaataatagtaatttaaataaaaacaaaaattactattatactttgtaatagtaatt

SEQ ID NO: 133775 - DNA, 821 bp, Cannabis sativa
tttctttttttagaaaaaatgtgtaatttttaaatgatttaataaatattttattttaatgatttattttaatattttaaatttttactagtacttatgatataattatattataaattagttattttgagttattaatgtaaacaatataaaatgtgaaatcttttaagtaaaatatattaatttaatgaaatatttagtatgaattattagagtcgttgtttattctacatcaaaattatacaatcattagagatggtcgaagattatacattatttttttattattttatcacaaatttttatattacaccttataccattttcgctagtaataataataaaatgataactatatattttaatagatgaaagaaaaaaaatcataaaaatataaaaatataattttgaagcttattaaataacttgtaactacatttagaaagttaaaaagttcccgattatctcatttgatgcatctaaatttttgcacattttttcagaattttgaaactttatcttattttaactatattgatgtgggtatagtcttttttaatctttcttttttttttaaaaaaaaaaaaaaattgagaagagaatctataaactaaaagccatcagcagtggtgatcacaatgtggatcacctcccaattaattaagagttcaaacaaccaaaaacattagaatgggctgccaaatttacaagatggtgagagcagtgagcacccatattcattgcgtattgttatagtgagattcctctcacctagaaactcgagaccagacccccactagaaaggacacgtatactcagtt

SEQ ID NO: 133776 - DNA, 1091 bp, Cannabis sativa
  modified_base (1037)..(1061): a, c, t, g, unknown or other
taacatctatgctctagcttggggggggagagtgttagaatattagttgtcaagaaattacggtaacttgtatttttgtagtttcctatttgtatttagtagtttcccatttagtctcctagctttgtatataaatatgtactattctatgaaatacatacacaattcgattcattatattctacaaatataaatttaattttttcccagaaatcacctccttgccgaggatacgacttgctgccgaaaagtttatattatgtgattagtcttttatctataacttcttcaatacaacttggaattggacaatttaagattttctagaaaactgagaacgagatctacaactttcatgttgagctccaagtccagttctacttctaaggtcatcaaatgactctaaatgcataattagtcttttaatagcctaataaattataatcacactaatcaatttaagaatattaatacataaattggctatatttataagacaaaatattgagtgatcaaattctcccacactagactcttgctcgtcctcgagtaagttaatgataaaataaataatacttaaacaaattagtctttatgaaaaataactttagtttcaaaaattgtacatccacttataatttcaagaaaagtcaaactcttcaatcattagaatttcaactcaagataattacttttcaaactcaattgtgtgtgtgtgtgtgttcgatcaactcatcatattactaacagtcaaattaattcatgtatgccaacaatcaatctttatctcaaaataaatgtgtatttcaatgaaaattcactccataagcttaattatcgaaccattctccactaatgtaattacacacaatctaaagatcaataggactttatagtcttataatataaggttatggtaaaagctagataagaagattaatttaggctcaaatcacttagattagcaagacttttcaccctatctccaacaagctaattcctctattggcatatatatagagaaatttacatggtannnnnnnnnnnnnnnnnnnnnnnnnaaaatactgccaggcggtattttttacttt

SEQ ID NO: 133777 - DNA, 720 bp, Cannabis sativa
tatatacaactgacatttgcaaaaacacgatttttcacaaataatttatattataatgatatagatgaatatatattttttttcacaatagaattaattagctttctctttcttcttttcttaaatataaaatttaaaaggttatataaatatttaaatatattaaaaagtaatagaaattttattcatcaaatagattcaaccattatagtaaaagtttagcaggagtatcacttttactaaacaaacagactataaataaaaacaagaatcatgagcaacacaataaataattttatttatacaacatacacttaacaaaatgaataattttaacaaacttacaatcttacactaacaacctaaaaaatccaacgacatatataaatcgagctttgtaacttctgaattgttaccaaattatttgtctcatttcagttctacaaaccctagtttacgtactagcagataatatttacttccaaaaatctgtctgaactatcccgagccacatcaccaatcaccaaaccatcgatccttcagacgcaaagatcgcaccgtcaacatttataccttaatctatttcaaaataggtttagatttcaatgctcatagtcattattcatttcaaaatatatatacactactacaaaattgggctttagaggcggtttttaaggggttttggcgtcggttttggcgaaattcgctaccgacgct

SEQ ID NO: 133778 - DNA, 715 bp, Cannabis sativa
ggtaaaatatttccaacaattatacttgtttagtgatataatttaatatagtattttgatatgtgtaagtaatagtattgaaattagaaacataacttataatttttaaaatatatatgaaagatggcactttgtgataaatcataaaaatagtagaattaacaaagacattacatgttattataataaaataaatgaaaaaaaaatatttctaaatttaataaactaggtttgtgaccgatgacataatttcactaaaatgtataacactattagaagcggaggggtccaccactaataatgcccatatctgccgctataggctatttgcaacgggattctgctgttaatagtctgcgactaataattggtcgctattaataacaattctagcaaccaatcgagagctccaacttcccttgaataattgttagattttgtgagccatcttaatccaaccaaaaaaccaagagcactcctaaaaacgtttatacctagaccaaacactaaataaataaatttagtatcttcataaaaatacgttaaaataagtaactttaaaattatcatataaattaatgatagagtaaaattttaagaaagataataaaatttagagaaatttacatggtatactaactttttcccttttttttacaaaaatactaccaagcggtattttttacttttaaactgtgtttttttataagtttca

SEQ ID NO: 133779 - DNA, 964 bp, Cannabis sativa
  modified_base (32)..(34): a, c, t, g, unknown or other
  modified_base (788)..(789): a, c, t, g, unknown or other
ttacgtggatacggcatacacacgatcccacnnncagtgtattcagcctcaatcccaccatccttgcattcagcattgatccaacaatctttctgtttatacgcatgattaaggctcaaatttgaatattttaaggctttactagtgtatataaaattaatttaaattaatattttcagaattttaattgagaaatatcttagttgaaaatatttaatttattttagttgtgtgttattttcagatttggagtaaaaattaaatgatgtaaatggaagaattgattaaagaatgtgaagcccaaagatgaaaagaaaaccaaattatactttacattcaaataatataattatgcatgtgtgtagcactacatgtagcattttttgggtttcaatttaaggcccattatactattctacaagccataaacaattaaaggactaaaaatgattaagttgagaaatcagattcagaaggccatgctcatatccatgcaatctccactactctccaaggttaagcaacacataatcccacgtctcaaacttgtcccccctgccatttgcttctccactcttgtccaacgaaaatgacacgcttatggccccactatctaacatttgttcctatgcacgaaaataccaagcttttggagtcaatttggcctataaatacaacattttggcattgtaaaaggcatcagattttagagagagtagagaattactttgtcattttatttttctcttttattactattttatctatacttattttagtgacaaaanngagtgtattaaaatagtaatatttatgaggttagagtgtagctattgtacattatattcttaatattgatattgattgttttgtgcttcatctccatatctcatttattaaattgttcttcatcttctaattttcttcaaaatttaatagtatcttttatataagttcagtcatg

SEQ ID NO: 133780 - DNA, 1751 bp, Cannabis sativa
tagggcacaaaacccaacacattgctgcaaggagaaagcaatcctaattcctagaagaaatttatcaaaccagaaggtggcgaattggaaattctagaaaacctacgaactttctaaaccctaacttttatctagacacgattgagccctaaaaattactaaaaccaaatgaaacgacaacgatacagacgaataaagcaacaattaaactcagaaatataatacaacaaacttgagagaaaatcacttactgtttgcagttggtggttgggatactgaacgactctgtagtttgttaatcaacaaatggcgtgaagatccatccgaatgcttgaagtcgaaaactaaattggatgagagggcatgcaaatttttgagcaaatcttgtgatggtttttcgacggagaagctttaaaaattctcagagtttctaaaatggaaaagataatgcaaagatgtttcctttttcgtttatatactcttgggttaatctccattagatcagaaagatgattaatcctactggtagaatttgaaagaggaatggaaaagatcgatggtcattaattgttgatgtccctcgaaaccacaaaaccgccaaaatcagaggacatgcatttttacaaaagggattatgacaaatataccctcggtaatcattaaaaagcactgtttattaaacagaactttttaagggcaattgttatacccgaaattcagctagcacttcagaggaagacacgtgtcaaactgggaagaatacgaatcaacaaatgtaatgataattatattagaaaatagaataactcattaaatacggaattcacagagtatatttataatttgctaacagtaaggtcttacgcgagataaagatatacaaactgttgcctcgtgcattaacgagaaaccatacgacatcggatgtacaaggcgagacatcaacctcactacgcatgaagagacgtaggcaagacatgatgattgctaagacacttagtgtataatacacattatacaaactaagtataatagtcgagcaaacccaaacaactaacagcgaggcatccatctcgctataggaaggcgcgctcatggtaccttcactaatcagctccaaacatctttcaatgagattcacagctccgttgagtcagttctctcacacagaagcagacattcaaatgatgttgactgccgaagttcaccttgtcaccaagaactgcagtttttagatggagcgttatgtcttcaagcccagaagcgacaagatttacattatcaacctcggaaagatatgggaaaagctctagcttgctaccaaggttattgttgctatgttcccagcgagatgtcccagaacgatacgatttacaacgtatttaatacacatttaaattgacctagtaaaagcggaccaatcacagttgtgtgattctcaaataataatcgcatttattttatgtgggatgaaatcaaatcccacaatttcaggggatgatcgttgtaaaatatcagtcaaatttataattaactgcccttctatgtaattataaataggagcaggttatactaaaaaatggacgaaaaattcattagacaaagaaagccctagaactgcatcagaaatttaataagattgactcgtgtaatatgcagatttttaactgcaaaaccacgtaaaaacctttgaggttgtttggcttcataacttaaaaattattttcagttttaaaaaacagaaaacagtt

SEQ ID NO: 133781 - DNA, 658 bp, Cannabis sativa
  modified_base (621)..(627): a, c, t, g, unknown or other
gttgagaaatgctaaatagtatgtccaacaccctatgtaattaatactgcaataaaaatgtatcatgtgtcttcataacatttaaatttgaattaatttaagttgaaatatgttgaacctaatagcacacatatgtcatgtctaagtgacttatagctatatgcttagtaaataattagaaaaataacctcttattttaattacttcttaattaacttcaacacttaaaattacatgttagaataacttttttcttttttaatttttttactatcatttatgtaaattttaaaaaaaatataaataatttatagtaccaaaaataaaattatagatattctatttaacatgcctattcaaaaagaactaaaggtatttaattttttccaaaaatttatagtaccgatgttgtaaatataaccaacaaagctattaaaaaaatatatattttgacatatattttggaagtttacttagttgtaaaaggtaacacaacttaattaattggagatgtaaaaattgtgctatatgtagcacaaaaagtatttttgtagtaaatttacactatattttagctttgtgttctaatacacaattgcaaaattttgatgtaaaatttannnnnnnattaatgttttattaaaaaaataaatataat

SEQ ID NO: 133782 - DNA, 1901 bp, Cannabis sativa
ttttgtcatttaacaaaacacatggtccaatcgataacttttgcaaaacacaaggtccaaaattatatttagtggattgaattggatcgattatttttatatatcaatcaacattctatccgtacaagtgcggatattaaattttttaatccaatctaatatgcacatgtgcagatatccgcattttacagatttgattggattggatcgtacggaatggatggaatcgagtattttatgaacacccatactctaaattttataggttttagcaagttggttcccatattttatttttttggtaaattaattctcaaactatataagtttttaaatgatgatgttttgtttatttagttttgtattattttaaatatttttatattgatatacgttatcaaattaaaaataatacatacctttttatttgtagagtaatttacgataaaaatatctaagtttaattttgggttgcaaataaatacctaaatttaatttttgacggtaaaaataattaagttatatttctggaactccttaagtacctgaccgttaagtgtcaagtcattattcacgtgttattttcttattagtacatctaagctattttttttaaaagatataaaaatttaatgacttggaccaatcaagaattaccacgtagcaatttacttaacacttaactgccagtaactactacttacagaagttctaaaattataatttaggtattattaccgttaaaaattaatcaatactttataaattcacttttcagttaaaaaaaaaacaaaacaaaaaaaacatcataaattctaaaatagagaagaattttagaatcgtgtgtattggaactacaagattttatcaattttttttagtgtgtatttacttttttgaacatttattatgtatactatacattataaaaaaatttattatattgttatatataaaaggatgatgaaaaaggagggccttttaaatagggaagtttataataaaagtaatactattttagactctgtattttgtaaaagttacagattggaccatctattttgttaaatgacaaaatggatcctgtattttcaaaatagtacaaataagattctgaattgattttttgtcaaattaaaacataataataattggacttagaggtattatgacaaaacaatgattaaattttctacatctgttcatgttaggaattatcttcaagttgattatattaaaaaaaattgtcgaaaattgagctcagggtcctatttgtactatttttgaaaatacaggatccattttgtaatttaacaaaataaaaggactaattagtattttttacaaaacacatggtctaaaatggtatttacccttacagtaatgtacatcttttgcatctaatttacaataataatgttactactattattgacatgccacatcaactaaatttgatgtttttgatattttttgacgtgttttgacgtttttttgttttttttttttatttttctgtatgtaaagtccttttttttttggtaatttagatgccaaaatagcttttattttatggtgagatttgtttgcattcataaccgattttcccacctttattatttggttttattgctcttttctatgttaggaaagattaatttttcagctggacttctcttgtatggaaacttcttgtaagagaagaaattctcatatggaaagttagtttttatggcaggtatcaagaccctatacaaatcagactcgtttatggcaagtttccttttctgatctgatttgttgcgtcagaatttgtttctaaagctgcaaatcaagtttatcttaggaaagttttgtacagctgtagattcgaccttgtggctgtctctagggtttctatg

SEQ ID NO: 133783 - DNA, 620 bp, Cannabis sativa
gatctatctgtgcttacataagtggacgaagttggccagactgttgatcgacctgtgtcacattaggatctcttaggactggacctgggacatagttattcgcattaatcaactagacggtaggagaaacatttttcccatccagtcctcttctacgattcaaattgtttcttaggtcgtgtatggaacctagtcagttaaacaccgatgtgccaatgggtctttatgtttaaccagcttggttgaaaggttggcctgatacctccgtctgagtatggttatttagctgactacctcctcccaacgggcattctggtaagatctacccgcctaccaattggcccacaatttgcacctgtagccttggattggattgttgatcgatataagtgtgtgcggtatgatcagctacatactcttcggacccattttgagatcccaaggggatgctagaatcagtcagtggctgttgtccagtgacttgataggcccttctaattagtatggcagccttcctggaaagactgtcaatggctgcctgttgagctctcatgacttccatctcttgatctctccactctatgaactaacatctttgttcatcaaaggcaaggttgata

SEQ ID NO: 133784 - DNA, 624 bp, Cannabis sativa
taaccctattgataaataggatgctaacaccctaaattatgcaaaaacaagaaaaactagggttcgggaaaaagccccaaccagcagactgattctcaaccggaagtccggttctgggaaccaaccggtcgactggttgctacaggtctcccagaaccagaatttcggttttgtgctgggaacccaaaaattgacccccacatctcaattcaaccccaaactttctaaaaacttctaatatacctatttactctccaacaaacacaaaccaaccaaaggaactcaacaaatcgaccataaaacaaaatcaccattagagacctaacttaggttctctaactttaaacttgaataaatctcaacacaaacttcaatctcagctcaaaatagcaagaataataaacttccaactctagaattaaacaacatattaacccaatacacacagccatctagaatcaaaaactcacatcaaaacctaacctaagttacaaaaactcaagaaggaagaaagaagaaaggattaccttgaccaaagctctataaaatcactaaaattccttgttttcaacttcaatacaccaaccccagttgcttcccaagagaatcgaaagagagagagag

SEQ ID NO: 133785 - DNA, 1366 bp, Cannabis sativa
atgaaatgacaattatgcccttatatgtatgaatatgtgagaattggccctaggggcattttggtcttttgacctattgatttacttgaattgaagattaaatttttatgaaatgaaattggaaatttctggtgtgttctctctctctcaaacccgactctctctccctctctaaatcctcttgatttttcaagtttatttggtgaaaaacaaggattaaagcttgattgttgggaaaattgtgttgaaagcttggagcttgattgtgcaaggatttgaggtagattttacagattttttaaccttgttttcgtgctgaattttattgttgtaaaagcatggaaaagttgtgttgatcttgtagttgcatgttatgagaattggtcttgttttgatgaattagtgtgtgaaattgctagttgttgttgtgggttaattgttgggtttggataatatgttttatgtattttctaggttggaaataatggtttattttgtgatatgctgctagaaatatatttgaaattgaaggattttagctcaagttctagagcttgaaagttgtatgtttgagcatgattttgagttgatattgcaatctgatttttgggggtttagtgttagattttgatgcatgaaataagttattttgactctctattaattggtagaaaccttgcgttgtgatttataagtttggttgtgaattgggatgaattggttggatttgtttgctgaaattcgtgtttcaggctgctgatttctgggtttgaaacctaagtgttgcggcatggtttgagcatgtcgcggcccaccccttttggtggaacctgggatttttcccaggtgccgcggtagattttcagggtagtttgagtgcaaactttgaaattccataacttttgatttcgaacttcgatttgggagctctatatatcgttggaaagctcgttccgagctctatgtgattatctaagttttaaatgtcatgtgtatattttatgagtatggaattaggggttaactctatgtttgaaaatcttagattgtgtgactaggattaccggcacctgattaggagcacctggggattcagaatctcttttattgcgggacaagaggtaagacagtatttagcacgtagagcatgcgtagtggcgcttatattgaaaatgatatatatgattgttgaataactaggattagggttattaccctaataagaacggtctaataacctagggttattacccccagcgatatatgtgtgtaaatgccatgccatgttaaatgtaatgagattcaaggattatgcgcttaagacataatcatgttggactcggtaaccatagccgagatgaactat

SEQ ID NO: 133786 - DNA, 800 bp, Cannabis sativa
  modified_base (325)..(327): a, c, t, g, unknown or other
atcttttttttttttttgataaggagtcatttactcaaaaaataaagttaagctgcctaaaaaacgaggcaacctcaaacacgaatagaaaaaactcacaattagttcttctagttataaaaaaaataatttaatatcattaaaaataattaattatttaaaattttattatgcaaaaagagaattctaatttgtgtaaaaaagtctatttttttttttttgaacaagaagaaaactttttattcaaaacaggcaaaatacaaacaagaaaaacaaccccagcagaccgagaacagcccctcacaaccagctgttaattacattnnnaatatagttatcaatcttcccttttcccccattacaacccaaaagacatctagactttacactatctttgatctctttactcaaagcacaaacagtcttacaattcatctcaaaaacacacctgtttctgtttgtccaaaccgagtataaagttgccaaaataacagtattaataatcttttcctgcaagtttttggctgtcttggagagccataagttcatgtcaactggccaatcaaattggccacaccaattggtaatctcaccagccagcttccgggtaaaacagcagtgcacaaacaggtgctggtgtgtttcattagcctgacagcagaccgggcataacagggaagaaattggtaaaaaccggctgaggttgtccctggttagcagttgattattcacaatttgccaacctatgaaacgatgcttgggaaggaccattctattccagatgtttcttgcataatcaa

SEQ ID NO: 133787 - DNA, 516 bp, Cannabis sativa
caatatggtagtcttttatgatggaactttaaatcaataggttaacatatttaatggactccaaaattctcagcaggaaccatatcctcacacaacagtctttatttgattttccgaatagtggaatgaaaatctgtcaaacaaagcttcaatacaatagactaaaagggactctatccagaatctaatatactcggataagaatcatacgacgtggagaacaagaaaagataggaatttcacattatttagagcatatacgtaggagaagtttaaaaaacatagctgaaatacaagtattgagcgtaattacttttatttcgttgaaacttaaaatgtactcatcttctttccttattttggagtttattgagctagaggtgccagttataaacttcattaaacgatgttatcttagctcaaaaatgaaaaaacttacaaactatgtcctgttataaacttcattaaacgatgttatcttagctcaaaaatgaaaaaacttacaaactatgtcct

SEQ ID NO: 133788 - DNA, 650 bp, Cannabis sativa
gaaatatgttccttaataaaaaaactattgaaatgtgtcctttatgatgcttattgttctttttttctttttaagtgtgattatatttttaccccataatcgtgaagacaacctattcattaacaaatactaactgaatttattattttttttttaaaacagaattcattcattcaaataaaaattacaattgattaggcgagtctagcttgaatttattatttaaaagttattcttaaaacttttttcagttttgtttttttgcaaattattaattaattttaagcatattttacatatttttattatataattttttaaaaaataataagtaattttaattatttttaacatgtaagtttttctttatttttatttaaatccatatgtatttttcaaaatgatagaaagaatatgagtgcactcttaatgtgtattacccataaataggtaatattaaaaaaatttgagtttttatgattaatttgtctacttaattagaaaaatttctcatttttatattatatgggctaagattggtccatcagctaaaaagataaaaaaaattaaaaaagtttttcggtgaaaaaatgataaaaaaagttaaatttaacttaaatatttttcatataaacatatttttgatatag

SEQ ID NO: 133789 - DNA, 520 bp, Cannabis sativa
tgtattgacgaaattgaaaaaaaaaattatacttttacaaacattgaatatatgtgctgctaaaaaattattaaatttatgccagctacaaacacaaaattttacaacttatactgcaattatctaattatatttataattaacatttaatcacaccaaattataattttttattagttatttatatttagtttgtaacatacataatttggtgtgaaataaatgatgaatgtatgtacaataccaatgtaaaaccatgggaaagaaaactagcatgatccatgaaaagagttatgaccataaaaatctctcttttaagttttaattaaacctttttttctttttaaaaaaaaatagaagaagttagtactacttgttggtgaaattaaaagatgaagaagatgtatatagatagatatagatctcattgaaccacttgaggttagctcaagtggccatatgagggtgcgtgtgtgttggaggtcctgggttcgagtcccaggttatgcaatgtaatata

SEQ ID NO: 133790 - DNA, 529 bp, Cannabis sativa
ttttttaagaataatctaggtcagtttaagtaaactaatttttttttttactttaattaattttttttattaattttaagatttttatcaaatttttaagatttttttattagtttttacaaattaaaagaaaattttaatttttctaataaaaaaggaaaaaattttatgttggtcaaaattcagggggtaaaatactattaacggtaaaaaaagaataattatatatttgttatatttcgagattaattttaacaagaactatatgtaaagcggcacaatctagtagtgccaaaaattaaagaggtaaaaatacttgttattcttgagaaaatgtgagaagccgattaaaaaataaaaggatctattatatcattttattgtggtatcgaatcagggccgtttttaggcataggtaggttaggcccgtgcttaggacccactcattttagaggcccaaataaaaaaatatattttaaaaaatatacatatattttttttaataatttttaaaaatacaataaggact

SEQ ID NO: 133791 - DNA, 633 bp, Cannabis sativa
  modified_base (62)..(63): a, c, t, g, unknown or other
  modified_base (586)..(587): a, c, t, g, unknown or other
tgtcatatcccacaaatattaaatgttatgtgtttagagaaaaaatattaagtatatgtaannatagaaaatcaaattttccttttacaatgcaccatctaaaaggagtgcaccgatataattcttatctgttttaatatcttaaagaattttttagttcaatttttttttttcatagtggtctatgttgtagttatttaagactatctacaaaattttagaaaattcaaaaaaattcaacatgccaaaagtagggttcaaacagtctattgcactcataactcttttatttatacgagtgtgaaataggttgttttaaccctgttcttaccgtgttaattttttttaaatttctcaaaattttacaaaatattttaaataactacaacatagataacgatgaaaaaaattacactaaaaaattctctcatatactgatacaaatagagatgcattgcgacaccccttttagaggactacgttatagaattttccaataatttctacaagtactttatttttataaatttatttagtttgtttttcttttacaacacacatgtctagaatatatatatatatatanntatactagcaaaaaactacgtgtgaggcacgtatactaaattttat

SEQ ID NO: 133792 - DNA, 1339 bp, Cannabis sativa
gagagagagagagagaaattgtggagctcagagttgaccaacaaagagagagaaatgattttggttttgtgaagaagaagtgagaagagagcagagacaacaagaagaggaacctcaaacgtcaccacaaaatatttttttttattattattatttttattatgaacggggagtactaattacaatctcttattctaatctcaatcaatttttacgtttgaaatcacatattgaaatatttttttcaattttttatagcgatattcgatacattttgaataattctaagtagtttacaatactaaaaatagagttcttaataattcacttcactataataaattattcgaaatttttcaaaaatttacagaaatgatgttgtaagtataacgaacactaccgtgtaaaaaaattaaaaagaaaaattaatatattttttcgagtatgaaaattaactaaaaaaattataataaaagattgagagtaacatttctctttgatgaatacaccacaaaataattcaatacactttttcttgttttatcaagattctttttttgttttaaagattcagtgcacttctttttcttttaaatttttattacatattcctttccaattaaacaacaacaacaatggtaattattgttctgaggaaaaaaaacaatgataattattgttatttaattacgatataattgatttatgaaatctttaaagaaaatatataagaagaaagcgagggcgttgcggcttccacgtttctcattttactcttcttaaatattcttttttctataattttttagaatttttttcatttttatattttaaagaatttttttttatatttttacataacaactcacgtaataacataatttaaatggcaattaaaatccacataacaatctacataaaaattacttgaacaactacagtaacaatccaaatcataaatttaaaaaaaattaaaaaaataatatatgaaataatttacatttttttatttgccctatatttgatgtgaatatttaattagttcctatttatttatgaggtcttttttatttatacttttataattaatttttgagtaatttgcagcataaatacctaagttttatgccgagtagcagataaatatctaagtcctatttttggcggtaaaaatatcttctgttagggtcctgaaacttctgtaggtacctctccgttttcttctaagtaagtatctatgtgtcacccttttattagtccacatcataaatttttatttttcattttaaaattcattaaaacttatttaaaaatcattttaaaattaaaataatatatt

SEQ ID NO: 133793 - DNA, 663 bp, Cannabis sativa
atttcgaggccatctctaaaaatgaatttacaccattccaatattgcggacatctatgattttgcaatgtcgttcaagacttgtcgattgtcatctaaaattttataaaggcatataagatttcatgttaatgacacaattttatgatattttaaattaaaatattttatattattttatgaatttaaaaaaaatcatagattattgttactttttaaaaataattattgatcatttaagagttatcatattattaattaattgtatttattttttaagttattattactttaatgtttttatgtttattttattattagaaaaattaatttcttaattatttaaaaagtattattttaataattaatcaaatttatttattatttttaattattacttcaaatttatgatatattaaatttttattatttaaaaaaataaaatattaattttaataatacttatttaattatttataaattattttattattaattaaatgtaattatatatatttaagtaagtattactttttttatacatatatatattacatatcttttattcaaaaaattaataactaatttaatttatttttaaaaatttattacttcaaattttttatatttattatttataattttttatattactataattaat

SEQ ID NO: 133794 - DNA, 503 bp, Cannabis sativa
tatatatatggaatgaaacctgtgtcaagttccctgattggcttgcagagaggtcttagcaatgggactcagaacagaaacaatttcaagctttaagtgttgctctggttctccattcacaagcactagcactagcactagcactaatagttccaatgtctatgggaaaacgtagaccttaacaaatagaaaacttataagaaatgaacagtgctttcaatgctttcaattgggtgttccaatctaatttctactattttactcctagtgcattgatctgtattaaattcgaattttatgtttttgatctaattcaatctccacccgattagatctgttattttaaatgggaaatttgaatttctatgcttacattagggaataattttttccctaaacttaaaataggaaatattagtaaaataggataacattttcttaattcccacaataccccccatttgaaaccatcagccctctctctctttcgcctctctttctct

SEQ ID NO: 133795 - DNA, 582 bp, Cannabis sativa
cattatcactcgaagaacatagcttcatcaagaactttttatatttatgtagaagttaagtaggtttttttctgtaattttcattattcccaaagttatttatttcaaagggtaaatagttgtatgtaacgatcaattttaatttgtgatgtgaagaaaaagtacaaagcttcattcatcacccgtagaagattttctttctccctgtaatacaagagatttacaaaaatgggtatattaatatatgagatataaaaaatgaatttaattctaaattttaagaactgttttagatgagaagataacatattcgtaacttcacggattattaattattaaatatatattaataattaattattaataatgattatatgggaaacaattttgtcctgtgatatatgtttacggaatgtattccgtgatgtacggcagtcgttagatgggggagttatttgatctgagggttgaggttgatttagggataattaaggttaaataatggtaacgcactcgacccatctaaccctgagacccatttaatgtaccacggaatacattccgtgaaattacatcacggga

SEQ ID NO: 133796 - DNA, 1145 bp, Cannabis sativa
aaaatgaatgtttgcaatgagctattaatatgctcatttagtctctaacaagctaataatatgctctttctcattctttagttagatatgctctttctttagacaattctcgagtttggtggtcgggttttttgctcaacttactttagatgatttatgcttgtactaatctgagaatcttcgtggcttttgtcagaagagataccttttaaatgttctattccattaatgagtaaatgcacggtaaataatttatatattacaagtttacaagtgaatgaaccaaaataaaaatgaaagtacaactgtatatacaaaggtaaatgctactaataaaataataaaattagtcactgcttaacatcccccctcaacgggcatagaagcacgataagtttcgatcgaagctcttgaaaacgagcagtggcgagaggtttagtgagacaatcagcaattgttcagccgatggactatacgaaagggtcaaagagggcggttgacacactcgcgaataaaatgatagtcaatctcaacatgcttagtgcgagcatgaataaaaaggatgaatagtgttgatattatcacaatgaatggtaggcacaaccaataaggaaagaccaagttaacgacaaagattccagccaagaaatttcagaagcaccattagcaagagcctgatattcaaactcggtactggaacgagagaccactttttatttaaaagatcaacaagaaatgagattcaagcaaggaaatatacaataggcattggtgttgcaatgaatttacacatttagtgacactctatattgacatgtacaaaaagtgtcggtcactaaaagttttaattaaattttaagcgaccagcattgttggatcgtaaaaattcaacatctatgttctatgatgtgggtcactaagaaatatgaagggtcactaaaaatttatttatttctaaaatataaatatatatagtggcgcgcactgtacacaattctaaaagtgttcagaatcttgcaatgcgggtcactaaatacttaataaaaaaattatgaaaacaaacaaacatacaaaaaagaacttattgttacaaaataatatcaaatagatgagaagaaagaagaagaagatgaagagagaaagag

SEQ ID NO: 133797 - DNA, 597 bp, Cannabis sativa
gattgcaaagtgcttgtggattatatctgtagtgaggcttctcaccatctgttgttaaacagatttaccaaagacatcagaaacttcctctcttacattcctaatgctaaacttatccacatttccagggagcacaatgaagaggctcacagacttgcaaagtttgcattaggcctagttcaggaagtttattggaaagatcataattttatttgtaacctgtgaattgtacctcaaacgtttgtgccttcaatggaattcaggttttcttccaaaaaaaaaaaaaaattgattccggtgtgggtgcacgtgataatcatgtgtgctctaattaatgaaggtcacaagtaataataaaaaaattatatataaggctagggataaaaaatttatttttaatttttattgagtgagacagtgaaatgataaccctgcggttttatatttgaagatgagggagaatctcactagagagctacattctccaattaatgcattattttaaagagaaatgctaaaatgcactagtggtgtcaataccctcctacgtgtcaatatcgctattggtttaattaagtatcgagtcccatatagttt

SEQ ID NO: 133798 - DNA, 756 bp, Cannabis sativa
  modified_base (709)..(709): a, c, t, g, unknown or other
ttttttttttaattttttattatgacagctctcactcatattggttccatagggttctttcacatggccagttttttagccgaaattctaaaacaaataatatttattattataagatgatgatgatttttgttctgttcccactatatatctattttaattgttaaattataatatggatattttgttttgactttagaaaattgaatcaaaagctaagaaatctttgtaattggattcatgtgagtaatgaatatgtatccaatttttacatcaaaatattcttttaactaatcatatctattttagacaagatttttacaaatttaagaaataatattatgtgtaatgttttaatacaatttttaattaattgatagcgataaatgaatataatattgtgtatgtaactattgttttaatttagatttttcatccttctgtgattttatagatatttgagttggatcttctttagtattgaattataatttcttatatttgagttggaatggaaactctatttacagaattttaatttttttatatatatttttacgaattctttttcttacatagcgttattttcatgttacataaatatagtataatgttgcaacaatatgaaaataatgttgttttttttctctaaaaaatcataaatttgtaaaattgtaaagaaaaaaaattcgtaaaaatgtaaaaaaanaaaaaaaaaaaaaacaattttaaatactttttaaaacgttttttttt

SEQ ID NO: 133799 - DNA, 1400 bp, Cannabis sativa
ataatcttaaaactaaaaaataatttaaaatgatatttactatacatttttgggaattgtatgtattaatccaatcatagctataagaatagcataatacttattggataatgcttgtgtagaggtattaaaaacgacttagagtcattttttttttaatttgtgtcaatattttattttatttttattaaatattatttccttattcaatttttttacatatataattatttgttaaaatactatcattttcttaaaaaaaaaataaaaagaaaaaaaaaacaaaaactatcattcacttctctcttcttctccttcatctttttctctaaaagttcttaaatcaaagaacctaaactataactaaaacaagaactttgatatttttttaaaaggaaaaatagatgttagaactaaaaaattttctaatggcgaaatcatagaacaatgcaaaaaaaatttgtacatatctctcctcttaaattatatccaccaaaaaaaatattttttttggtgaatatgagtagttttcataaataattataaaaaataattaattaaagaaataaaattaaatatgtaaataaaatgaaataatgatacctatttaaaaaaaatgactctatataaagtcatttttaatacctctactgaagcattatattaataaattaatgtgacagactataattaattaatatgtataatattcctgatcactgtatatgcatatagttaagaaaatgattaattatttattgtattatatatacaggaaaatgcttaggtagagtcacaaaaaatatctgtacatatagacattttttttattatgtgcatgtcactctatcgttttatactaataattaacataccctcaaaacttttgaaaatttatccagctatatacaactcaatcatatcttcaaaattactaccttatttacagttaaaaaaactaataattcctctatttttgataattaagccaattattaaattctcaaaattaaattttaaataaaatcaaattttatgaatatgtcagccataataacaaaatggtaatctctgaaagtcatattcaatctataaccaccaaaataaatattaaacaattatacctttggaagttatattcaatccataaacacctaaataaatcttaaaacattaatttgtctagccaaaggtaatacctcttattcatgtataaagaaaacccattatttcaaaatacagcaaaactgatcttccaatcttttgtttttgttgttgaaggaatttagacaacatcagaataaatgatacaataataagatgagcagaaaagtatgcgagtactcagcctagagtggcgagtattcgaactaagaacaaaaatgctagaaataaactgg

SEQ ID NO: 133800 - DNA, 1248 bp, Cannabis sativa
aaagttaaaaaaataatatataaggtaattcccctaaaatgtatgtgtattttataattttaataaattttttcataaaagttattaaaattataaaatatacatatattttaataatcatgtttataatcataaattaggactgtatggagtaaataatttctttatattttttataatgtattactgttatcttattttttaataaaatatttgtctatggttaataattacaaaaaatcatataaaaataattataaatactgcaatcagtttaattgataaataaattaatattattaaatctttaatttcagaaccaataactattttatttgcaataattataatactatttgcatttttttattttaaaagggtactatttaaattatttaaattaactaaattactcaaaaataaaacaagactaataaaaacaaatctacaccaaaaacttatatcgttatttaatatctttttggcgtaatagtaacttcatgaagatatatttgttatataaattctcaaaaaatttaatttatgtcactgacatacaattaataatttttttatagcgcttaaagtacttataataaaattgaataatgcttaggtagagttataaaaaatgtctgtacatataaatatttttttcattatgtgtcactctattgttttataccagtaattaattaatttcttttatattattattattttttttttggaataatttcatgaccattaataaagaaaattactatattcaacaaataatacccctaataatttatctttatcttttatttttattaagaaaatgtactataattttgaggatatggggagacgaattgctaaacctctcactaagtatgggagcatattcctaatgtgctaaaggccttttaatctgatttcgttacttaaattgtatttgaatatgtccagctagaccttacaaaaaaaaaaaacaaaaacaaagaatatgcctgctaaaattgttttctaggtccgcccatgctgcctaccctacatacaaagggatcccttaagttgtatgtttcaatatatgaataataagagattccatattaagctacattatgaaaactacctactttaatcattgccatatgtattctcacaacgtgaagtacattgatattatatatagaatatatatgtaaatcaaacaattggtagatacaattttaccttttcaaccattcacaagaaacttat

SEQ ID NO: 133801 - DNA, 884 bp, Cannabis sativa
tgctttgaacggaggtgatttggcatgggggcggttgtgtctcatatcaatggagaaatgctttgtttgtctactactccagcatcagacatgctcgagcctcatgtggtggaggcttcaacccttctttagggttttcttctctgtaagcagttaggttattttcgtatttgtgtgttttctgattgtttgcatatagtgaatttaattttaataaaatgtcaatctgcaatgaatatagtattgtcattaatgatatctttcatatttaaaagttacactcttatatttttttctctcattgtaagcgagttaataatgctctcttggccattctttagctaaattggctctctctttagatgattctcgagtttggtggtcgggtcttctgcccaacttactctagttttaatacttgtactgatcattagatctctttagctttatgtctttcttaattgaattattcatttttctcaaaaaaaaaaaatacatggaaaaatatgttttaggatatttcttcaatacaacccgaaaataattctatcgattttcgtcatttgagagaatctttttatatatttttctttcataatcgtctatattttaattatttaagacatcctaaaaatattgaaagattctcaaaaatttaacacattaaaaatgtgattcaagaaatatattacattggatactcttttattttatatatatgtgaaataaattaacggtttaaatcttattttttgagtgttaattttttttaaattttactaatatcctaaatacttacaacatatatcatgaaaaaaaaagttgaattgtataatttttttttacatagtaaattgtagaattttttattttcaaaaaaaaaa

SEQ ID NO: 133802 - DNA, 752 bp, Cannabis sativa
ataccaaaaacttaatttaaaaaaacttaatttaatatttcacgaatttaatatttcacgagtttaatatttcacgagttttttatttcacgagttttttttttcacgagtttttttttttttctttttctttccttcatgatataccaataaatatagaaacaatattccacatttttttctctctttcgttcactacatactatagcacactaaaataatataccacaatcttaaattaatatactacctttcatttttttaaaatattctattatacataaaaacgatataccattgtgcaaaataactctaccaaatacttaaaaatattataccacaaactgaaaataatataccactttttaatatttttttttatttcttaatatatcatagcacatacataataaagatataccatagtgcaaaatctaagaggcgagagaggaaaaactggacttgtcggtgccaagagagaagaaggaggtgagacttttggccttgacacgagggttatatttgtaatttcatcatcaaatttttatttgaatagacattttgttaatttttttttataaaaagatacatttattaacttaattgttagatttaggaccattttgcatcttggctaaaaaatctatgtgattccacctcacatttatttaaaccttcttttatatatatctattgttatgtttggtcactaatagaggcaagaaacaccaagttggtttattttcatttat

SEQ ID NO: 133803 - DNA, 1219 bp, Cannabis sativa
ttaaaataatttggcaaacaccccctattagttttgaaaatttattttttgtttttaaaaaatgaaaactgattttaaattatgaagccaaaattgccgaaaataaggttcaaacagcatgttgttcgcttaactcttttattttataagtgtgtgaaatagactgtttgaatctctattttcgacgtgttaaatatttctaaatttcctaaaattttaaagaatgtcttaaatgacttcaacatagacaaccatgaaaaaaaaaaagactaaaaaattttccaatatgatatgccgaaaaagatagaggtatattggtacaattttaaaggggatgtattttagaatttcttatatttttggtatataactttttacatctagcacttctcctcacatttgggtatgatgtacataataaataataatacctgcaggtgggtgctgtaccattggggtgagctgagattgtcaatggctcattggttgagcactttgatggaggctacgtttgatgggcagccaatgattgaagggtttgatgatggtgttgaagatgaaacggcaccgttttgctttgagcaagctgtggtgatgagacataatgagggtgggatgcataggatgaagagaatggaggtttatgatctgatgaggtgtaaggctaggatctattgtaatgtatccaccgttagacctaccgccggtgaagggaaggtgccggagattggtttgacgttgttgatgagagtgggtgcgcggtcgttcaagaatgagtcggcggtgatcggaatatttggaagggagtgtgctaaggtggagggttgtcggatgatggtggctcattccaataacctcactttttgtgaacaggttagaattaaaattattattgcatttttgttttatggtgatattttttttagaaggttttggaaatagtgaaaaaaaaaaaagttgtccaaatattttgggagtagtttttgtaaattattaaatatttaaataatttacgatattgaaattagagttttcaaaaagtttttctttttgttcatgcatgtaaattaaccacataccttttgaactatgatttcagcatggtaaattatcttgatttttttggaaaaaaatcttctgtccccaattacctgtctcattcatgtcccttcaataaatagctgccatgtgtctatctcttttcctacttaaccgattc

SEQ ID NO: 133804 - DNA, 873 bp, Cannabis sativa
atttgtacgtacaaatatggatatatgaataaaaagtcaaaaaagtatctttatattttggttgagaggagatgggcttttcacctaaagcatatatagatggttgctgtctatttctctaacccttagactttacataatataaggtttaataaagtctattttcaccacgaaaaattggaataataacagtagtgacaaaaaaaaatgacactatagttatttggtggtaaatgaatgaaaattacaaggcaggaaaaaataaaggaggaataattaagaatagtgacaaaaatataaatgtgttattttgggtggtcaatgagtgaaactaactaagcatttgaatttcaaaaaatctgaatatgtttataaatatgtatatgtattataattatagggacccattaaactttgtgttttcattatggtggcagagattccaagtttgtgcttccgttttcttttgtctctaatgatttgaattttctctctttcaaacaaacctcatcagacacttttggctaagtaacacaaaatcacaaattaaattcaaatcacatcttaacatatctttgtgccatgattagtggttgacatacatatatatataaatatattatatatgagcttattttaacttgcttttcattgcgtatattataaaactgaaacacaaattaattcattacaaaaaaataaatgagaaatgttaaaaaaaaatatatttatagtgttaagatgttatatcagtattaataaaattaaaaaggataattagataagatattatttttttttgtaaaaaaaatatatttttacaatatttttttggaaaatttacatctcaacacgtttttgttaaattaatgc

SEQ ID NO: 133805 - DNA, 607 bp, Cannabis sativa
  modified_base (579)..(581): a, c, t, g, unknown or other
tgatttttcaacttcatcaaaataaaaaattaactgtgaaaaccattttacacggactatccgatttgtatggcgaaacttaatgattattttttagtaaggggttgttaaaattagagtattaaaatattattaatatattaagggtctttataaatactaattaagggatggttttgtttgttaatttagttagtttttgtcaactgctgtcaattggtcagtttacttgcaagctagctacatgaaatgcatgcctgaagttatagaataagatatataaaaatcccaaataatatccttttgttcaatcctattatatataaattaatgtatctatgagcctacccattgttttagagctactcatcaatcggagaagacaattaattaatacattcatataaattgtgtatatataaactttacagtgaacaagtgcgtactatgctagccgaacttatattttgtgggatttatgaaatacggatattcatgtttgggattatttcacaaaaacataaaaacaataaaaaaaaaaattacaaaaatacggttttacggaattttaaacatttnnncgatttttttgattttatttatataa

SEQ ID NO: 133806 - DNA, 648 bp, Cannabis sativa
  modified_base (67)..(80): a, c, t, g, unknown or other
caatctcaatagtttaaggggaatttttaacggccaaaaaaattcagggggcatgatttggtatatnnnnnnnnnnnnnnggaaaaattactaattagtcattagttaatgcccatttttttttaaaaaaattaataaaatagtcaaatataattaattagctaataaaaattataaaaatatatttactacctattaaatatataataattaaattaatttatttaattttttttagtattgcatattaatatattgtaacaaaaacgaataaatatgttggatcattaaatatatacgtgttatatcgtatcactagtaataaaattataaccataaaaaaattataactactaaattaatattcaaaatatatatatattatgctaacaaaattttatgtaccgttattaaaatatgtatacataccaaaaattttatatataataaaataaaataaaaactaaatatcatattaaataaatatgttgttggaagaattcagacatcactaaataaaataatatattaaaaatatacacagaattacgtgagtactcaacctagaatggcgagtattcaaactatggatacacagacgtactggaaatataaagaacacaaaagaagtatagtggttcagtcaga

SEQ ID NO: 133807 - DNA, 1581 bp, Cannabis sativa
taattaattttattgtggcataattttttgtttatttaattatttattaatttcaacaactaatgcttatttttcttacctatagtaagattaagcatgaaaagttatttgataatgtgaaatatttaaatattgtatcttcctccaaaattatattaagatccttataaggaattaattatcctatagataataattgcttgctaaggatgtttaatatggtgaataattattaaatattatgaatcacaattttttttttataattttgatagtaaattaatgtatttgattataatatttaatagattattcttacctgtgaattttattttattaattttttctaagaactcgagcatacatcatgatcatttgttattttatgatcatttatttttgagaaaagagcacaaatgatatgattttgttataacatgcatttaatggttcttgcccttgcttctcattcaactttaagcattccaagagtctctaccatgttgacgctgaatggaaccaactacaagtagtgggttgaatctctcatgttgaatttgactcttatgagagtggacttggccttgagaatgaatgcaccacctaaacccactgatgatgccactaaaaaagataagaaataatattaggattgggagcactccaatcattattgtttgatgcttatgaggtatcacatgaattaatccattcgtgatagtattcctcaaactgaaaatacaaaggatttccttgctaccattgaggagaagtataagaagttgtcaaagattgagaagaatgagttcttaaccttgatccatcgcactaattatgctgatacatgtgatattagagctcacatcgacaagctcatgggttgttgccaaaagcttaaggctatgggattggatcttggtgaggattacatggtgtggtttatgatggaaaccatttctttctagtttgatttaatcagatcaagatacaatgcttaaaaggagcaatggaatattgaggagatgactgctattcttgctaaggaagaagaggacataagaaaaggaagagtaagaagtatctccatggtggatataaaatatggtgaattcaactgtattttattcagtagagtagctagtatttatatacaagactaagaagactaaatatgaaattaggaagaaattagaaactaagaaatgtgtatatattctaacactccccatcaaggtggagcataaatatcaatcatgcccagcttgttacattgataatcaacccacaccccattcaaaacttttgtgaaaatatctcttaattgttctccaatcttcacatatcatgtggagatcatgccttgttgaattttctcacaaaaaaaaaaaataacaatcaatctcaatgtgcttagttcgctcgtggaacacaagatttgagacaatatgaagagcaacttggttatcacaccacaattttgctggaactgaagttttaaacccgatttcagtcaaaaggtgataaatccatactatctcacacacagactgtgccaaggctctatatcctgattttgcacca

SEQ ID NO: 133808 - DNA, 2145 bp, Cannabis sativa
  modified_base (649)..(656): a, c, t, g, unknown or other
  modified_base (1776)..(1788): a, c, t, g, unknown or other
atatctaaataaattttttaataacaaataaataatttttaaatcacttaattaattttaaatttaatttattatttaattttttaatcatctaaataattttttcttaagatttaaattaattttttaagattttctaaaaaaaatgttgaatctttacaatttgatagttgtcaaaatttaaggggcaaagttactattttacaaaaatacgtcagtatttaaaccaaataatagaatggaaccttacagaatgactgaattttggtaaatgtaaaagttcaggggattcttaacaactcatatattttaggtgacaaaatcagtattgtcaaaagttcaggggacaaaattactaattattcaaaaaaaaaattattaaaattttcaaatcttacattggaatagtcttttcttctatttcaaaatagaataatcattccaccaaaataataaaaaaggttattttattaaaataatattccattactttaatatgcaactaacaaaaaaattgtttaaaaattatttctattccattccattccaatgaaaacataagaatgagaatgagaataggaataggaataggaatggaattgaataaaatttaaaatgcataaaaaattgataaaaaaattattaaatnnnnnnnncatcatgcattggaatggtctttcattccatttcaaaatagaatagtcattctaccaaaatggtagaaatgtcattttataagaatgacattccaacactttaatatgcaaccaaacaaaagaatgaaatggagattgtttcctttccttttcattctattttattacctctaaccaaacgccgccttagttaaatttaactacaacaaaacaaattgacacatgtcaacatgttaatgattcacatcatattttcaattaagagatttattaaataattttaaaactaataaaaaagaactaaatattaaaaagttaaaactatttttgttgatgtctttctctctctccttcatcttcttttctttgatataagaaaaaaaatatgaaaccaatcttaatcttatggtttaatcttctcgattgcttcattagtgcactgtacagattctggtcctaagtatttcttctcccctatctcatcccagttgatgggagatctacgttttctgttatacaacaaattcatagggagccatccctattgtactttgataactgttattatacgagaactttatcaggggtaggtacttactccaagagccctcaaaatccataacacaggctcataacaaatcttccagtatctgaatagtcctttcagactgtccatcagtctggggatggaaggctatactgaatttcagtttggtacccatagcccactgcaaactctactagaatttagaggtaaatttcggatctctatccgaaactatagactttggtacaccatgtaatcttactatctccttgacgtacaaatctgcatactgatccactataaaggttgtcctagcttgtagaaaatgtgtagacttcatgaatcaatctaccacgacgtaaattgaatcaaataaacccgtggttctaggtaatccaaccacaaagtctattgtgacatcttcccatttccactagggtactgacaaaggctgcaacaaacctgccggtctctgatgtttagccttgatctgctaataggttaggcatcgcgatacgaattctaccacattcttcttcattctgctttaccagaagtagggtttaagatctnnnnnnnnnnnnntggtgccgggatgcaaggaatatggagtggtatgagcctcttcaagaatttcaattctaagttccgcactacttggaacacaaaccgtgcccttgaataacaacatcccacgatctgacactgtaaaatctctggctttaccagctaaaacctcttctctaattttcactaactctggatcagttaactaagcagcttttattcgttctaacagatcagattgcagcatcaagttgtgaagtttgtctaccacaaaactgatgcttgatctgaccatgtcttctgctaattgaggtgaaatttgaatcatagtagttacctgcccgggacccttcctgctcagggcatcagccacta

SEQ ID NO: 133809 - DNA, 831 bp, Cannabis sativa
ttttttaaaaaaataaaaattcatgatttagaccaatcagagattgtcacgcggcaatttacttaacacttaataatcaggtatctacataatttcaaaaatataacttaagtattattgctgccaaaaattaaatttagatatttatttataaatgaaaattaaaatttatgctgtaaattactcttaatataatgtatatttatttttaacatgaatttgttataaagtacaccacaccatttttaattatacacttaaaattaattactcaatttattattttgaccaaaaattcaagttcattaaaacaataattagagtaaatatttttctttaaatactgaaacaaataaaaaatacatcatttacaacttgagagcataaaactcatacaattctataataccacattgtatggaaaaggactcacaaagtttttcttagaaaaaattttgttcctaaaaatacttatctaaatttaaatcattaaaacctttcaaaataacatattatatcattaaaatgtagttttggctttaaatatttattgcaattagttaaccaaaatgaaaagtccgtgaactgattggactgacaatccaaaaagcctttgactcagtttacttcacttttaattctttttttctttctttcattattatttcttaaataattaatagcataaatatttatatttaattcaatatataaatttaaaatttgacaataaaaaaattatatttgtggaacttctataagtacttgaccattaaatattaagtattgcgtaataatttttgattagtctaagttattaaatttttattt

SEQ ID NO: 133810 - DNA, 1148 bp, Cannabis sativa
aattcgttggcatagtataaggtttgattgtgtagtccatactgtatgcttggtacactaggctgagtttgccttagtgacatcgtaagccgcaagaggtgcttttgttgaaaaggaagcttgttggcatggatgtggaagtattgcaggggtcgttagattcttgttagtgacgacagtggtcgagagttgatgaccgagatggttcaaattgggatagacatggaatgcttcagttgcttcatgtgtgtgtcaagaggaagaccaaagggggcagatgccgcaatcgtcagaggatgatcgtacttggaggcatttgcatgtgacttttatttgatccatataggaagcgtcgagacagttgagtgggatgtgttggcttgtaaaagcgccagtgggcgtaagtcacacaaaggcatcgatatagatgcatagttgtgcaatgaatgcatcaaaaagccaacatggctaagaaaactgagcgcaagtgttaagatggcgctagaatttgagtggaggccagagggctgttccagtggtcatgtgagcctacgaaagtcaagaggggtgctagagtttgtatgaaggccagagggttacatcattagaacttagtacatcgagggaatccgaaagggtgtagtgctagtgcgaatcagttggatggttgagtggacaatgcatgcatatggaaattgataggggtgctatatgagatagttgactcgagagtcacatcttgcgtgatgcacttttagatggcatggtctgcatgaggtcaggcatttgtatgtgggcatgttgtcgaggacgccaacagatgaagtgggggagagaccctcacggttcatttagcagattagggattcattagaagcatcgagatgagtatcatggagatggattttgtcaaggatgttaagttaagaagactcgggcacatgttgtgctagttatctagggtgaaattcaacaggtactaagataacaccatggcaatgttggccaaaggaaaaattcaacaggactaaggtactaaggcaacattgaaatgtcgacgggcaaagagtcaaaataacagaggcattagttcaacatcttcatcaaagtaacatttggaatggagggaccgtatgcgagtatgcggt

SEQ ID NO: 133811 - DNA, 1026 bp, Cannabis sativa
gtcttgttgggcttggctcacggatgctctactgtgcaggaaagggcaattctgtttgtaatcaaccgtgagttcgagagcttggcggtggattgtacatgttcaggccacactagaccaagcgggttgggtctaccagtgaatgtattttgtaatctcgaattttgtcgcttaggtcgacacgtgaattaactttaatattttgtgaaaagtttgtgggatcccgagacatattatctttttggtttgtttgtaaagttaaaaattattacatgttatattttcattccattgcaaataaagtttaaattttcccggtcttctctttctagtaatctcggtttagggggattaggattttaatattgattgtcgtagtgtgcctaattgttagagcgtcacaatatcagcccccacaatatgccaacacttttgataaaattctggagtcatcccattaggacatggagacttgtcgagatgcatttgaaacaaagtattttttaccttatcatttgtaacaggccgaagcaaagtttcattatggacatcagtaatcgtctttggaatccatcaatgacttcagttgcaacacaaatagagggagcagataattcattaaaataattcagcataacatccaataaccccgcatcccaatcagcccaactactgtctaggcattgaagcttctgaatgttgttataacagcgccaagaggaagctttagcatgaaaaaatttactattttgatcaccttctgaatgttgttagaacaacacctagagtagcattgaatatcgacgaatatatgtttggcaaagtactaattgacactatgacattggtacgactagagtaccgagtataggctgatattacggttaatagtactgtcgtacgaatgttctatactcagtatgtgtgggacacgagataggattataattaggtgtacgagcgcccaattataatctagtttatgattatgttataattatgcttttcttactgagtctgtcgact

SEQ ID NO: 133812 - DNA, 539 bp, Cannabis sativa
cctcaactcctttttccttcaggctccataagaatttgatctaatcccacactcgggccccaggattcagcactggcatcacaccccagggggaggacctccagaggtgaaaaacaaggttgcaatagaggaaaaaatgttccattgtttcctctcccacaccacaaataggaaaagacacattctcaatatacatccttctaggaagagtagccctgataggtaaggcatttaagagaacactccattaaaggaccttgtgacactctaagattctagagttctaaagtttattccatagagcgggagcaatgttgctaggagaagcacgatccaatgcataagctagatataggaagatttagtagagaaatgaccattggattctttagtcaaaatccgcttatcactaccttgacccccaggcctaccacctttgatgatactattggttgtctctaggccaaacaagtttttgagttcggcaatatcccaattaggggtggcaaaacgtgtcatcgtgtcgtgttcgtgtcata

SEQ ID NO: 133813 - DNA, 675 bp, Cannabis sativa
cccttcctcttgccatcagcttggcaatatgagggtcctcaggaggtgccctacgacatatttacttcgttttagacatggtgggatatggctcagaggatctagccatgataacagtagcctcaactgtgggaagatctctaactataaaagttgcatgtctagtgggcaacgtgtcaagcacaccttcttatacaatacaagtccacgacttggggaggaactgcctccacccctggttcacttcccagatgaaccaaccataaaactcactgcctattagctcagaatagtggtggtgctaaatctcaggttccggagaactactactgacctcaaaatcacttgaggaactatccgaagaaccctcagaagaagaactagttgtctgaactagacgataatctttgtaaagaagactgagcaagtctttttcaatatagttgtcacctccccagaagttgcgcgggttcatccgtgcaaaaaggcagagggagatgaacaatcggatgaaatcaaaagatttagacaaagcacaggtcaactggccaaaacctaagagtattaacaagacagcccagatgtagaaagctataaattggaaaagtatagacttcaagttcaaaaaattaaataaacattgagttttaggccattaaatggccatgatagatt

SEQ ID NO: 133814 - DNA, 626 bp, Cannabis sativa
tttcaaactaaaaaaaaaaaaaaataaataaacaactatgacttttggaatataatttgcaaattacttttctttaagtttgcactaacccaaaattagataaagagatatgttctttttttcttctattattaacattgataaagagatatggttttgtaccatagttttctataagttattattaataatattcttaaaatttgcctaccaccttatacatattcagtaccctttattatcaatttctttttcatagtttgaaaaaaaaaaagtaactgatatttgttcaccatatattgcccacaattatgatttttttttaaggaacctacaattaggtttatttcataacaaatggacctacccatagtacatgaaacaatactgaataatcatttgaagaaaattatatgaaataataagtaggtaattaataatatcccattatcatttactcattcaattttaaaattacagtaataaaagtataaatgtaattataaaataatttaaaggaataattagataaaatactattttttctaaaatatttacatttttacgttcaaagaatgttttttaacatttttacggttttttaaaaaataacatgaaaacaacat

SEQ ID NO: 133815 - DNA, 637 bp, Cannabis sativa
tttttttttttttttaatgatattgaaataattattatcttattttttatgtgatatgtttattctatttatttaagaattgtgttttgaagtaatttaatacattttaaaagatttaaaataatttaccttacaaaaaatagaattcaaataatatatttcacatgcgtatagaaaaaaagaggcatgtgtataacaaattgtagagagtgtaccaaaaaagctccttattattatagatgtcgaaatagtagaaagtgtatcaatttcgtagaaggtgcagcataaaagttgcttgtatagtattattgatatgtttataaaatttagaagtttatttattttattttaaaaaattaatataataatagagaatattttttttgtaatttttaatattgtggtttgaataaaagagtataacatcatattttacgttagtgtaataccatatttgatattattagtcttaattaaaagaattttttagtgctgagatgtaaaatgaccgtaaatttgaaaactaagataataagtaaatgtccattttttaaaaaaaaattaaaaaaaatgatcaaatataataaattaactaataaaaattataaaaatacatttacttcatattattttttaa

SEQ ID NO: 133816 - DNA, 788 bp, Cannabis sativa
taacttgcagaaaggtgatctatttaacaataattcactaaaattttgagttgcgtctagatttatctgaattagaacctattgaaagatgatatattttttcttgacagggtgaacctgcatatccttcggttgaagttgttactgaaactgaggtacaacattgtggtatagagcatatgtcatgctgtgtttactttctgtttatttcataaatataggtagattcatttgattattttgtgggcaaactgatgaccaaaaaattttctttttcatgagccaaattatacagcttaactggaactgttaagttttatttttgatttggaattttcttctttgctctgtatgattttcattcaggatcacagatattcacatttgtgcatgattgactctatactctcatactaatcaccttttagcaaatgaattccaagaatttatatatttctaagaagttgaaatgatggcaaatacaaaaaacaataacattttaaaatctgaaggaaaactcgcttgtgaacttcgaatgcgaatttgagtttatagggatacttccgcttagtattgaagacattgtgatactcttcacttcttttgtacatagttttgtttcttgaactagtcaatcattatatataatgtatacttatgtttgtaagtatactgagatagtttatgcctctgtatattttatatctgaaaagcaagggatatggctctgataccatgttgagaatcatggtgttccatatcaaaaccaattggcaatgagtggagta

SEQ ID NO: 133817 - DNA, 673 bp, Cannabis sativa
ctctctcgaaattcctagggttgcagtttttcctgtaattcaagtaattctcagcaagtttttatgatttcaagctgtaggtaagcttccatcacttttcttctggtttcttgaactttaagaaaattggattatgcatgttttgtggattattgctacttttgttgctgtgggtgtttgatatgtgtttttgtagttaaattatgattagaaatattgaattacgcatgttttgttggctaatttgttgaatgagcaagctttgagttttagaactgaagcttggctcattaatggcgatttttaattttgagcttgggtagttgttttattacttggaatatgtctattgggatataatatgaaggtatgaaaggtttggtaaagtttcgaattgatttggttagattttggaattatttgggctttttggtataaactgtcttaccggttttaccgaacctgtaaaactgattacccaaatttgctgctgggttccccaaaaaatttgtgttgtcgatttgtgctagtttcagaggtttagttggttaattccttactagtttagggtgttgtcatcttaggttacagtagataggtttttggtttaaaacctaagtccccggttgtgatttagcgtatcacttatccatgttattatcgatgtgattta

SEQ ID NO: 133818 - DNA, 1287 bp, Cannabis sativa
  modified_base (26)..(41): a, c, t, g, unknown or other
  modified_base (662)..(665): a, c, t, g, unknown or other
  modified_base (1227)..(1236): a, c, t, g, unknown or other
tgtttaggatgttaaaaacatacttnnnnnnnnnnnnnnnncctggtaaaatatattccaataacgtcatggtgcaaaaaataggataacatttctcccccaagtttgcgtgggaccttcctggtcgcacgtggacttcactcagcctggagtcttgtcttgatgggtgacgcattgtttaggtgttgaacgatgaatcgacgtgaccttgactaggggtctcttatttttgcccatttaatgctgattgacagttttacctcaaatcacagtccaatgcttgtgcgtgtttggcggttacactccctgtaatgagtacataacgtacacttttaggaggaaaatcaaaaaatttgaattttcaaaatgattaattccctttttggattgtttatagataagattaaggatttctggcaatccttttaaccatttcaattcttaaatgcccgagcaaaacactttttattaaatttcctcccaacttcttcgaaaagattcataggaataccttcaatggtttcatcttagtagagcaggaaagcttcaaatcagtgagtaagttcttcatttctttcttttacatatttgcaatgaaatgcctatattatttctagattttttgctatgaatctcacttgttcttgaactgttctaggttnnnnatagaatacctaggtttagggcttagaaatcttgattgaattcagccataacgtctgattgtctaactgggcttcgaattttaaccttacaacgtttattttcactcgtccattagtgttttagtgaaaatcagattccaattcaaagttttgaactttatgggttgaaaattctatttctaggtgaagcttttgcttttgatttcttaatcaaacctggtcggtattgttgacctcgcttttagccaacaacagtaagtcaattaataagtgataagaaacgtaataaaatagagcaaaaatcaataaactataaagaacacaaggttttaaagaggttcgacccctttagttcggtaatagcctactcccctttgcttgtattgacttaagaataaagaatatagtgtttcctctctcaactttaggacaaatcaaatgaatatttattaataattctacattgttcatttacgctttaggcgttttcaactcattctaactcaactttgaatgataaccatgatagaaacagtattctagaagagactcccaagagaannnnnnnnnnacatatttgatcataattgaatccctaaagtggttctatataggtacctat

SEQ ID NO: 133819 - DNA, 1057 bp, Cannabis sativa
tggattggtctttgtcttttgattgacggttatgagttaaccaccaaactaattgagctacaattatctgattttgaataatcttgggaatggatttcttgtctaaatatggggaaacgattgattgtaatcaaaagatggtggtatttgaacccgatagttccaatctagcagtgtttgtgggtaaggtacaaggatcacgtataccccgaataacaatcctaaaagctagatacctgatgtgtagaggttgcctaggaatcttagttatgacagtggatagtagtcaaccaatttcatctggacctaaagacacaagattggtgtgtgcatttatagatgtatttctagaggatttacctggattaccaccttcttgagaaattgaatttgttataaagttaagggagtggaaccattatcaaaggcgatttatcgaatggctccaactgagttaaaggaattaaaggtttaacttcaagaattacttaacttaggttatatcagatcgagttagtctccttgggggtgctccagtgttattcgtgaaaaagaaagatgggtcgcttcgcatgtgtatgggttattaggaactgaatcagcttactatcaagaacaaatatcctttaccctaaattggtgacctacttgaccaattgaaaggcaaaacgatcttttctaagattggccttctctctagtttccataagttaagaaattgagaagaggatatctcaaagactgcattccatactaggtatggacattacgagtttctagtgatgtattttggactcacaaatgtcgtggctgcatttgtggatcttgtgaatatagtattcaaagactttctggacaaacatgtgatagtgttcattgacaatatctgggtttattcttaatcagaagaagaacatgaattacatctcagattagtacttcaacgcttacgtgatcacaagctttatgcttaattcaaaaagtgtgagttctagttatcacgtctctttttagggcacatactggataaagatgggatcatggttgatctggccaa

SEQ ID NO: 133820 - DNA, 514 bp, Cannabis sativa
ttccattgctcgatatgcagctttagctgaagatctcgagactgtatgttgctttttactcttccaggaaatgatagagtctccaagaaatatgcaaaatcctgttgtggacctccttgtgtctatgcaaggtgccaaatctacatctatgtaggctcttaattgatcagatgttgcagagaatatgattcctttgcatagataagattttatatactgcaagattctttgagcagcaattagatgctttgtcctaggagtagtgagaaattgactcagtttattaactgagtaagcaatgtctggccttgttatgactaagtactgtagtttttcgattgtttttctgtacaaagttggatcaggcaaggtatcctttgcatcctgtgacaatttcagattagcttccataggggtgttaataggtatactccctaaatatccaaagtcttcaagaagttgaagagcatatggtctttgggatacaaaaatccctttgctgtttgatatattt

SEQ ID NO: 133821 - DNA, 648 bp, Cannabis sativa
tatagatgtcaaacccaatacatgtagaaccccatcttgatccggtgattgcacatttggactaaaagtgatagcagacttctcaaagttagtcttctgactagaggcagcctcataaagtagtaggatacgcttgatagtttcagtatcacttccattagccataccaaacataagactatcatcagtaaaaaaataagtaagttacacgtggtcttgatctagaatacctaaacttcatcaatttaaatctagcttctacatgagagatcagtgaagacaatgatttcgcacagaaaaggaataaataaggagacaaaggacattcctgtcgtaaccctcttatcgataccactcttcctttagggcggccattgactaaaaaagcatactccagggtcattacacaatccatgatcaccctaatccaaccatgagcagttgccaacaacatcttcaacttctcaataataataacaataatgttctctaaaattaaaagtccaatatttgatccaaaaactggaaatgtcaaagttaaattaaattttcactaatataaaattggctttttccatagatttataactttgttttatactgtattctatcagtttctaaaattgttggctatgtgggtttcaaaaa

SEQ ID NO: 133822 - DNA, 578 bp, Cannabis sativa
tcattgttcgattggctatttgttttctttggtatattcgctttagtccctgttttcctgatctgttcacgcagtggttctgaatcatagcctttatctgcacataccacttttgtctcttttaaatctaatgttgatattaaatcaggtgcaactttaacatcatgtgtggttccatcggtaatcatgaaatcaataggattgccatgtgcatcaacaatcaaatgtatttttgaggagtttcctcctacacttttagaaatagattgattcgctatgccggcagaatgttgatgagcacgtacatgagagccatcaataaaaatccactccatatcggggcatgaggctagtaatttgaataatctaagtaacttaccgctgcttgaccaacgattaaaacgtttgaaaatagagttggaatgaccaaaacagcaaggaatatctcgccacggacagcctgttctaattctatagagaatagcttcaataaaattgcgtaaatttgagttgtggtgaatggataaattacgcagaataactttcaacttttgccagtgttgatctgtcagcatggt

SEQ ID NO: 133823 - DNA, 549 bp, Cannabis sativa
ggggtccgtgtcggggtccagagtccaggtccgggtccgggtttggttttgggtcaataatttttaaaaattattttttatttttcaaaattgaaaacatattttaaattataaaacaaaacaaccccaactgtttaaaatgttcatacaaaatattatattttattttctctttttatccctctcattcaataattttttattaatattccaatcataaataactctaaaagttcacaaactaatatcacatattatccacctcataattaagcatattctttaaggcatttatatttgaagtaaattagtgatttttttatataaatttttatgttgtaataaataatatataatattttacttttcatgtaattgatttatatttaaatttttaatatatatacatatatatttttacataatgatgagttggtattctttagccaagattctttacccagtcattagaaatagggaaatttacaaaaatattggaatttgagttaacttttacaaaaatactgtcacacggaaatcttttcaaaa

SEQ ID NO: 133824 - DNA, 766 bp, Cannabis sativa
  modified_base (707)..(708): a, c, t, g, unknown or other
ccccaaccacgtaaaaagtcttcatctcactttcttacagctcatcattatatttatattttaacagttgccgaaaacctcggtcaacaagttagtataaatttgaacttatttttacataactattatatgcatatttttattttgataacaaatattttttaaaatatttggatgtcgttaaaagaaacatttttttttatgattaaattaaaaattatataaattattttaattttaaaaagagattcttagaagtcaaaaagaagtaacattctaacttcttctataaaggtttaaattaaaaattaactttttatttttttattaaacactttttttaaattataaaagctaaaagagagcaaatgaagaagatgagaatggggcaagattgcagatgaagaacatgagaatggggtgagattgctggagctttattgtaagaagtgaaggataggaagaagttgtaaaattgctaattaaagaaatgtatttgtgatttaattttcatttgaccgtattaatgaacaaaaaactagttataaaagtataaataaaaagagcccaaataatttttacttttctaagatagcgtttggtaatatatttttaattaattttgtttttaaaattaaaaaagtgaaaatatttttaaaaaatacttttaaaattaattttttaattgagaatcaattttttttttnnaaaaaaaaaaaaaattactttgaatatttttttaaacattttttttaattaatatttt

SEQ ID NO: 133825 - DNA, 1176 bp, Cannabis sativa
  modified_base (679)..(681): a, c, t, g, unknown or other
agagagagagagagttttttttttagttttgaagaaaggtatttttggaatgaaaaagaattaaaaaaatatttaaaaaaatttataatatgatagtatagttataaagcttgtgtaatttttttagtataacatgttaaattccctactaaaatatacatataaataaattacattttaaatatttaacaatatatatgaaaatttgttgaaaaaaaataaataaataaaattattaaaattaaccaaaataaaatatttaaaattaaccaaaataaaatgttaaaagaatataaataagtaaatataagagtatctctaatgaaagtgtaaataagtagtgaaaagttaaaatatagctcatttaacaaaaagtgtgctctattaatgatgtgcgaaaaagtgatgtaaattttgtgccaaatttagcacaacatttgctatgatataaaatttataccacaataaatacactactttttcatttatattcatgtcatttctattattttattagtgtatttaactattacattaaattttgaaatatttatattattttttttattgtcttacacattatcttacacattaaaataataattaaaataataataataaaattgattataaagttattagattttatttttttttaataaaatattaattagatatnnnattttacatcaaaattttataattgtgtattagagtacaaagctaaaattttggtgtaaatttaccacaaaactattttttgtgccaaatataacacaattatacatcttccatcggagatgaagcaacaaaattactattgcagtacttagggcccgtttggcacaacttttaaaaaagctaaaagctgctttttcaaaaaaactgtgacaaaaaagtgtttggtaagcagcatggccggccatagggtcagcccccgctgcccccacaattttggaggccccgaaaaattaaaattaatattatatataaaaataaaaatataatatatctatatatataaattttggttcaacagttttcataaaaaagcttacagcacaattttggtttcaattgcaattaataaagttgatgatctttcttcaaaaaaaaaataaataaatcaaatatttttaaaaaataactaacaagaatagtataacttaaataaaa

SEQ ID NO: 133826 - DNA, 937 bp, Cannabis sativa
attaaaaacaaataaaataaaactaaaccagatttgaagatgtggcattgtcaccaagttgtaaggcctgcagacttaaaagtaattttagttagtacatattatgggttaatatttgaatttataaaaaaaaaaatagtattctaacctgtgcagtaggtatgtcattgccattgctttggttgttcaatatagccttaagattttcaacttgagattctaaatcatctacttttgactctagagcatctacatacttattttgatttcttttccaagttgatttatctttccattcatctaacgggcagacaccgaatccaaacatgtgcattgatccatgtttttctctgcccatcacttcaaaaaatacatcattcatacttttttctttcgatgcatcttcattccgttcttctttttcttgtaattgtaactatcattaatttaacattgtaaacatatcaattaaaataagattaaactagctagcatgaaataatacataatttaaaaatatttggatgatcataccatagcctcttctgtcttctcatttataacactcttctttctttttgcataacaaattttgaacatagttgcacgtgttggtgtactcgcaccatccgctttctacaaaaaattacttaattagaaaaacaataaaatcatacctaatttgaaacaatattcaactattattgttaaaatacttttcaaagttaacctgtaatgttctaagttgtgcgaaactctttctgccagttgtatgattatattgcttttttgcacgactactcttgtttttagtactcttgctctaaaacattattaaaaggtacaatatagttaataattttttcttgaaaagatagcaaaccagtgcaagttaatttaaatttaaacaaaaaaatacctttgctttttctgtagc

SEQ ID NO: 133827 - DNA, 553 bp, Cannabis sativa
  modified_base (522)..(527): a, c, t, g, unknown or other
ggggggggggggggcaatgtgaccccatcggggtgcagacatgtggaccgggagtactcgatcgggaagcgcgtgagagaggccaaaaccccctatgctcgattggggagcttagaccgaccttggggggattaaatcaaccttgaggggaggggggtaccggatgacacccaaaatcaaacttgggggagagtgccaaacaacccaagatcacacacacccctacaccaaacttggatgggatatcaggtccaaaattcttcctaaggtgcctatctgtcacaaacacctattcctcatttttatgagaatcaaataaaaagaaaaaaaaaaggaaaaaattaacatttaaaatacgtcggtcaaccttgaaaactgatgcaatttgtcacttttaaaattttgcatctgtttgtagccaatgttaatttgcatctgtttgtaaccaatgttaatttgcatctgtttgtcacacaactcatcacttgcctccctcatcaattcctctctctctctctctcnnnnnntctctctctctctctctctcacgctc

SEQ ID NO: 133828 - DNA, 629 bp, Cannabis sativa
aaccctggactcgagaccgaaccctggacccaaaattgaactcgggaccggggactcagacccaggattggggaccggacccaggactggggacccgaacctgggaatcaaaccccagaccttggaccctagatcgggacccaagacggaacctgaacctgttaggctatttttagcctaagttttgagtcactttttagtgttgtttttgttctttgtatctacttttaggacaattttacgcttgtttctctcagttttaggttcccggggtgtttaaagaaatattcatgagagttagactggacaaagtcgagaaaaaaatgaaaaaaaattcaatctatctttagcaaagctcgctacggtgatcatgaataatggttgcagcgaagctttctaggacattatattttcgagtttcaacggtcgccaggactaagcattttgtggtcacgacgaccccttcattacaaatttgtgggtagtttcgtactttcacaattttacgtgggaaacctggttcttttcaaaaggaacatgcgatttttgagtcattcctttagaattggagacctagaaacaaatgagagaacttcaagagcggttggtggcgatccaaatcgatttct

SEQ ID NO: 133829 - DNA, 615 bp, Cannabis sativa
ttaacaaaacagagggtccaatcagtaactttcgcaaaacacagggtccaaaatggtatttaccctataaaaaataaaaaactaatagataaaagtgattaaaacagaaaagaaaagaaaattattattattaggtactagtggtgtctagtattttttataggtgataccttaagattggttagtgatattattgaaaaattattttcttagagaattgttaaaatgcactattagtgcctagcacacttctccgtattatacgactattggtgtaattaagtatcatgtccatataacctaaaaaaaatattttttaaggaatattgttaaccaatcgcggggcgtcacctatagaaggtaattgacattactaatacctaataacaatgcttattttcttaagttatatagtcattgccagacccaaaatttaaagtgagggagagtgtatattttttttgtaaagctgaggcaaaagtaaacttaaaaataaaaaaaaaagttattgttaatggaatttgaacttttgatctctaaaatgtttgtaatttaacttaactattatattaaagttaatattatatttataaatattaatttttttttacaaat

SEQ ID NO: 133830 - DNA, 1160 bp, Cannabis sativa
  modified_base (1129)..(1130): a, c, t, g, unknown or other
gggtttagttgtgattgatacaacgaaaatcgctttgatcctatgttgatatagttaatggacgagattgcacatgcctatggttatgatgacaaagttatgaactcaataaagttaatacatttatatgtatacatatgtgacccagtgggagattgttagaaattattggggtcacaattatatatataaaaatgtgtgttaggtcatcaaataaataagtcaaatttatgtggtctattttggaataaagtttatgacttaagagcatgattgtcatgattttaatatgtggataccaattagacaatttctaatttgatgagtagccaaattggaaatagtaaaaaatgattaatttactgtttatttagttattaataaataggtattaatctccattttttgcatcgcttcagatatcgtatcatcagtcttgaattcccatcattaagaaaactcaagttccagagagaaaattttgatgcgaaaaattggaagatcatatcattcaaaatcgattctatggacgcagtacgcttccgctatttctataatcctattatttgattctcatgaattaattagggttaattcagatttataatattcttaacatataataaatattttatgtcaaaataaaataataatgatagtaagaaataagtgaatgaaatataatatgacaaaattcacaccaataatgaactcaattaaataaaaaaaattgaagctaagagttttttttaagagataggatagcaataacataaacacaaacaaaagacttagatatacacttatctatttttgtatatagtttggtttttattatttagctattcaccaataattattaaaaaagtttaatagaaatttttaaaaataaatgatataatgattaatttacaaatatctaatatcagtaaaatttaaactcgaataatttaattttagagtgcattgttatatgtattatacacaattgaggaaaatagtataaaaacagttaaaccgatgagaaaaattaattttataatagtgtgtatttagaccacctctaatgggagatgtaaaaattgtgctatatttggcacaaaaagtaattttgtggtaaatttacacnnaattttagctttgtgctccaatgcacaatt

SEQ ID NO: 133831 - DNA, 946 bp, Cannabis sativa
aagcataattctattccaaaaagaataacaaagaaggaaaacaactataaaaagtgacccaaaacgtaggctaaaaatagcctaacaagagggctcaggatttctccgggtagaaaccttatgaggggaggactcaatggtgttgtttgttgagtattttaaagcccctttttcccccggcttgtccgtcctctttctccctgcctttagtgctcctcgtctaagaaggagtatctcggagcggcctctaaggagttcctccaacgccatttgcatgtttgcgaccgtctcttccagtcgcaagttcctcagccttagttcattcatttcctcatcgtgtagtcgggtccgtgaacctaaacttaccaagtaggttcacttctcttttcccaatcgttggtggaaggttctcgggtctttcagcctcgacggctgcgggtgccttatcggggatggagctttcgactgtcaagctccgttatactcttccaacgtgagggaggtagtcatcccatagtggggtggttcacttgtcatcctcgagtttcttgttctcctcttatgtcgagggtctttcaccatttgtacctcctccattttgtggtgcttcatcaacatcaccccttccttcggcagttgccactggcgggggatcaactggtgttcatcgagtcgtacttctgcttcctgacggcgacgagaacgtctcagcatcttcttggtaacttgtagtagagaagaaatgttactttagaatgtcgcttcaaacagacggtgctaaaacgttaacgatctgaacttgttaacgatatagataaactttgtcaactaataatattgataaaatttaatggaactttgactttaatgccaagaagaaagaacttcagaatctttaaagtgtttgaaagttatatctcataaattttctttcaatgatacaagt

SEQ ID NO: 133832 - DNA, 1248 bp, Cannabis sativa
ttaaaaacccaaaccgtaaatttgaagaaaaaaaattaaaaaaacagtatataggataattctcctaaaaataaaggagacgatgatagaacatatacataacaaacacaatatttatttattattattttatgaaaatagtttcatcacactaaaaagtgagtacatactagtaattaattaagatatgaaataaaatatgaaattaaaaaaaaaaatatccaaaaaaaaaaacaattacacaattagcaatatgagtatagatatcacttgcataaattattttgctagctatagttcttcaatgagtttctttaactttgttaaagattcttcaacacttttaatcgtatttttaccttctaaaacaattaattcaacacttttaatcgtatttttacattctaaaacaattaattcaactcaacaagtgttgtccatttttggtactttttctcttcttcttcaactttaattttttaaaagaagaaataatttcatcactatgttcttctgaaatattcaaatgataattttgaatctcttcatgacaacttccatcgaaaatatataaacaataatattacggataattttttttttctatgcattgtttttgaattggtttaagaaataaaaaaagaagataataatgaagaacttgctatctaagaagttattttgcgtctaacataaatcaagaaataaatatattaacaacaaaaaaattaataaaattattacgaaatattatttatggatgtccaaattaccatattaattatcaccattaatgtttgattgtattttcctttattgcatattaatttagtttctcattcctttagttaatacttttgtataaataggggttcaccccattggaataaacaactgaaaaattctcattcactttctctttctctcttcattttcttcttcctttcttctcatctattttatattattttataacatgttatcagcacgagtctctgcccaagcttcaagcacgagtctctgctcaagcctcaatagaaaatctatataaattacacatatatccagaagattatgtatcctctaaaaaatattgtatatattctgaagattatgtatcttcaataaaatattgcatatatcctgaagattatgcatcctccgtaaaatcttacatatatcttgaagattatacgtcctcaataaaatcttgcatatatcctaaagattatgcaaacgtaacattca

SEQ ID NO: 133833 - DNA, 979 bp, Cannabis sativa
ttgtggatgggtgaaggtcttttatttcctaagaagggagtgagaattgaagacattggaaagaagtactttaaagatctaatctcaatgtcattttttcaaccatcaaataacaataaggagccaatttttctcatgcatgatcttatacatgatttggcaatatttgtttctggtgagttttgttatatgatgaataatatcaataaatgttctcacaaggttcgtcatttttcgtacttccaaaaatgtgcaaaagttgaggagcctaaggaatttgaggagttatttaaagctaaacgcatgcgcaccataatgtggcaacaagattcaagtgatgatcatgtaaagatgttaaatattgagcacttggacaagtcattcccagacttgagagtattatccatagaggacaagtcagtttcaagctatagagcattcttcgtagagggcaagtcattctcaggcatgagagtactgccactcccaggcaatttgaagtatttaagatatttaaagttagattgccctattgtagagatacctaatacaatatgtgagttgtataatttggagactctattgttagagcagtgtgttaaagttactcgactaccgaatgacataggaaatttgatcaagttgcgacatcttagtgttcattggaatttgttagagatgccattgcagttgggaaagctacaaaatctgcaaacacttaaaagatttgttgtgggaagacatagagattgtggtggcattaagctgttgaaagagtttcaacatctacacgggagtctttctattcagggactagaaaatgtgagtagccttgaggaagtttcagatgctgcagcaccattattaaagagtaagaagtttcttagtcacctatctttgaaatgggatcaagagtttgaacctgaacttgatgacttgcacaaagaaagagagctactcagtgccctccagcctcatc

SEQ ID NO: 133834 - DNA, 933 bp, Cannabis sativa
  modified_base (906)..(906): a, c, t, g, unknown or other
ggaaaggtcaataacctctccagagggtctcttctctgaagacccctctccgcccttagacttcttggccggaggggaggcgttagaacttcttcccatcctcttcctcagagcatcaatcatctgccgagacatgtctgcacagaataataatagcgtggttagcacaagccggtagaaaatacaaagcatgaaattaaagaagctgaaaaagaagtaaagaagtaaaacgcagagtgactctccgcccagaaagtcagaagtccatcatcacctaatatctcagacagaacacgcttcccttttccagcatagtgatgagagggccgaacaggtgaaattgtgaatacttcaatgagagatattctgtggtcccatgccgttagaggttgttaaaattgtgaatccccaaatattttgctttgtatttgtgttgatgatattattctcttttgtgtgtttttattataacacgtgtaagacccttagaggtgttttttatttattgattgtatcaaccctttctataaatgataatcttcctccacagtctcctttgagctgtgatttcattactctgcatttttcttaaagtttcactaattggtcatgtgtgacaagttttgatttactctcctgccaaaacatgggatatggaaaatcaactttgtgtccacacaaaaatataaagctttgaactttactagttcatttatgcatatggttttatcaatttatgatctctgtatcccaatttacttttggtccattattgttgacttcgcttttagccaacgacaataagtctttttgataagcgataaacgatatgtcgtaataagaatatataataaagcaataaaaagatacagaaattttgtagaagttcagccccgagcagttcgntaatagcctaatcctcgttagttgtat

SEQ ID NO: 133835 - DNA, 2171 bp, Cannabis sativa
  modified_base (1088)..(1088): a, c, t, g, unknown or other
  modified_base (1389)..(1391): a, c, t, g, unknown or other
acatgtatcctgcctaacctttgaacttgtttgcctgcaggcgcatttaggctgacttgctagctcactgtgtcagcaagtgccgcacgttccacctacttgggagtgtccaaataggcggcccgtgacagttggtattagagccaatagaaagggaagcttggtaaaacgacataatggtgagcaatacccaaagaatttaagagcttgagaagcacatagaggaactagatggcatggacaagagggtcagggatctaacctctagccatcagaactcagggccaacaatgacacaacaacaagttatcacgttggcttaagactatgctaacttgttggctagggtagctgcgatcgagaggagtgacgctgctaccggaacatcaattgtgcctcagatggaagattgcatcagggcattaaaacaagcaacaatagacatgtaggctgctatcactgtgctacaaaatgtgcaggctgcattacaagactccctcaatgatacgatagaggattgtcatgtgtctgtcacagccattcgggaagagttagcaggaatgtcaactaagctaaatcttaccatgatagcagcagagcgtgcaaataccaggggcacagaggtatggagtatggccgaccgagagcacctgagcccaaatgctatggaggggcgagggatgcgaaggagctccaaaaatttttgtttgacatggagcaaaactttagggtcgtgcggactgactctgaagaagcaaaggtagcaacaactaccatgtatttgtccggggacgccaaattgtggtagaggatgaagtatgaagacattcagagtggtaagtgcaccattgagacttgggaagacctcaagaaagaattgaatgcccaattcctgccagagaatgtcgcctacttggcttgacgctagctgagagagttaaagcaagttgggacagtccgagactatgtaaagaagttctccggattgatgctcaacattaaggacatgaacgaagtcgacaaacttttctactttctcgaaggactcaagcgttgggctaaacaagagctgcaaaggcagcgggtgncagatctcgccactgctcaagctgcagccgagcggctcactgattaaacctttgagaattcgcagctgaagaagacaaatcttcggatagcaccaacaatgctgcgagtaagaagtcaagaaagtaatggccgagtaaaagtgggggaggggaaagaagactcctgaatctagcccctcctttaaaagtgatgctgcaatggggaagaagccccttaagtgttggctttgttaaggcccacatagggcggcttcttgcccccaccagtccaagttgagtgctataaaggcatccattgctnnngagaagcaaggatgtggggaagataatgaagatgaagactgcgcacacatgagcaccgttcgattgatggctgctcttagaagcatggcatgggaggaaagaaagcccttggaaatggatcgatgtttgtggaggccactttaaatggtaagcaggataagagcgtgttgattgacattggcgcaacacacaacttcattttcaaaatcgaagccaagagggtgtgcctaaaattggagaaagatgcgggctgcatgaaagcagtcaattcaaaggccatggacacaattggagtggccaggaaagtgaatgtcaagatcaacagatgggaggggtaacttgaccttgtagccgttcgcatggatgactttgacgtggtattgggaatggagtttctagcagagaagggggccattccaattccagcaacagggaatctactgatcatgagtgagaatccttcaatggttcccgctaaagtgagacaacccccagaagtcaagctactatgagccctgcaactaaagaggggcctgaagaagaagaagaggccaacatttgtcattcctcccgccgtgtacgatgcaaaagtggaggagtccactccacctgtaattgagcaggtgttagatgaattcaaagatgtgatgccggaagaactcccaaaagactgcctcctaagaggggatttaatcaccaaatagagcttatgcggggtgcaaagtgttgggttttatgccctaaataaaactctttacattctgattagttatcaatata

SEQ ID NO: 133836 - DNA, 671 bp, Cannabis sativa
tgtcctgctttggtttctctacacaatgaaactttattttgcaactcaaatttgccgtatgattatgcacgatatatatgccgtgatatattagttatattataattatttgtattataaaattaatatttaatttattgtgtgtaaataaaaatataccctatctatttcggtattcgagagacttttttagtctagttttttttcatagttgtatatattataattatttagaatattctgcaaaattttgaaaaatttgaaaaaaattaacacgatgaaaataagattcaaactatttgttgtatgtgtaattcttttatttggaagggtacattgtagaaatactttttaatttattgtgcgtaaatttaaataagaataccataaattattattatattattgcaatatgatattttaatttattgagttttatagattttacaatattattatttttaaattaattagtaattttatttaaattattatttagatattacagttgtgttgattttagtaaattaatataatattaaaataaattattttattaaaaatttaatataataataaagaatatttttttggggaattaccttatataatgtttttttaacttttttttttttttaaatttacattttgggtttctaaagtgatttttc

SEQ ID NO: 133837 - DNA, 743 bp, Cannabis sativa
gatcttgggaactgataggggtggagaaatatttgattatgcagtttaaagatcattaagttgaactttgaattgtatctaaacttacctcctaaaaacttcgaagttacatattgatgaaaatgtaaggtctatgattagttacgagcacctacctaagtccttctaaggaaatgccttagagatagcaaatgacattatatgtcatcccatctaagtctgatcccaagaaaacctcaattaattgcaatggtcatacacttagtgtacagcattactagattttagggatgccctgatcatgaatttaagaaaagttagaactattaactatggttcgcatgtttgatagctattctaaagtgattgggggtggaccatcctatgatcattaagataaaaaaaatgtgtttttgtcaacaaaaacaaagtagcaaagcagaggagatattttttggttcaactccaaagtgttctgtcatcttattctatataagatggtcccactgcctctgctgtattgacacacttgatgaggtcaataccactaatgttcctagatagaaagtcacagtacaatgttatagtgggagagattcaaggaactcgccctgttatgacttagaagacaattgtgataaatattcattgttagtttaaacaagcaatggatagtcaaaataaggaactaagaaataaagccaaaagaactatggttgaaaccattcacatggagcaaccaa

SEQ ID NO: 133838 - DNA, 1575 bp, Cannabis sativa
aacttttcaagctaagattaggatgtaaataactaaaacaccattcataccaaatgaggtacctgctttggagagaacccagttgttatcgtttcctacatgaaacacaaaatagcccataagattcatcttctttgcataggaaactttagccttgatagcctcaacatcatcaaagctaataaagttttcccttagtttgcagaagtttaccgcataagtatcattgtaaaaagactttacaccatacccattacttcctatgtaccactttaagaaattatagaacatagacccgtctaaggtgattcctggacctgttgatggagccccaattgaataatcatttgggtttgcaagggtccaagcgtagccaatataaggcaatcccaagaccagtttacttgctggaaatcctctgttcaaccactcgtgaattccactattggtgttaatcacttggttgaatggatcatacaaagcagcatgagggttagagaactttgatgttgttggcatatagtagtcgtacgatttaacatgaacccaatccaagttcttcttcatcgcgtcaatcgggtaactcactgagttcaaactcggcatgatatgactcaccatcaccaagagcaacttcgactggttcttttttcttgactcagaatctatggcagctcgccactctcccaaaagggttctcaaaattgtcatctccaagctcgagcttggtggcacactataaaggtctatcccatcaaacccattaagcctagctgttcttattgaagattcgataaaggattttctagaagaagacttggttagcgctgagagaaagtttgaatcttgattttcaccaacccagatggacataatggtatttacagatggggttttaagcttgacaagattggtgaatgtagagaacttttctgagctagaggcattaatatagagctggtacgaggaaacatttacagaaacaaaaccaaagattaagtgagtgaaaagagcagagttgatatctgaaacagggagctctgtttgtgaatcgtaataaccgattttcaaccaagattttgaggtcgaacactgattaaaaaacaacagaaagaaaaggagactagcaagtttgaaagccatattggagaatgatgaagcaatcatgaactatggtaagatcttctggtatattataataatgtatctattgacattaaccaacgttttcaactcttaaacgtgtgaaaagagttttagtttcaagttcgggagccaaattgtctgtcagatgcatgtgtgccaattcctgtctcagccaattatatatgaacaactcatttaaaatggcacatatgcatttgacaaatctttcattaattcagctacttttactttttgttttattatatgatatttcttttgaatactaattcaggtcaaattttttcatcaatattaactcatatatatgaatatttggaatcaaattgcatgatatataattatatataggctaattagtaattttttctcccgaactttgacatgtactaaatcgtgccctctgaactt

SEQ ID NO: 133839 - DNA, 672 bp, Cannabis sativa
aaaaaaaaaaaaaaaaatttataagataattctcctttttgttttgttaaatgaaatgagtgggcacatgcagcatgctgaccgcttaaagcaaaaatattcaatgggtctgtatacaacaacaatcttatgtatgggctacctatttcattggaccgttgacatattcaacggatggctactcaaggtctaagatgatgcaatcaccttcctaattcaagaaaatataatcaataataaataaataccatacaataaaataaaatctatatatgtcaaacaatgcttaaacacgtaacaccatatcctcgtggaaaatttgtgttaaatttagttaaaacagtgttaaaaaaaattaacaaaagtattaaattataattgaaagtgtacaaaaatcttattaaacatataaataaaatctaaaatattttttttgggatgaaaaatctaaaatatttattaattacatgtatgtcaaaaaaaaataaataaaaagtaatatttattatagtataaaatttaactgtgttaaatttaccataatttttaatatatgttaaatttaaataatattatacactatcattgaacataaattagataaattagaaaaatacatatacactatctatctttatagcattatattaaaaaaattaaaaaaataaaata

SEQ ID NO: 133840 - DNA, 639 bp, Cannabis sativa
taatcacgtgtttttaatcgtttttgtttttgtttgtttgttgaaatctaggctgatgtgtgccacgcctatcaattgcttataaaaggtgggttgaaagaggagaacatagttgtgttcatgtatgatgatattgccaagagtgaactcaatccaaggcctggggtcatcattaaccatccacaaggtgatgatgtctatgctggagtcccaaaggtacaatctttttatttaattaattaaatttttaagattagtttaacaaagtggtgaaggtatattccttactgtttaatacataaagtatgtataatcattcatattaatgtgaaaatgagagtaatcagaactattatgataatggctgtcatgttgtgtgagaatgtttggctaatattaatataaacaaatattgcataggagggacaagtgggatgttggggggtcctacacactatttattttattttaattaataaatggttcatgaaaatcatccatagggaatcggtttaggcaagttcttaatatatattatgatttaattaattttagtgagcacgactagactgagtttgatgatattgataatgtgattgtggcaggattatactggtcaccaagtgaccacagagaatc

SEQ ID NO: 133841 - DNA, 884 bp, Cannabis sativa
  modified_base (821)..(822): a, c, t, g, unknown or other
gtatcaactcctctggatttaagattccatagaaaagtaacccagtcccacattcggactcctgaatccagtacagccataaccccaaggagaagatcgtcaaaggtggaaggcaaagttgcaatacaagaacaagtgctttgtggtctctttagccaccccacaaatagggcaagaaaccttctcaaaacccattctcttagcaagaggggctcttaatgggctcgtgatagtttatatatgcagcaaaagtatctaataatagtacttaaatctttaatacgaaactgtttttaattctaagtaatgagataactctatttaagttataatcttaatttttatataacggtttttatttgaattttagcaaatatcttactaattttagaaaaatagtaaataatttattgcatcaaaaatacagttcaaataatatatatttcacatgaaaaatagtgttaggctatttttttttcattacattaaattatttagaattttttcttaaaaaatataattctttatataattaagaagttaacttgtgaaaaatagaagattttcctacacaaaatttctcaaaatttaacataaggaatttaaaagaaattaacaaaaaaaaattggtttaaaaatgatactagcaatgattatagaaaaatttacataatagactaaaatttaaaaaaaaattacaaaaatacatcaacaaggaaaaaattaattatatatttacgctttgaattttttatttacaaaaatattttttcagtaaaaacaataaattgttttgttggttgttttatagtttatttatnnttgtattataattgtcataaggttatttttctagttggtttataatttatttatagttgtcg

SEQ ID NO: 133842 - DNA, 872 bp, Cannabis sativa
agaaattaactttcgatcaagggatgctaccgacctgataaagcgttttaaccaacaaactggcgaaaggtgttggagaaccctccgctcagaagagatcctactcaggggaaagatccttacattccccctagagggcaacagtacggttcagaggagcgtccgaccaactacatacaagctaatgtgagtcttttaaatttaaggctttctaaggaagaggtaaatgataagtaaaagatatagttatatctttttccttctcctttttaggccaattttgaaatccctatacaactaggaataggaatacaaacttaaaaggtaacaacaattcctaatgctactgggactaaggaaaaattagagaattaaaggaaaaagttaaatgataagcaaaagaccgaaaatgtcttctcttcttcctttctctctctaatttcgaatgacatcttcaaataggattaggattccaatccaattaattctaatgtcataacaaaaaataagaaaatttgaaattttcaaagaaagagataaaaagataagtgaaaaagataagattttttctctttttctttgtcaattaatttttgaaattcccagggactaagaaaaagtgttcaaagtcctaatccaattgggaatgcttgaagaatagatacaagtgcctaagaatgtcaaaattgatgcccatctggtagtttcaagcgaaatgggcttggttcacgtcatcgagttaactcaacacaagtgtaaagtttacttatgggaaaatgttaacctgtaaacttttcctggtgatgtggacatcaatgtttgacatttggcatgaaggatgaaatcacgaagttgagtagacccgagtcata

SEQ ID NO: 133843 - DNA, 576 bp, Cannabis sativa
  modified_base (36)..(41): a, c, t, g, unknown or other
cgctcttccgatctatacttgtgagtagatctaagnnnnnngtaaaataatttccaacaaaaatggtcaaaagttataatcccgctcaaactcggtattctatttatctcaaatatttatcctactaagaaatagattttagacatacccacgcgcggaatggggcttcaaccgaggaaacaggctgcaatgcagcctacttgaccgatgtttctcagtcaaatgctgcttcgatcgagcatcactcgaatccgcacgcatgtggttgaaaaccctagccaagatattttcaaactttaaaaaatagtaacaaattcaattaaatccaaattgaattatgtcaaagcctaaattgattaaccttttcccaactttccaaaaaaatacttccagaacaaaaataaaatctttcttagaaaatttgtaattaatattcaatcatcagtaaagcagataaaccaacatgaacacatcccaatcatccaaattatcgttttaaatccatatttcatgaaagtaaatcattaccatgactctaaggccagttgttggaagttattttaccaggatctagat

SEQ ID NO: 133844 - DNA, 728 bp, Cannabis sativa
ccttataccctaaaccctaaactataaaccccaaaactctaaatactaaacccttaaaccctataccataaacccaaaaaaacctaaacccaaaaacataaaccctaaaccctataccctaaatcctaaaccctaaagcctaaatcccaaaccctaaatcctaaaccctaaactgtaaaccctaaacccaaaacctataccctaacactaaaccccatacggtaaaccatagatcctaagcactcaaccgtaaaccctacacactaaatcataaaccctaaaccttaaacactcaaccctaaaccctaaaccttgaatgcaaaaccataaaccctaaaccctatatccaaaacccaaaaccctaaccataaaccctagaccataaatgcaaaaccctaaaccctaagtcccaaaccttaaaccctaaaccataaatcctaaatcctataccctaaatctaaatctaaaaacccttaatcctaaacccaaaacaataaaccctaacccctacacagtaaaaactaaacccctaaaccgtatacgctaaagtgtaaacaataaaccactaaaccctaaacccttaaccctaaaccgctaaaccctataccctaaacccaaaaaatcttgaagcctaaacccaaaaccataaactctaaacccctcacgctaaaccgtaaatattaaaccaccaaaactattaaccctaaaaaatcctaaaccataaaccc

SEQ ID NO: 133845 - DNA, 744 bp, Cannabis sativa
aaactgattaaaaaagtgttgtcaaacaccacctaaattttgcaaaattttagagtttcagtttaaaaaaaaaaattcgaaaaaatcataaagctatgctcggatttgtttgagatgcgtagattaatgtcttagtcgaatatatttgtgggtttaagctttaaatcatcaaaaaaaaaaatatatatattttgggtattttcttattatagttttaagaaatgttaattacaacttcttattacaatcgtttagtcaaattccacgcacgaaatcacatacccgatattttttttaaatttttttaaagcggtattcgtgatagttacagtatcatccttgtaaattattgaaattttttgaatagtttacaatgccgaatatagagttcttgatattttagtttaccacgtgcgttcaaaaaacttcaaacctatttttatcattgtgaactattcaaagttctcaaaaatttatatggttaatgttgtaagtataacgaatactgtcatgaaaaaaaaaaaaaatttgatatgtgttttcgggcacaaaaattgactaaaaaattgtaataagagattgatagtaatacttttctaattttaataaagatgaagaagagtgagagaaactataagataggaagaaaaagagagaaaaagaggtctttcttcttaaaaaaataatttgggtcttttatttaaaaaagtaattatattttggggcttttttatttttaaactt

SEQ ID NO: 133846 - DNA, 1019 bp, Cannabis sativa
  modified_base (978)..(980): a, c, t, g, unknown or other
ttttttttttttttttaattgttaatggttttttttttttttttgtaagaaggattcaaattgatttgcaatctcaacaaatcgtaaatttataagtttcgtacatgcatttgtgtttcatgcattttttaagtaatatctctctgtaactcgggggttgatttggcgtgttagtatttcaaaattgattctgttattttttttttttcagttatgtgttttttcatttgcggtagaagatgactacgtgtcatggtatttggaataaattttattatttaaggtaatttttgttaatttaatatatttttagtatattattaaaaaaatttcaacgatgaatgttatacggtactaacattctattataatttttcggttaattattgtgtctgaaaatatatgtcggaatattttttttttttatggatgtgttcgttatagtaacaatattatctctgtaaatttttaaaattttttaatagtttatagtgctaaaaataaatttgaatttttttaaatatgcgggataaactggaatgtcataaactctgtgttcaacattgtaaattattttgattttttttaaaaaaatttataaaaataatattataactataacgaatatcattataaaaaatttaaaaaaagcattttcaaatgtgatttcagatatagaaattgtacatactgtagagatgatgacatatgttatcttgttttagtattgtaattcgtggctgtagagatttgcgtaaggagttgaaaaatgtctcgttatgttttgtaacacggtcagcaaatatggtagctcatagtcttgttagagcttccatttgttacctgatcgtatgttcagtttggagaatgtcctaactgctgtgctaccttatttggtagctgattttgaaggttaataaagttgatttcccttttaaaaaaaataagggtaaataccattttagaccttgtgttttnnnaaagttaccgattggaccctgtgttttgttaaatgacaa

SEQ ID NO: 133847 - DNA, 724 bp, Cannabis sativa
ttttttttttttttacattttacttcacatacctttttctcaaaaaaaaaaatctaactgagccgacgtcagggtacaaatataggggttgaggccagagtcgggatccaaggtgtcgtcgtttgttttagagaggatagaaaacaatttaaagccattttagagacttttcatatattaagatttccatttctttaagaaagaaaatccactttctatccaaagaatgaaagaatgaacactgagaatttctcaacctggttccggaaaaaaaaaacgattgactagaaaagagagaatgaagaaaaagagggattattgacgcacctactctaagtacaccctacggttgtattaccacaagatagaaaattaacagctatatatataaactcacctcaaattgatatttgagttaaaaaagttatgtcagaatcaaaacttatgaaatttcatcactcaccaatgtcaccatcaccaaattattatgctttcagttttatggcacatgctaaagcttttctttttgcctaaattaaattctcatgatatcatcgttaagtatcgcaaaaatattattagaacatcactggaacatcgtttaaaagatcagccaattttcagaattttaaatatgaaattatattgggaaatttgaatttctatgcttacattaaggaataattttttccctaaacttaaaatggggaatattggtaaaatg

SEQ ID NO: 133848 - DNA, 525 bp, Cannabis sativa
gcggtggtggtggctgtggcgggaaggtcgtttgcgggggcggcgatgaaggaaaacggtcttctggtgcggtcggagctgaggatgatgaaccatctccttgcacagctgggtggcggagatcactaccgagggtgggcaattcagatgtcatcttaccggcggccataagcttagtccattgagccaacatcacctcaggaagtcgttggacctctgctcttgtctccgatgactctttttccagttgagatctaacttccgctaactccctctgcatctcgatccgtaaggcttccattctctcatccatctgctcagtggtagcatctttcttaggtcccatggagtgtgctctgataccaatttttttaaagattaaaaaaaaacgtggttagaataaaattttcctctggtttttgcccttgcagctgggaggctggtgctatggctaaaacaaggtccaagaatcgtggaaaatcaaaatctgctactaaaatctcacgaaagaaagctggaaatggc

SEQ ID NO: 133849 - DNA, 1356 bp, Cannabis sativa
atacggtctttttatgttgaaattttgttcatttattgttaattttttgttatatgtatgttattttttgttgttatttccatgttacttttatgctgtttttttgttgattttttgttgttttcgtgttattttttggaaaatcgtaaaaatgtaaaaaaaaatattctttgaatgtaaaataaatattttacaattttacaaaaatacaaaaaatagtaccttatgtaattattcctaaaacaaaagggtactctccaacttctccctaaagcccacttgtcaaagcccattaaacttcacctaatttgtttaattatttttcatttttacaaaaatacccttttttttttgttatttcaacatttttactattatacttttatatatatatttatgttaagttttcaaaaaaattatcttaaagttttaaaattacaaaatattgtattttaataaaacaaaaaaaaaactaaataacctaaaaaaaaactataaaacatcgaaaagacacctataaaacaatacaaaaataacaagacattaacctcgttacaatatacaatacaatataaactcctcagcttgtttttgtattacgaaattatttttttacttagttttgacaacttgattatttttttgtattattacactatttgttttttttcatgaaatttatttgttacaacttcattcttttaactctttttttttcttcctttttgagttagtgtcaactaaaataataatttattttttaaaaaattaaataaatggttacattaataataaaaataataaaatcttataatttcaaaattagatgtataatataatggcactactacaaaaatgagtttcagtgacacttgttgagtgactctaaaatattttagtaacacttcactgtgcgtcactaatgtgggtgactggaaaaatagtatatagtgacactttggtggtgtcaataaaatattttaaaatctctaattgagcgttactatagcctcattgagtgtcactatatcataataatagcagcccataatgagtgttactatatcatgttattttttttaaaaaaaaaaaaaatcatcaaaatttagaaggaatatctgattttatggtttttttccaaaatttgttttttatttattacctaatgttattattgtcaattagtgtatgaaattttttaaatttaatttaattttattttttaattaaaaagacaataaacttaaaactaaaaaaaaatatataaaaaaaatatttttccatataataattttatacaatgtactgtatgtacaattcaacaagctatttctagccaaaaaaaaaaaaaaaaca

SEQ ID NO: 133850 - DNA, 503 bp, Cannabis sativa
tttacattgttagatttagggtcattttgtatcttggccctttttttattggggtgacaattcaagtcatgacccgacaacacaataccaactcgagatgaatcattgcgagttagggacctagaaaatagacgcgggtcgaaaataggtctaacatgaatgacatgattattattatttgggttggattagggtttacgcacgtgtcacgtgacatgaaatcgacacaattaacccatttatatccaatatattattaaaattattaatttatagttaaattcttttttattttcataaaaaaaaaacagaaaaaaaaaattatacttgataataatatttttgtcattctattatttatttgaaacttgatatatatacatatagaggaagactatgataggacatagcataagttccctatcggtagggaaacttttttgattattgattttagatcatgtggttattaagatataaggtgtatactcttacgatagaac

SEQ ID NO: 133851 - DNA, 701 bp, Cannabis sativa
gaactccacaaagaatacagtgtacactaatatattgcatctggtatttacttttaattgtcaaaaattataaattatagcatttagatcactacaagaaaacctacttttaccggcacaaaaattcgctggcaaaagtacaataaaggcgccggcaaagctttgtcgatgcaatagtactacgctgctaaaacatgtctgggaatcttggtcggtaaaggactttttactggcgcgtagatgaaatgcgctggtaaactgtagttttaccggtgagaaacggcgccagcaaaggtcaatcgccggtgttaaaggatacccttatccgctataaaccttctttgataagcttttgcaagcgcaatatagagccgataaaaatgttcgattgacgccaaaagttttgccagtgcaatagatgcaccggaaaaactattcgagattggtgcgaacctttttgttgctaggcaaaactattttataaaaaaaattaattaattataactttttcgttgctaccttttgccggcacagtaatgcgccggcaaaactattttattttagaaaattaattaattataactaattaattataattaattatattataaacccaaaagtaattatattaaattttatattaacaaaaaaatcaacataatttacattaaaagataaacaaacattaattatattatgtt

SEQ ID NO: 133852 - DNA, 950 bp, Cannabis sativa
aagttgattttttatttaaaccaactataatttgtaatttttcattattataatacggaataaatgattatacaaaatacatattttaaaataatgggtccacggagatgcaccttgttaatataggtagttccaatcaatccatttaagtcctcttcaactatgcagtcccatacctacacagtctcagaatcatcacatacaacccttcaccaggcaatgtgggattgtatagttcccagtctttcacttttagaagccctgactatgatagtttgactcatgccccctttgatctcattttccccatagtagtgaatagattaatacatatgattgttgccttcaattcacctagaattccgaatcatactcataaattgtcccaaccttacgaacacaagatcaattttaaataaaaagattatcttctccaaatcaattagatggatgcctccattggctactcatgtcctatattccatttaggaatgcaagcaaatttaactcatattgtcgtttctctaatttatctaccctgtaagatgagctaccactaaataacatacatgcacagtccattcagattttttatgtctctaattgaacgtacaatgtttaacatcaatatcaatcgaaatagcaaatagcaaatataatattgtcaataaaattctcacctcagtcggttgaaggaccgatacctgagtccttttgattcataatcgacacttgggaaggaaccatacactcatctcttttaacatcagtctttctttattgggggtaggctctattcagatgacccactactcttttcaccacattcagtggcacaacaagaagtgttagtggtataagaataaacacaagatgagcctattgttctcatagatctctcatctgttgcccttgttgtcttatcctatcctgttggaaatttattttac

SEQ ID NO: 133853 - DNA, 637 bp, Cannabis sativa
  modified_base (41)..(44): a, c, t, g, unknown or other
atatttagggtgttaatcaacatgcttgtgagtagatctannnncctggtaaaataatttctaacaacgttcttaccaaggtccatcaagcttgaccagaatttctttgtctcatgaaagtaaggaggcccataaacaccagacaacaaccaggggtaatgatcagggtcagaatacaccaaacgcgtaatctgatttttggaaatgaaaatattcgcaaaactaaaaccctccttctaagctaagataagacccccacaccccccacaacaggaacaacaatattatgataaaagtgtaaattattaagggagcgtaccaaagaagaggcatccactttttattcggttatgaaaataaagtcaggagtgcacggccaaatcaaagctttcaattcaagaactgtagagatttgctgtcacgacctgagccctaggccgtggcagatatgtaatatccataacttgggtggccaaaggtcacactttgacccttgtaggaagataaagcttataaatgatccttcaatttatattacaaaatactaatttaaaagtaattaattaacttctacattaataagaaaatattagtaacaaaatcaggacaactcatcaatataaaagaacaataatat

SEQ ID NO: 133854 - DNA, 636 bp, Cannabis sativa
gcattttaacgactaacgactttaaaagtactttaaaagttcattcagggagcataattagggagcataatttagtacatgtcaaagttcagggggtaaaaattctaattagccttaaaaaaaaactaccaatgggtctatcacctatcaacctttttcagtttggtcagaattttttagtgttcaatatatcccaaaatattaaactattgataaataatgggcaggtaacattccgcgtccgtactgagaaggttggaattggttgtatcatacacgcatatacatatatacttgttaaaaaaaaatataaatacatattcatattcatatatacacacactcacacacatataaacaacaacaataaaaaaaattatattttacaattttcacaacattaaataattttcttaaaagaaaaataaaattattaacttaaatttatacatatatacacaaaatatataataacataaacacatatatataaatacatacactatataaatatacacatactaacatacacagacatctattctatataaagtgtggctatgtaactaaattcttagtttaacgatactttttgaatttctacgttaactttagaatatcctattaattaataga

SEQ ID NO: 133855 - DNA, 1417 bp, Cannabis sativa
  modified_base (1342)..(1343): a, c, t, g, unknown or other
tggcggagataagagacttgtcaagtgatgatggactttcgggtcttgctcagacaatcttctcgcaggctattctgtcatgtttttaaacttcctgattatcgtgctttatgcttctaatgcctttttcctctaaccatgttctttttgttccatgcagacatgtctcagaagatgctccatgctctgaagaagagagttggaggaagctcaagctcatctcccccgaccaagaaatctaggggcggtgagacgaccccttcaaaggaaaaggcaccggtcagggaggttattgacctttctgaggagctagctgttgcagacccttctactccgaaagttgccaagtccaaagattctttgcgaggcagctcggacaggcctgagcagtcgaagggcggatccgagctggctaagagcgggtttgagtagatgcgggctcctacacaacctttgccagtgcatccataggccaagaaaggcaaggagatgctcgcctattacatgaaccggtgggttcctgaagtgagtgagcagttggccggtgctgacaacgaatcttctctggagttgttgatgggaggagtcttgagggaatttataagggtaagtctttcttgacagtttcttttaatcctttttatttacctcagactctaaagtttttctttgtgtaggctggtctgaagttggcttacacctattcgtcagctaaatttgctacctccaaaaatgctgctatgtccaacaccatgagggcagaggtggacttggctaggaaggatgccgatgacgccagggtggaacttggagctgttcggatggagctgggtgaggtcaacaacaagctttttacaactaagaagtaaatagtcgagttgactaaggacctcgaggcttctgactagctcgaagttaccatcggcatcctatcgacagaattgaatagccttcaagaggaaatgggagttcttcggatcatctttcgtcagctcgaagcagagaagaagactaaggaggaggagcttagtgctgaggtcgagaagcataaatcagaggtggcgaagctggaagagaaagtacatcccttagagatagtgggtctcaaaattttttatgactttcggaaagctaacgcttaggcaaatttcgattaccttggcaaggccaaagacatgtatctcgagtactatgcttctcgagtggcttatggtgaacctgaggcaactactttcacttctggccagaatgctgatgtaccttccgctcaaacaacagatcctccagcccctaccagcccaaaaaacctgaacaaagaacctgggactccagctgtttaaanncttctctttttatctttcttttttatatatcttattcggccataaggcctttttttaacacatcatgaccggcc

SEQ ID NO: 133856 - DNA, 742 bp, Cannabis sativa
  modified_base (72)..(73): a, c, t, g, unknown or other
aatactgtatagtaaacgtgccacaaatgtagtgtttctatcccatgtgggactcctactcacacacttcanntttctatttttacataatttcatacaaagttgcaacataggttctcatagaaaaattgtggatatatatgagagatagtcgagcattcttgttcatatatattatatgtaatgagtgcatgattaaatataaaatttaatgaacaattaataatttattaataattaattagttgattataaaatctgtgcaatattagaaaaatatataagacttattattagaaaataagtaaatataatataatttctcaattatgaacattttattagattatatatgtattacatatgcattatttgtgaattatcacttttgtgtttggaaactcgacaaattagtcaaagatatcacatttgtataatttattattttagaggtatcataaattttcgtgggcatttaaaaattatgagactatgttgggttattagaaaatttagcccttaccctaaatttatgtagcttttgatgtggaggggtactttggtaatttcatatgtttattaagaatagactttaattgaaatctagaatttatgtttttttttttttttttaagaaagtaatcaagactttattaaacttcaaactctactaccaaacaaggtagcaaatcagttgggacatcccccatactgaaattacattcaggatataaactagaag

SEQ ID NO: 133857 - DNA, 1599 bp, Cannabis sativa
gcttgatctgtggattgttgctgtcattttgctattttttgtgttaaaatgtttgctgcctgtgaaaactggatttttcctgttttctacaattttttttcgtctgcctagatggggtccgatattggcccgatgggggcccgatgtatagtgaaaaagagctgacaggggtaaaagcccgatggggtttgatgtatacccgataggggtccgatggtaccccctaaaatattattttttggtttttgtggccgagtccgatggggtccgatggagacccaataggggtctgatggcacccttaaaaatgttattttttttggtttttgtggccgagtctgatggggtccgatggagacccgatagggtccgatggcaccccataaaatgtctttttttgggtattttgggcctagttcgatgggggtccgacttgggtccgattgggcccaaaaatttggttttttggttttttttttgggatcagacctgattttgttttcatatatattgcattttaagttttttttttcggtgagattttttttctaaattataattgtattttttaaatgtatgtgactggttcaactgttaatgcgtgtgttatgtataatggtgtctgggagcttgatggtagagattgggtttataaacggggcaaaaatttgacatttgacattgatccgaacctaagctactcaggtttggttgatgttttgtatgaagaactggatgttgacaaagtggagtatgacttgaaattggaagtaaatttcaagtacaagaaaggctacgagtatcgccctgaagttattggaaatgataagcgtgcaaggtactttttatctacacttgcgaagaagccaaatgaatatattcctttgtgtatgactttgttaaagaaaaatgcttgcatcgatcctagtcccacaccaagttctgttaaggacaatcgtagcgaggttgggagttttgttccagaaacaaatccagaggtgttggttgtcgatgtatcacctgaattaaacactatgatgccgagtgctgatattgtagcacaaatgcccttcattgatggtttttttgatggtccagaccgtgaatgttatgttgagggcaatgatggcgtaagagacaaccaaggtacagaggctcctcctgctgtagctttgaacttgactccactatcgtaccaaataccaccaaggccaccaacacggaaaagagtgccccgtagagaaaattgcacaacacatggtactagtagtagtcgtccaagcgaaaccagtaatgctagaggaaccactgacagtacatgtcctaataatggtagagagaccaatgatattagtggtcctactgatgctcgagggaccaatgtgaccgaatttagcgatccattttcttcttcgacaagttacggtaaattcaaggagaaaatgtatacaagaaaagacatcgaggatcatagtcattatatatctacaggtggcgcagcagacggggagttacatgtaggaaagttttttagagataaagagcatttaaagatggttgttggtttgtatgcaatgaagaaagggtttgactactacg

SEQ ID NO: 133858 - DNA, 792 bp, Cannabis sativa
aaactttatattggttgttgcgaaaataatataactcattccgttaagtactataacccttgttactttctgctgcagagtaataacaagtttctactataaaaaatggtttttgtatcggtcaacatatctggtcaaactggttgaccgacacaaaagtcccattttttagtagtgattcatttgcaatcttcctcccgaagagtgactcacttacaatcttcatcccgaagagtgactaacttgcaatcttcttcctgaatagtgactaacttgcaatcttcctctcgaagagtgacccacatgcagtttttcctcccgaaaaggtgactcacgaacaagacttctcccgaagcttgattaacaatatccaaggtgttcaacctgcacaattttaccaagaaataatacagagtaacacaataataaaatacaaaaaacttgttggactcaagttcttcacacaacaaagaaaagactctctaactttgaaaagtaatttacaattgatgcaccaagagagctaaccaaaaccaacgacctaaggatgaatatacatagatatatatatagtttagaaactctctaagtcgtggacaaacagccaagagacgatcaggtcattaaatgaaattcttcctaaaaagaaaagtcaagatttgtttaaacagacagtcagtccattctaacagatacagtgaacctggatagttttttagcaaaatttccataaacaaataaggcaactttgacaacgttaatacccatagctgtacacggtttcttagtcaa

SEQ ID NO: 133859 - DNA, 1229 bp, Cannabis sativa
taaataactataacatacacgactataaaaaaaattaaactaaatttttttatagataccgaaatagttttggattgtatcaatatacctatgttaatatagtgtattgtagaagcacccataaacatatatgtcaaaattgaaaaacaaaacatgatcaaaagaaactgaaaaataagatttgttccgccttaagtaacatgtcgcttgtcatgtcgcgcaacttatgaaaattggatatctcttgggttacaactgaaatgctaaagttgtatcttatatatcattgtaaataaaaactcatatataatgtttaactctctccttgtcacataattacttccattttgtcaaaagtcaatttttttagttttagtttttttttttaaaaaaataagcataattattcattaattaaaaaacagttagacattgcagtcattacaaaaaaggctctccagtaaggaggagatcagaatagagtcgtacaactggtgggtgaaagcccacctagctacattatgggcaatatagttacaagtcctgctaacattagaaaaattacaactaataaaagagggagaagacttaatacaaaaggagacatagttctcaagagcccaatgagactccttcccattgagagcattgatagctagcctcgagtccctctccacaataacatacttagaccctaactccaataccaacgaaatagccaaacagcaggccgcagcttctccatataacacatccgagacgtatgaacccgaatcaccctacccaaatgattccttgctacaacagttgtgtacatactttttaagcccactctaacatcacaattcatttttatccaatcttgaggaggtggagtccaagtctccctctcggtgtagggcatggcaagaaagaagcatgtgactctgcaaaataagtacaaatatggtcaatgcatttcaacacatcagaaggagaattatagtgtaccaactcgttgcgtattctccaatggtgtcaacaacaatcaatgcataaagaaagacatcctcaactcggatacccctatttttaagatctcatatgaatttaacccagtcccaaacacgaatactagtatcacaaacatggtaaatgccccaaggcgaagatcgccataggtgtaatgccacatcacatgaaagaaatgaatgttcaatagattcctccctcaacccacacaatggaca

SEQ ID NO: 133860 - DNA, 550 bp, Cannabis sativa
acagtccaagggttgccaagcccttggacattccaaataagggaatttattgttctcggcgaccctgcaatgcagagtttgccgcttcataattcttctccaaggttgaatcacaatgttgtgaaacttccccagtaagaacgtcaaatcttgatccggagatcattttcccttttgtttgatccctgctctcaacagtttccccgtgtttcgctttgtgatggttgctggattttgacacaaatttccttctcttctctcaaactcctttattctgtttgatacagccatcatcaaaggcaatcgggacgtctattagtgaccctgcattgtccatcaagttgaattcaatttccatgaatctagctttacaagccctttcttccattgaattcagcattgcctctttaataagatcttcgccagttctcttacgaataccgggcggcttggattttcattatattattttgggttgtatcttttgtcagtttattcggtttggtttgggttgtttattcgggtagggcggtttgtaaattttattgaa

SEQ ID NO: 133861 - DNA, 698 bp, Cannabis sativa
catcagattgtcttttgaaattacgatttggagatttattttccttcccttgctatccttttcgagtagaggtataattgatgaagagttaattatggtagagtgtgacatattcaaattttttttgttgcatcataaccaaatgaggacaaaaaggatatgtggaaattatgttggagcatgttacaagtcttgagataggcatgtaaatccctattaagtctaaaatagtagcatcctcattgttcttatcattctcaccaacaagttcagcctgtggtttgttaatctttggagaatgattgatcttgtcatagattggaagacttgtaaaggttgttggagtaaaattaactgttgagaattgtggtgttcatgatccattgtttacaaatgtcactggatcatttaaacctttacctccttggtttgatggagtatcacccatgttagttactgaatttcttccttggtgttgtctcaaaaccatttgtctttcttgtaaaccagatgcaatgaaggatggatcaacaacttgatgttggtgaaaagactctacttgaaataatttccttggtcgaggctaacttcgggtgcttaaagatgggactgtcgaaatcacagaagtttttgctaaacgactgagcaaaggccaagcgtttccttttgcaaaatctgtgcgataccgatcatagcct

SEQ ID NO: 133862 - DNA, 1621 bp, Cannabis sativa
  modified_base (474)..(483): a, c, t, g, unknown or other
aatagttttgacttttataggattaaaatagaaaatatggtattattgaaagaaaaatatgtggttgaaataaagtggtaaaattgtaactagaaagttatctctttatggtcggcccttagtgtgaattttgcccaatattttattcttttttaatccatataatttagccttaatcccttgttaaaatactataaaaggaatatgatgctctcatctcatccacttgattttcaacctgccaaaatctagttttcattctctgacaactagtagatgagagacaccttctatacagttttcaagcctccttcattgttattcatactcgaacccttagtgatagtgtgccatgcccacaaatatcaagtcaagtactcactcatagtgagtaagatggtggtaatcaaacgcggaggagagaaagagatctaggctgagatcttaataatactctgtgacagaaaggaacannnnnnnnnnatctgagtggaaggagtcattatattccactgcaaccaatgtagggtattctaaactcttatgtgtttaatttcattattttagagatattcatatttaggatgctaattcaacatacttgttagtaaatctagatcttggtaaaatattcccaacaaatgtgatctcattttttgcccacttgacgtggcatgtccacataggtaaatttgaagccacgtggaatacaacctatcaataggtgagcaaagttaccttcctcaacatgccaattaacaagggttctaaatagttgggcaagaccaatattgacgaaaatgaccagccaaaggggttctggccggaccacaccctagccaggcaatggaacctttgtgctgaccaggccttaagagtaggacaggtcagccaacatgtgcaaggagtacagaaaacatgaatgattggaggggtctgcagaaaacttcctggacgggttacaacttgagttagctatgggacaactctatacccaaaaatagagattctccctcaaattatctaattattctttaggaatattagttattttttttatgatttaatataccagataaaagagtttttttttcctattttggaaggatattaacctatttgaataatgatattttgtaagccctaaactatataaaagatcttaggcaagtagaaaagggaaatgaattctaagtccctcaagctctattgctttctcatgtttcctcacttctccactagacacttagtttattctcctcattaagtctcacttgttctgaatttttaatactcagttctcactactatactattcaagagtcataactagaaattacaaggtttaagtatgtaatctgcgtggtattatctccagaatcaatataacaaaaaggagagtaggtcattacccgctaagggggtcgaacctctataaattgttatgtcgcttttatttgttactacaatttacatgtcgtgattatcggtaacaaaaaaaaaaagctctgctgtcagttgaccaaattcaggatcaaaaatttgtatattattttttatgctgttttgatacagttttttttttttttttttttttttttttttttctttggtttttttt

SEQ ID NO: 133863 - DNA, 705 bp, Cannabis sativa
tataacccttttaatcttaaaaggtgtatactatacatttattttttcaaatcaattatttgaacaccaaaaactaacaataatgaagagaataaaaaataaagatcggtttgaacgggttaacccgaccaaactgacgaaaatcattgggtgggttacacttgttttattttttcattggacgggttacaattagatatttataacccgaaatttatattgggttgataaaaatacactataacccgaccaaactgaccgatgtacacccctaatacaaccatctcattgacctagcagggaacctccgggtagaaacatacctggcagatctacataaggggaacattcatgagttggccaaaatgtcctctgcagaatatggccggatacttaacctgtcgaccagataaaatgggagccaagtattaagggatctgaccggatgaccaacatgccgatcagatctagcattgccagggatgctgaacagagatatgcaatccttgattttgcccttagcaagcttccaaaaatatcaacaactaaaccctacgaactcggaaccaacaaatctatccgagaaaataggagctttatcatatcataagtgtatcctaaaaaatagggatgtttactattctgtttactccttttatagagccatatgtaacaactctccccctataaataatgaaggcattc

SEQ ID NO: 133864 - DNA, 1241 bp, Cannabis sativa
agaggtaaaatgaacaatcatttttctactctccaaaattagatgaccaccataagaagtgacttggccattatgaggagtgacatggagcacgtgtttgccgatgctcaagatgaattggcacaatagagagcatatatggaccactttggacctctaccaacttagttcacttgcattatgttttagcattgttcttcatgtttatttttttttattcttagtatgcttgactttctatgtgttagtgtgttatattattcgtattttctttttatgcttggatggtaagtgtgtttgaacttgaaaatctatagtctatagttctatgtttcaaatgaatggtgtgttatgatttttttttattcattctacttgaaatttattttgtgaattcttttgccatcctttttgacgaatcaaaaggggaagaaatttcatagtgattatttttatggcaacaactcaattattttagacttctaatgatgtttgaatataagtaacaaattgagggggagtttataaaagcatgaaaggtaaaactaaaaggtaaatttataaattattaacccttgcacatattaagggagagctaatctaatatattgtttcacttttatttcctttccctttttaaaataattaaatattcgatatcatcaaaaattggaagattgtggactgaaactcttaagtctccttattttgatgattaacaaatatttaattattatttgttactaataagttgttgactttgtagtacattaaagataaaatatgattttttctggcaaaattaacttcaagggcaaaatggtaattttacaaaaattctcgaaagtgacccaaagtagatttcaagatcaagaaactcaagacaaaacttcatgaagacttatttacattttctaatcttgtacagtgattttcaagtccatacttaaaaaagtttgggataattacactatacacctacttttacatcttaatattaaaaataacttaatttaaattaatcactaattttatgtcgtattggaatttatactaacgactgcacattttatttttgctaaatgttgcctgccattttttttttgtgtggcttttctcttttattctcccctttttatatatatattgatacatattatatttctcctttatctctattgtatatctaatttaaaaatgagtaattggcggcaaaacctccccaactatcaatttacttg

SEQ ID NO: 133865 - DNA, 504 bp, Cannabis sativa
gggcataaaacccaacagtgggtacaccaaaaagtactttattgcctatggcctccgtaggattgggcactaccaattccagccagtgccattcttcagacgccctatccctactttacaaataagggatatcgaaaatcacatcttgtctcttcgactaagcagagaaatataatttggttgaccagtgtggccaatttccagaagtacagcttgtatcctcctgttctcggagttacaagagccccatctgtagatggggcctgccctagagatgggaaaactcttgacttggatgatgagctacctttgtcttgcattgcacagaatttggagaagaaagagaaagctatccgccagtgcctggccagcggtggtccagtggtggtgcatctttccatatcgggcctagaggccacgcttctgagagaccaacctgccctgtgcccgcatctagggcaagggcaaggctattgttgaggactctaatcgttcctcttctga

SEQ ID NO: 133866 - DNA, 595 bp, Cannabis sativa
taaaatttttgttagtattagaataaaaataactatttgttaatgtaagaaatagttaattaaaaaataattttaatatacaataataataaaattatattatctagttttgtattattaattattattattattttgagttatttattagagtaatttgccacataaaagaatggctgaacactcaattcgaaataaaagacttgggtgaagctaattatgttattggaatttaaatcattaaaaatcagaaaaacaaatcacttgctctcttgcaagtaactgacattgataaggtgctaaagcgtttatcaatgaacgacaccaaaagggcagttttgccttctagacctagtgtgcgactatctacggaatagtgacccactgatctccaagagataaaagatatgggaagatttctttatatttcagcagttagaagtttaatgtatgttatgctatgcactagaccagacatttgttatgcagtgagaatcgtgagcaggtattagtcaaacttaagaaaggaacattggacatcagttaagcatattctgaaatatttaaagaggataagggattatgtgttagtcta

SEQ ID NO: 133867 - DNA, 539 bp, Cannabis sativa
aagaatacaaaacagaataaaggaacatgaattaaaaccaataaacaaagaaatcagttatatacctgatcgtttaacttttgggacacagaatcagattggtgataatcctgttgttgaactccaggatcaacataaggaataatgttctgaaaacattgataaggaaataaacaacacaataacatgaaaacaaagtgaaatatagaaaacaataaacaaaagaaaacatgaaaatttaaaaacataccttacttacttcagaccttttcctttttttaacataaacaattgtatcaggggtcttatccattgtataaaacctaaaacaaaacaaagtatacagagaaacaaaacaagttaataagtgcacattaaaaactaacaccaaatatataaccaataaattgttactgccaacccacataaaatacaaaaataaaaattaaactgccacatcggggcaaaaaaggagtaaaaacagtaaccacccccactaaatactctaaccaatgaaaataaatgtaaagcccgcttag

SEQ ID NO: 133868 - DNA, 504 bp, Cannabis sativa
tgaggacatttactaacatagtcttatgatttagggccgtttgctatattttttttaaatgaggacataaactaacatactcctatgatttggagccatatactataatttcccacatatatatgtatatgaatccacgattgaaaaaaaattcaatgtcaatcaagattgaaatatatataattcaatcagaatattgaatacacgaatcatagaccgtatataaatcaaaaaacgaaagttgatggcagaagccattaaatatatattaacgaaagtctgaagccatatcaaatatatataacagtaataatattatataccccgtactaatcaccaatctgaaattaacgaaagaaataaacatataaacatactagaagaaagctatctgcaaggcacgtatatttagttttatgttaaatgttttataatataattgagaataattcaataaataattatataatttaatttattatttagagaaattggtgaagagtg

SEQ ID NO: 133869 - DNA, 727 bp, Cannabis sativa
ggtaaaatatttccaacagtttcaacattccatgttctatcggaggcccgattgaactaaaagtcttgagtgatttaggggctactatgaatcttatgactccattcataatttaaaaggtgaaattaggagaagctcatcatgcaactatctccttacaaatggcaaaccaatcaatcaaagaatctcggaaaataattgaggatgtcttggtaaattcatcttccttgctaattttgttattcttagtagggaagaagatgcaaacatcttaattattctatggaggccaattttaggcaccaacagagtgctattcaatgtgctaaagggagaattgaaattgcgattacaaaatgaagagataacatttattttttataacaactagtgttccaacttgttgtagaattgatacggtctataatgatgatgagttgaaagtcaccaatagaaagtacaatgttaaaatcgatagtctgacaattcaccattatttagaatggctcactactacaacaatagtttttcctgacatttgtaaacagtcgtttaaagtattcccgtcggttaaaatatgcgacggttaaaaaccgtcgctaatgtggacttcccgacggtttaaaactgtcgcttatagtatagggtacggtttaacactgttgcctataccctgttttaggcgacagtttaaaaccgttgggaatgtaaaagaaaaagagaaaaa

SEQ ID NO: 133870 - DNA, 844 bp, Cannabis sativa
accctggcgctgaatccagcctctaacccgaacctgaatcccattccggacctagaccagacttaaaaaaaataaaaaatgaaatttacagaacacaattttgttttctgtttttaaaattgaaaaataaaagttgttatagaacgcatttttatttttcaagaacaaaattttattttcattttgtgattaaaaaattagaaaaaaaagtgttaccaaacaacatcataatattttttattatagtattaaaaaaattaaattagccgagcgaatagctgctatattgcctagtatatatatgtataggggaaatataaggcagtgacatgatattctaaaatgatttcattctactctatttttttctcattttttcatattaattaatttaaaaaaaaaactaataaaaaaagtctaatctactaattcatacggctacactataaaaattttcaaaaatattgtttttaagtgggttgttatatagattttggttgcgatttaagtttcttcgttagttaaaataggagtttctatgtagaattccgtaaaaaaaaaaaattaaatataaaaataaaaaaatgctccttatttttaaaaccaaattaacaaaactaaaatatctacttatataagattaatcctaaacctaattatattttactattcactcttccatctctttctctcaatcaatctatctattatttttgaggaattttcataaagatgggaattgaaggtatggtttacttttttatggcataaataaataacactatagtattatgagttttttaattttttgacatttatctgggtttttttatgccatattttt

SEQ ID NO: 133871 - DNA, 1809 bp, Cannabis sativa
  modified_base (1192)..(1196): a, c, t, g, unknown or other
  modified_base (1499)..(1518): a, c, t, g, unknown or other
ttaaagttgattatattaaaaattgagctcagggttctatttttactattttggaaaatatagggtctattttatcatttaacaaaataaagaatctaattgataaattttgtagaacacagggtccaaaataatatttactctaaatattttgatgcatttaaggtttttttatcctttcaaagttatttaaatttatttccatcaaacaatattttatagcacattaattatattgacacatgtcttaatactatatgttagagagagaattggacacactatcctcttccatgggtaaaatgtgtttgaagtttcaacgtataaatataaatatatatatataactaaaataaatgaattttttataaatacataaataataaaaaaagtttacctttttacgaatgacactattttttcaattaatggtctaatagttacatatttttattgtaaccatcatgattatttttttctttgatctgtaatagtaggttattaataggcaaacattcctttttaagaattaattaattataatgaactattttttaaaaagaattaactaaatatttaacaagacctcttttagcaattactatttataaataatttttttatttatatttaaatctttactataattattttaacaattaatccatttaattataatatttacaaaaattaaacttctttttatacaaattaaaattatcttcttataataaattttaaatgatatttaattattttgttacaattagatgaaatatgagatctcaagctagtcaatcgataacaaaatttatatatctatctatatatttatatatcgatataattttaattttctaacatctcctattttctccttttaaactttatatatacattcattgtctagtttatcattaatggttaatctattcggtaatttagtcttatctccctacctagatgatattcttattaaatcttttacagtttgaaagatttgtcaacatttcacttgaccataatttataaaagtttgaaatgatattactttgaatttatttattcatttaaagattattgagtattttttttctcacattatatgtctagacaaaatcttttctaagcacaatggatttaaaccatcactatcatattattttcttcatgctttatgctaactttaagnnnnnctcaaatatatattgaaatacatataatcttattataaagacttattctcaatatagtgtacttgatttgattcaagatttgcaccttgtgagaaaaatttgttatttattttttaaatactacttattgacatattttgggataaagcttttgtgaagttgtggttgactttttccaagcagaacatatgcgtaatggcttcaattctcaaagaattttgtcagacaactcaatgcccagacaagtcttaaatgactttgcccaacaacaaactattctctctacaacactatgagaacacnnnnnnnnnnnnnnnnnnnntttttatagagttcaaatactcttttgaatatttgaaaaccaactccatgactatcacaaaatattttattggatgtttatgaacacaactaaaaaattatatgatcaattagaacaagcaataagttacaaaataacgccaaaatagagttgttatgtacctgatgacgacacgtcgtctgatgcacactataggcaggggcggacgtacttgtctccctatagtggccatggcccccctagcttttatatatatgcaatataaaatcttagttatagtatattgtaatt

SEQ ID NO: 133872 - DNA, 503 bp, Cannabis sativa
gttgacatggcattgggtcgtacgcctaggttgacatgcaacttggttggcatttttttggttcctcaaataaaaatgttgctatgggaattcttcttaaaattgtgaaaaattgcgaattttatttccatagaggtatcaaagcaagccctgtgaaagagcccgagaagcacgcagcacctaggttgacacctgacctggtgtttgcactacttcaaaaacttgattttccgtcgattctaacgtcaagaaaatgtaaaaattgatgttattaaagaactcatgaatttttcgtcggtaatgcactgatgcaagattagcgtcagttgcaagactatttgcgtcaaatctacactggcgctaaccttgcgcttcgtgaaaaacattaaaataagagatgggcgaaacccatttcacaaaccctaaatatatataaccactttcagctgccccattaccattttcacaaaccctaaatccatatctctctttctctctctctc

SEQ ID NO: 133873 - DNA, 592 bp, Cannabis sativa
taccctgagcctaattttggtcgatttatttttattccaactaccctaaacttcttattccttagctctaacaattgtgcctcaatttctatactcgtcttgcgttatccctcttttcatttaccgcctatagtttcatttcgcgcctactcaacagagacgagcacatataagtaatagtctttacatcatagaattgtgttatattaaaaaaaattatatatatttgttaaatatttgatactaatctaacttttgcctttattttatagttctattggtggtatggaaagacaaatgataaatattttcctttttgatattaaagttttattgtttagtttttcgaaagtatctatgcatgcactttggataaacaatgaatttttctagatggaagaaaattctccactatttttatgatgtacttagtaaaattcagtaaactcccacttgaaattatcactacaaaaaattattgtttttggtgacaactttagtcacaatataatatttttgtgactaaatgtgacttttagtcacaacaaaatatttcttgtgactaaagcatagtatttagatataagttgtc

SEQ ID NO: 133874 - DNA, 1021 bp, Cannabis sativa
  modified_base (575)..(578): a, c, t, g, unknown or other
agataagaaccataccatcaacaactccctaatcagaaacaccctgtacatcatcaaccccaagagcgtaggcttaagcggatgaattttgttttgcttttccctttccttgattagaatggcttgtacttgcatcagaccctccaccttgattgtaccctctttgacccccactaggaataggagtttggaaaccttgtgagtaccccatgttgaatcttgaaccttgtggcctgaatttatgttgatactgagactgctggccgattagggtgtgaaactgtaggaggaagactgagactggttggtcctgggatgtccatgaaaaggagtagactctacatagctccctatgggtcctttgtgagatgcttgaaatttttgttgttgttgtgggtaatctttcttcttatcaccttattgaccacaactgaaacacccgtatggtccactacgagtctttccaaataaaccactactggtgctacccccattaaattgttgtctttgggaccactgcccttgattcttcttggtcatctttcagtcatttccttttcctctgcttgtgttcnnnntctcattcccttctacatgagccttaatttgcaagactactgtcacacactcagtcaggttgttaaaggtcaaaggggctatttgaccacgtatcacagacctcaaacgacacatgaactgttcaatcaccaagggttggtcaacaacaccataatatgcataagaggatagctgtacaaacttcatgtaaaactcattcacagtcatatccccttgtcttaaaccatcgaatactccaataagagccctcatgtgagatgaactaaaatattgttccttgaaaactctctaaaaatctcgccaagtcatcccatcagttgatattgtcctagacacggtctcccaccaatctgctgcaccaccctctaacttggacacaacaaaagtaacttggtgttcctcaggtgttcctattgcattgaaatttttctttatatgcctc

SEQ ID NO: 133875 - DNA, 654 bp, Cannabis sativa
tttaagcttccattacccttcctccgcacaaaatgtatttttttgctctttcgtagaagtcatctaggccatcaaaatctatttttagcatgttctcccatagtctacttcaagggggtactcttgcggctataacaatcttgagtttatatttggagacttttcttaccttagtaacttcagcactaaaatgttgaatgtagctttgcaaactctcttgtttgtcttgctttacattggtaatacttgtgacacgcatgacgtaatcacatacaacctgatgttgttcgaggaactccttcgaaagttgcttccaaaatatgattgtcctaaatcctagtcttttaaaaaaaaatgtaaaaaaaaatacattaattgtactataatatgacatcatattttttttaaaaaataattgtattttatagtattattggtgtaaccctaatatataaatattttgattttacttttagttagaacattgattttaccaaataaatgtaaaaaaaaaattatgaagtaaatgtattttttttttctttcaaaaagcccaattttaacatttcgtttaggaataattacgtaagacactatttttttgtaaaataattacatttttacgttcaaaaaatattttttttacatttttac

SEQ ID NO: 133876 - DNA, 602 bp, Cannabis sativa
ttagtgacaatttatatctaaataatatgctttagtcacaagtaacattttgttatgactaaaagttacatttaattataaaaaaattatgttgtgattacatagttctcactaaaaataattgtttttttgtagtgagtatttaattctccactaggtttataaacacatcaaaagtgaactgtgtatgtttcaatataatattggtaaatatgcaatctttagtttgtgaataaataaataaaaataaagacattttagtttggtggaatttccatggccattagtcatagcaatatataataaaaaataaatatgtattgtgggttgtgttgcgtccatatgacatgtgtttacctaaagggaacaaaaattaattgtattcatttgtttaataaattagttacgttctcctacacttttataagaaactaacttattcttatggcacttatacttacatatatttttagtttttatttttgttacgtgtatttttaaaattttataaattaaaagaaattaattaatcttttcattttatttttcaaaaatatttaaaattttaagaaaaataaatataaaatttaaaaatattaaaa

SEQ ID NO: 133877 - DNA, 720 bp, Cannabis sativa
acggacaaataaaaaatgtgaccttgaggactattgccgctatttttggaccttggggactaatctgtatcaacgtgaactttttggggacttttgccgcaaatttcccaaaaacttatatacatctatttatatgtagtttaatatatataataaaatttttaaattttcaaatattttcaaatattttttaaaaaaattaaattaatttttttttttaacacaatcactaaatatatttttttacatagttatattattattaataattttttatattattttatttataaaaaaaccgtatcaaattcatgtagttaggtcgggtcgtctttaacacatttttatttcgtgtcaacccatttttaacttgcatttaattttcctaaccctaacctgtaaaatttatgttgtatttgtgttcatgtgccgtgtcgaaactcgttttatcactcctactttgttttagtttctctcttcaaatttgtaactaaagtacatatattttgtgtttgcaaagtcggtaaattagtttaaatatttaataaaaattaaatattaattttaatgtgcaatattgtgtttatgcctcatttatttatgctcacactattatattactccataatataatgtttgattgattaaataaaatgttgtgttacaaaattatttgctacaaatgagatattattcaatctagtaggggaatgttatatt

SEQ ID NO: 133878 - DNA, 914 bp, Cannabis sativa
  modified_base (275)..(321): a, c, t, g, unknown or other
cgcattctcctcttctacgaaaaattcatcttaattggaggacttggtcaaagtaaaacaagtatcaaaagagcctttgacagcctacattagcagatttatgactaaggccataatagtgaaagggctaaccgaagaagggagactggccgccatcctaggaggtattgaacatgtaggagaactatggaaagacataaaaagactcactgtaggatcaatgggagagttcctagatcgagcagatggatttataaagcttgaagaagtagttnnnnnnnnnnnnnnnnnnnnnnnnnnnnnnnnnnnnnnnnnnnnnnntgctgccaatacatccgtccagcaaaatcagagttcttaaagccacagtagtttgagtcaacgtggtaaaaggtcgaataatgttaaccaacaaggtaatgggaagaaaagaaaactcaaaaataactcagagttgcatccttgagagaattccttaaagttcactgcctttactatcatcaccgaggatatagaatccatcttcacgacaacacagtccatggtgtcatacaaaagaccttctcccatgaaaaaagatatcagcaagagggataccaccaaatattgttgcttccatgtggactacagtcatgatactaatgagtgcaataatctaaaaagataaattaaatttctcatcaggaaaaataactcgcacttgccaaagtatgctaatacctaccatgatcagagggccaccctgctagacaataatcagaatcagttgatacccccacctatgaatgggcacttacaagtaattattagaggccctcactttgctggagactcataaaaagctagagagggatgctcggagcctacaacatgaacagaaagatgaagtcttggtcgtggaagaaagaaagcct

SEQ ID NO: 133879 - DNA, 1310 bp, Cannabis sativa
  modified_base (1239)..(1246): a, c, t, g, unknown or other
catgttctggctcaaacttttatatttaattcatgtggaacaatgttctccaataggatgggattggaaatactggtttataaaatgcagctatgctactgtataattttcttttattaatggataccctactcttttaaaaatgagataaattatctaccttgaagaactaggatttttgtaaaagaaaaattatttgcacaccaattttaataatttttattttacaaaatatatatttaattatattaggtttttttgtattatttattcttaaaaaatatatctatcaaacaaaattatattttaaatatcataaaaaaaaataagataaaaaaatattaaaattttattcgaaaaaaaaataaacataattttaaaaaaatatacataattttaaaaaaattataaacataaaatttaaataagtattgaaattaactgtagcacgtgatttttttagaataattacatgaaacactaatttttataaaaaaaaaaattatatttttacatttaaagatattcttttatatttttacaattttttattgaaacaacacaaaaataataataaaactacataaaggtaacaaaaaataacatgcaaacaacatcaaaacaacaaaaaaaagtaacatacagataacaaaaaattaacaagaatacaatataaaacaccacatttttcataaataaaattataaaaatcgtaaaaatatttaaaattctatacaaccacacaactgtatttttataatttttttaatatttttatatatttgtgaaataatctcttttctttcataaatcattttgtaaaaggaaaattttatttacaccccaaaaatttctaaacaaactccattttaataattattttatataaaatttatatctttaattgtactaagtttttaaaacttttttcttcccgttcatattcttaaaaaatatacctatcaaacaaaaataaattatatttaaatattataacaaaaaaattaaaataaaaaaatgatatgatttttttaaaaaaaataaaataaaatatatacatatacatcagttagaaaaaattaagaaaataaacttaaaataagtattggaattaacataaaatattaagaaaaaaatttaaaaaatattaagaataattttttaaaattatttaagtttattttttttttaataataggtgcattttacttttaaaatttaattttgtttgataggtannnnnnnnaagaatataaattgaaagaaaaaagttaaaaatacttagtaaaattaaagatataaattttata

SEQ ID NO: 133880 - DNA, 1140 bp, Cannabis sativa
aagggaaagaagaggttgaccgtctcggaaactccatcagatgtcaacatggagcctctcaaaaggcccaggaagacaactgctaaaaagaagtgagcgtccatgactgttagtctggggatccctaaaactgagactcaagctccgacccatcctttggcccccacacataccgatgagcccattcccaaagcgactcaattttcttcctcttcgagccaagtcctcgagctcttcctgtcgatgctgggagtattggctcggagtacactaaggaatgtggtgcagcttgttggcgtaattttaaggccttcctccctaatgaatgggacttgatcaacaatggggacctggagttgatgcttgaaaggagtgtcacccatggcctctcagtaaattcctctatccttatcctcttacttccttttttaacatccttaaaaaaatactcacgcatttttgtttgttggttttttagcaaaattttatctccttcgtcgcccaacgatggggcatggaaaaaaggaagatcatggagagcgagattcaaaacttgataggtcaacacgaggctgtgaccaaggaatggaatgatgccaaatcggagaacacttgcctaactaaagaagctgaggaggtgaagaggacccacaaggccgagcttgaagctgctaagaaggaggcaaaagataaggccaaggcatgcctaaaactctaggaagaatatcaaaaactccaaggggaacttgatgcagccaaagtaacggtcgatggcaaagaagctgagaccattgagcaatgtaatgtcgttggacttcgttccatctaccaagcctggatggcaaatccagggacggatacaagtttcttggaaagtccgagggggaagtctttgcttactgtgagaaggctaagaaggaagacaaggaagtcgaggcagccgaagaagaagaagaagaagaactgtccaagtctcctaccatgtaggtgtggtttttatttatatattttctttaggaaaatggacctaaggccgagacaatggtttgccccttgtggcacttttgtaaagacaaatttgcaaggttagatggccaactttacttttattttatcttttattgaatgcttcgtactttt

SEQ ID NO: 133881 - DNA, 1180 bp, Cannabis sativa
cttgtactttaagaatctcttcatttatatcaaaatatatatctttttctgcattcgttcttataaaattgtgaatcccacccacaacagacaatcacaatctacttctgtactttcaaattatatgaaggcatttgctttataataggaacacgagccttcaatacactaaaacacccctcaatgacatttgtcaaagacaaatcaactccctttttcttaaaggattacgatctgaaataatttttaaaaattacttaatatttttattttaaaaaatctcacattattttttgttaatttcaatacttattttaattttattttcataatttttttaaatcatgtacgatttttttttctattaaaatttcacatgattttttattttaatttttttgttataacatttaaagtataatttatttttatttaataggtatgttttttaaaagtattaattggaagaaaaaaattaatataattaaagatatatattttatgttaaattaaaaatattaaaataaggtgcatttataaattttcggggtacaaataaaactccacaaaacttataaatatactccattttaataatttttattttacataaaatatatatttttaatgatactaatctttttatttttttcttccaattcatattctttaaaaaatatatcaatcaaataaaaataaattatatttaaatactataattaaaattaaaataaaaaattatatgaaattttatttgaattttttttttttaaaaaaaaaaaaaactatatatgatttaaatatatgtatgaaaataaaactaaaataagcattgaaattagtacaaaagaatgtgagaaaaaaattaaaaaataataagaatgatttttagaaattattttaagctttttttttttaatattgaggtgtagttatcattttgcggggtacaaatagaatgaaattattgacactaaaaagtagccaacaatcgctcgcttgattggcaagatgaaataagagatgagtagagtaaatagagagacacacaggagttatagtagttcactccacatgtcgcgatagtacgggcttttttcataaatgtacaacaaaaacaacataattataaaaaatgtacaaaaaaaaaattattttaaaaatttatacattttgaaaa

SEQ ID NO: 133882 - DNA, 1093 bp, Cannabis sativa
attaaaatgtaggctaataataataaaataatgttaaacttccacttcacataaactcattaaaaattaagttaattatgtaggctaataataagaaattaaattgaaatagaaacttagtaattaattaaataataaaaaaaattgagatatatatcaagaaacaaagaaaaattttcataaagtctgtcactttatttgtgatttcctttatataattatataatataatatataatgaatataaaaatttaaagaatgtatgtaggcttttattataatctatatacatctaaaaaggagaattttagaaagaatgatgtgacatcatagattaattatatcagtaaattatttaaattttattagactttttcatttttgaagattgaaaatcttcctcaaaaactaaatgaaatttgtaatactatggttttatctcttattgagattaatatgagatgagattcatataatttatgtatatgtatatataaacaacaaaaaatcaaaatagaagatcaaaatggaaaatttaaacttatgaaaatcaagtttataagaaagagtataatggagagaaaaaaaaaataaaaacaataaagattagtgataatctttcaaagcaaaaaaaaaaaaaaaaattacctaatagttttttgtgctaaatatctatttgagagatttgccaatgaataacctgaaagtagaactttaaaatttaaaaaaaagataaaaaaaaaataataacaaaatcttcaaaaatcaatagccatgttaaggaatataaaaataaaacataaaaagtttcaaagaaaaaaaaaacataagaaaaatttcaaaattatgaatgttcacaaaattttaacttaggaataagagttagaatacaaggagtttttttttttcttttttaatagaagaatacaaatagttttaataattaagtatagacttaatatataaacataaatatatgatttatacaaagaatacgaatagttttttagttataaaattttgttttcagtagcaataaaaactctaaatatataagaaaaatttaaaaattaggaaaaaattaaaaaaaaaa

SEQ ID NO: 133883 - DNA, 1707 bp, Cannabis sativa
aaacacagaggctaatcacttgaattgattatattaatagacaatgtaactaaactcagtaaatataattctataattactaagagtgtaacatatttatagtggagtaatcgtgaaattaataaacaaggaattatttggttaatgagactcaattaataatctagtttattagagcttataataatagattcatggtccccgaatcgccaccttgaaacattgtcaaggtagagataaagagttgtataaagagttcaaagaaaatctattttgaattagaaaaatagtaattaattattttttgtaataaataaataattttttcaaattaattaaatagggaaaaagacagaaattattaagacaaaaattttcgagacaagatttgtcaagacaaaagttatcaggacaaaagacactaatcttgtcctaaacaacaaggtaggcgcctaggcttggtcctgtccctattgaatttttctttttggggtaattaattaaattatgtaaatatctaatttgaaaagtggttaaagatatttcaaggttattgagatattctctcaagtagttgagagattttctcataaatattactaacaaaatttggttatagatatttttatttaaacaattaaataataatttaattaaaaagatttaactactataaataggagtctgatttgagaaatcaaaacatcacttttcacactgctattttcaaattctatagagagaaaagaaactttattttctctttattgttcttactcatgtgttgaaaagtcaacaagaacaaggttatacactatattctaatagcccacactattctttgtgtgtggtggatcgatttagaagacactggagtgagtccaaattgaatttacctcatcaactacattaaagaatataacttacagaagttttgaggataccctgataggcttcaggaggtatactctaaacttattattttttattattttgatttaatgtacacacgtatggagatcctaggggctatggtacaatgataatcagataatacgaaactcttctgccacgtacctaatttagtaccataaaaccaacatggatatcaatgtttcacatgtggcaagaaaaaaaaacatcctggagttgagtcatcccgagtcacggttgtcgacttcggagaagtccctaaccctgcccctaggttgactctaggaactctgaaatgggtttttggatctcgctaagttgtttccaactcactatctttcactaaactgtacatgaagacatgaagaatctaaatccaaggcctagaagatgaaaatacacgatataacaacccagaagtcaacctaggtgcccagtgcctaggttgacaattctactagggttttggtttctaggcctcttagtgaaaatgagtcaaattttttactaggacatgcgttatacctatcatgggcatatttgaggcattaaaatcaaaattggagcactttcagttttgagcagctagagcaccaagtgccctaagcacctagcgcccaagttgacatattgtcaacctagggaactttcgacaataatactaaagactatcctgagaattttcttcctcttcatccaaaataaggaaatgagtgctttcgggaaacaaacggatccgtctaggggtgacaataatgttggaaattattttac

SEQ ID NO: 133884 - DNA, 1854 bp, Cannabis sativa
gggtaggtttttgagtatgttagaaatggttttaagtggtttctatggctgcttgattgagtttggtttgttgaagccaaagttgagttttcttctttttaatgtgtgaatttgattcaatgattgaattattgtgttttgaagcttggaatatgttgtattatggttattatattgttctgtgaagtttgggaacaattggtttcgtttggtgcaagttttgggactttgaagagcttaaaatttcgagtttctactgtagtgacctggaattcctaatggtacaaggctgcaccaaccggaattctggatggttaattttcaggaatccccgatttttcatattttagccataacttttcactcgggcatccgttttagacattctatatacaattacgaagcttatgaaaagctctatagtgtgagacatagattagagccaaaaaaatgtatttgattttagggtgttttcaccataagattcggttgaaaactcttggttattttacgtgggttctagatagtgttttggactagatcattattgatttacttttgtcgtgacataggacccgagattatcaagcatctttccacacaggtcagcccgcacacttgagttctgaattgaggtaagaaaagtggtaagcaccgtatgtggctaaatgttagcggttgaatgattatagccttgaatattatcaagattctaattaaatgtttgttgagtctcggttgtgaccgagggttggaagcagttattatcattatgagtaattactcctgaaactgcgaataagtttcttacttatcgtttgtatcatcgggcaacgatagtgacatattcagcttgtggttaacgagtggtaaaggggtactttataaagtaccaggactgtgtgtttatgatattgtgtaaatgtgaaagcatgttgatatgagattgaattgatgaatattactggttattattttatgactcacgggtactttatggtataggtaaagggaagaaaaaggttgaacaaccatgagttctaagtcgtagcaccaatgtacatatcaaccgcagtggcacggcctagtgaacaggatactctattacttatcttttatcataacgcagtttttatatgcttgattttaattatcaaaaattttattacccatacttttggtataaatatatagtatttaaataataattttataaaaacacacacacgtggcgtccctgtcagacagggcgttacaacatggtatcagagtgccaaggtttttagatcttgaagactggtttgaaatgtacattggctgcgaggactcgttcgactcgtggttcggtaagcttttaattaataaataatttttttaattatctgattgcttgattatttaaattgtgttaataatggaattgtgtgggaaggattatgatacatgaaatacttatcagtattgttattacccgaaatgtgaccgcaggtgtatagattatgcacttgaggcagactggtagaggtaactgcgagctagctgggctttgggttgctggtgatggcgagaaccctccaccacaaccaaactaggaagagttatatgccgcgatgcaagagactatccgacagtagggtgacaaaatctgagaactgagaaagcactgagctcaaccttctctaaactctaatcctgatcctctggcatctttggtagtgccaccggatgtcgagaattgtttggaaccgttgtatgagcagttcaggaagcaaaaaccgccagtctttgagggtggtgctgatccactcaaggcggagcaatggatgagtatgataacatccattttttatttta

SEQ ID NO: 133885 - DNA, 1035 bp, Cannabis sativa
  modified_base (185)..(186): a, c, t, g, unknown or other
ttataattatgtgatacttgatattaaagttatcattttgaaaaaagacgtaaagtaggcttttgttaaaaattaattaatatttttaaataaaaaatttaaatgtggtaaaaagcaattgaaatattatttcaagtatcacatacaactgattcgttttattattattattatatcttaatttnnttttttttaaaaaaaaagcaaaaaacgtacacattagagttattatttttatattattatatcttaattttttttttgtaaaagccaaaaacgttaatgtatatatattgattgatattttatgtatgtatataaacaaaatttacgattaattatattttatttaagttttaatatatttttttagaaattattttttattttcaattattttagaatattaatttgaaaaattattaaaataatagtaaaatatcaatttgaaaataatttacgagatcccaaaataaaatgtactcttttggatttatcataaagttttattataacacgttattatttttattctatgatataaagtttaatttccacacttggctcttgtacatcccggattagcgagattagtttgtgcttagtcgctatgcgtggcgttccttatgttaaggcgttacataaccatagaaactatgcacctatttattatatttactactgttttttttttaaacaagtattttcactgtttttactatgttttataggatcactacaattctaaaaaaaataacaaggagaaaatgaaacagatataaatttatgagacatgagagattaattttagtcaagcctacatagtacatggctcatatgaaaaatataagtgatgaaatcgttggacaaatatggcttagttataacaatagagatgctcattgaaatggaataatttaggtgccgtttggtaacacttttgttttttaatattttaatcacaaaatgaaagcaaaatttttgtttttaaaaaatttatttttgaaaaacgaaaatgcgttctgtaaccacttt

SEQ ID NO: 133886 - DNA, 2813 bp, Cannabis sativa
  modified_base (2315)..(2318): a, c, t, g, unknown or other
ttgatcttattagtatctggttttgtccatcactcaccactattgttagtattttggacaaacaaaagtggaataaattttctagattgagtgaacttccattgattaagaacagatcgagctaatgagacaattgtcgatgctgaaactatttttgagtaccaaagaatatcactgcaactcttccaaagtgaccaaacaaccatgactttttattttggtttctaacgagacaactgttaacacatgatttttcatcaagatatttaatatttttaattttttgagaaattgaagaaagaacgatattaacacactaagaacaactgaacaagcaatcatggctgtaggaaatagcaatacttagattgcccctactccaacaactcccaaagtcacaaaaaaccaagtcaaaattgacctttccctctcttgtgcggattaagtgagtgcacatcaaaacactgccgtttaaggcaatataaaacatcttttattgctgcaaaccctagcagcacaaactcatttcttcctcttaaccctagcagtcgaagcacccttctcttcttctccttcattcttgcttgaaaccctagcagccacacccttcttctcccacactgaaaagcttcagccgattctcctttcttgctgaaaacttaacagctgaatcattgcttcagctttgattcttcttcttcaatccctacccgaacctacacacatgaaaaaccaatccaaaaccagaaaaaaactaaagaaaaaccagcagaaaattaaaagaagaacacaagaaatgatttcagagttccctctaaattagaggtacgtctccgtcaagtgaccctcgaaggtgcttgagtcttcactatcaaaatcaatatcgggttacaaggattttaaagattccaagttacagagtcagctggtaatctctatggctctttctctcttttcttccttttatttttctggtttgtattataatatatatttctaactctctctctgtttttctctcttgactgaggttatatctccatgaaaaaaggctgctgctatatcctctttttgagccgaaaaacacaccacatttaaagggcaggttgaaccccttatatatattgttgttgttgactgtgatgttgtgttattagctgagaaaaacagttataaaaattgttattgtttttccttgagttgctgaaagtttgttggagtcttgaatgttgttatttacttcttgagttgttattgtagagagcttataagatttaagcctatgaaatagaatcgactactccaagagttataatggtctgttgaggcttgtaaaaaatcttactttatttttcttgtaaccttgtttaaggtattttccatgtgacagttagtatggaaatctatccaacaatgactttggatgatatacgagtaatcacctttagttaaaggctagttttcctaatattttggtgagtgtatttagatgttcactagataagaatggagaagcaatttttaacggaaaattatagcaaatgatctcaaatcatagtactatataagtaaatatctttattttaaaacttggagagaaattactcttttacattatttattatttttatagtcttttgccacctattttttttttcatatatatatattttagaattagaagtaaattacttaaagatcatagtatatgttttgttaatttttttttttttattttaaagttatgttgatttttttttatatgggttgttgtaggttgttggtatatatattttactgtacggtatatttctatttttttgtatggtatattattgggataatttaaaaaaaatccaaaaataataaaataattacaaaaaatacggtttgtacggaatttttaatatttttacagtttttaaattttatttacataaaatatggtcttttggtgtatttgatttttatattgtactcctgttattttgttgttgattttttttatttgtatattattttttatgttgttttgttgttattttgatgttgttttcttattacttttatgttattttcttgtatttttacaaaataccgtaaaagtataaaaaaaaaactttaaacataaaaatatagatttttttacaaaaattagtgttttatgtaattatccctatattattattcttagatgatattttttttttttttattttactatgtataatgatacaaatattttaatgtaggtatataattttattgacatactaaatttatgtaattattattttatatattttaattgtatnnnntattatttattttaaataatattattttattatatatataattttgtaggtatgatatatattttaattgtgtggtatataatttggttagtatagtatagtatatatttatatataaatattagtaatatatattttttattattattgttagtaaatatgttttggtgaatggtatatgtattgtttgttatacgacatattattttttttaaaatgatatttaaattttattttttattgtacgtttattgatgtaacatataattttattagcatatgttatacatatttttatttgctattattatatatatgtctattgtaactttgtaaggtatatattttttattatatggaatatatatatttattgtacagtatgttattttattttaaatcatgtttagtttttattttattatatataaaggtggtatataattttataagtatggtataattattttatggttgtatataattttgttatat

SEQ ID NO: 133887 - DNA, 1257 bp, Cannabis sativa
aaaaaattaccaaatatctcattagcaaaatatgtataaatttttgtaatacatatatatatatattttaatgatatttaagatatcattaaatttttgttcagaaaaaaaaaaagatatcattcaatttgtttatatatttttttattcaaaaaaaaaaacttattgaaataaacctataaaatgagcttatataaaacagatgccatatgataaattttagatatgaaataacaaatatttttctataacatataaaaataattgacataatgaattttattggttacttcttttttagttaataaaatataaaatagacaataaaataacttttgattccaaacatttattcgatgataatgaaaaaatctctctttgtatatatctaaatgattatttcaaaaaatagatgatactggtactagtcttgagctgaaacgagtagcggtgtagctaaaattatttttttaattgcttctttataagttattttagaatacaatttaattatttttatttattgaataagaaaataattcagtaaaccatgaaatgtggttggtatatttaattttttagtaaagtttgtttttattttttatttttaatgtaactcatagatactatttggtttccttacaagttattttataaaataagattatttaaattatatattgtaaaatctaatgatagataagaaaatactttttaataacttataattttttttttttttttttgataagcaaacctataaagttgattgatataataaattttatttaaattcaaaaattaattacttgtttaactaaatataaaagaaactaaaatgttacttttacttttggttattcttttatgatggttgaaaaaaatatgcttctcacatattaaattgatcatatctaagtgtagatcacaattgtacaacttttgataccaaataacttcttatttagccaaaagtattttttaaaaggttaaaaaataaatataaataaaagtaatttttaatactaaaaatatattatataggtagaaaataaaaaaagaggaagatatctcatgcgtggacttctttttttagaaaaagatttcatcacttcttaattaatgatcctcaaaaataaatcctatatgttgacctcgcttttagccaacgacagtgagtctaatttagtaagcgacaagtaatttgtaacgattggaatataataaagcaatataaagacacatgaattttataga

SEQ ID NO: 133888 - DNA, 600 bp, Cannabis sativa
attaaaaataaaagatggtctaacatattttgtagcagaatctaattgttttaatgtggtttaagccataagaagtctaattcgcatggtttggtttcttaataaattgcaaagcatttttatctgttttgagtaataatggaaagatgttcttgctaattagacacaagtggtaattgataagtttttcaataaacgaagtattaagggtcaatttagaacacttgtgctatgagaaaaacagttgtaaatgtattgtaagaaaaagcactgaattgtcgagagaatatgcagtgagtgtggcaaattacaaattttaaagtattgtaaattgttaagattctaaatttctaattataatgataattatattatagtttaatttattataattacaaatatatataacttatgttatattgaacattttttaatttcgttattattttttctaaaatataaatttttatgtatttggtaattttaaattattttttatgtatgtaagaaattttaggttgttaaaaaaatttaattgatgtagtttgctaatataaaattgtaaaaatagaaaatattcaataaatataaaatatttaa

SEQ ID NO: 133889 - DNA, 612 bp, Cannabis sativa
agttcggggggaatttttaacggccaaaaaagttcaaggggcacgatttagtacatgtcaaagttcgggaaaaaaaattaccaattagtctaaaaaatatgggtgttatgtgtatttttttgagaaaaaaaaagtacgaaaaataattatatagagagataaaaatataatagagattggagagtatattatgagaatgagaaaaaagttaatttaatattatgatttggattaagttaatatgagaatgaaacctaaattttttttactatcacgtagtctattcgtactgatatatatattttgattctgggtatataacataattcttagtttaacataggtttttgattttcttcattaactttaacaaaatattctaattatttaacaaaatattctttattaatttcataatattattatatgtatttaaaaataaaaaattaacatttttctgttaaaattttcatttattattaataaaactaacgagactaacgttgcctattagccttttttaagaaaattaaaatatagggtaaataccattttagaccctctatttttcaaaagttaccaattagatcctgtgttttgttaaatgacaaa

SEQ ID NO: 133890 - DNA, 725 bp, Cannabis sativa
gcactcaatttactaggaaacttacaaataaatagcactcaaggtgtataaaaaaatatagaaagagatagctctcgaattatagtaatgttattgagaaagtaacagtctattaatgaaataaatctttatttgtaaagtaataccatataaattgtcacagtcaacatgtaggattcacaacaatcattatctgtctcttagtgttgcgttcaaataagttgattaatgagagcagtcaatttgtgattcaatgtaagtattagttactttgattgtgagaacaatgagcactcaatatagaaatattgtagaaagagtagcaattaaattatcaaatagtgctcagtagtcaaatgataataatagtagcagcagtgagaaggggtgcccaacgagtgtacaatcaatcaatatcacttttattattattattattgtcatttgggccacgacccactatcatcataaaccaatggttttcaaaaagcttaaaaatagcataagttttatctaccaatagagacaaaatcaaaaggatataagtcatcattttgtttcagacaaaaaatcaaatggtcgaagattaccttgcaagttcttggcaattgagctccttcttcagtcgttgggcattaactaaaattggcttataattttgcttctttctctccaacaatttctgtaagttcttttttttttttttttagagaaatttaaacttt

SEQ ID NO: 133891 - DNA, 1268 bp, Cannabis sativa
taagtaaataataaatattattttgttatgacttatatgtacccaattatattttactaaccaaatataatagtacaaatattactttaataaaaaaatctttcgcataatcatatcttacagaaatctatttacgtgcctcggcacgtaacctctaactagtatatatatatatatatatatattttggtgtaataataattatatgttttatattaattgttataagaatattcctatgtaaatatgaccattgttatcatgtatatgcgtggctaacaattatattttggaagaagataggatataaatatttgtgattgaaattatcaaaaaaaaaaaaaaattgtgattgaagatatatacacacacataataggtgattacttaatacttacgttgaatggttatactaattttagccattaaattattattaaattggttgagaataattaagaagctaattaaaaatatttaacatattatttataacttaatacaatttaatctcttatttactaatatattttgtttttctataaaatactaactaagataattttaattaagaaaataaatttaattacaattattaatataatttttacaattagttattaaataaaaaaagttagcaatttttttttgttttgcaataattaaaaattatattacacatataattctaactaaaaaaattgaaggccataatcccatacattaataatttttttttttttttcaaatttactaatttggctaaataatcacatatatgttttgatatattattggtctaccaagttaaataattttttatcaaaaaaaacttattttttatttgaaaattatttaaaataaatataattaattaagaaaataaatataaatttgattaaaaaataaattaattattttatttaatatatatccttttacataacctttagttaatctttttaaggtagttatagactatattaatttttttctgaaaacaaattgtatagttaattaaagaaatacattcaggataaagaaaaaaaaaaaaaagactaattaatgaatggcatatgccatagaaatatatatttaactccatatggatatattaaaattttaagggaatttgtctataataaactaataaaaataatattttacatttataccctataaaaaaaaaataaacataaatagaaaacaaaagtttctatttacaaaaataccagcttaacaagaaacacggaggaaactcctccttc

SEQ ID NO: 133892 - DNA, 899 bp, Cannabis sativa
ccacaatatctcgctaaaagtttatcttgataccaattgaaattctatttttatgattaccagcttaattatttgaataaataattaatttatgttttgttatagaaatgtttacatagacacataaattgtttgcacaaaaacatgatatgtttaaacaatatactaatagaagataaaaataaatataaagtaaagaacacacaaaattatacgtggtattagtaatctttacaaattgctactagttcacggggatgccagagcatgaaaattattagaagaatctctaaacgattacaaaatcaaattgacttattcaaataaaaactccctcttgaatttgttgcaatcgttgtaatctaaactcctaatcaaatttttgaagtgttaagatcatgaattcccttcaaatcataacacttgcaatcttcctcctgtaaagcaacttacgagtaagacttctctcgaagcttgatgaatgatgtctaagtgtattcgacctccacaattatcttaaagaaaacaatacaaaagtacactgtaagaaaacactaagaacttgctagactcaagttcttcacacaatcaaaactctctaaaacttgaaaaatatttggaaaataatacactaaaagataatcaaaatcaatgacctaaagatgtctatatacactttagaatccctttagatcgcgtaaaaacaaatcagaaaccaatcaaccaataaatgaaaaatcttcccaaaaagaaatttagaatttattcaaacaggccaatcaattcaaacaaattcattgaacctagataaaatttaagggaaatttgaatttccatacctacataactttataatttttttcttaaatgcatacttattaaaatttgtaatgtatgac

SEQ ID NO: 133893 - DNA, 835 bp, Cannabis sativa
tatatacacatacatatatttcagcttatacatataaatatctaacaattggtatcagagcggattatatatctctaccttaatttatgttttcagttttaatatatgtatatatgttcatacgatcggtttaattttatttttatgtttgattgtgatttctttcttttaatcttttgattcatatcttgttaatttcattctacattaacatttgtatgtgtatcaaaatgattatttttcatataaatatatatacatattcatatttatatatatatacatttatatatacatatatatttttatgtacataaagtttattcatatatatgcagatacatttatatatagttatatatatttttcgttatatatatgataactttatgcgatatattgtatacaagtatatatatattttttctatatatgtttatatataatactcaattaattcttgattttattgcataacattgattagaatatcctattctatctatttatcatgtttttaagcaatataatcactatattcgagtatatataaatattcacatttttttttttgtttttcgtccctgatataccaattttttttttttggttttgaatccttcatgtatttttcgacctttatgcatcactactttcgtaatatttgagagtgatttgtgcatgaaggcgaattgataaaccataaaaatatgtgatttttcatcaaattcaccttcagactcgttggtgatttgtgaaattaaagcctacattttgtgtgtttttgatacttgaaatcaatatggatctcttaatttattcatttagatcattt

SEQ ID NO: 133894 - DNA, 1183 bp, Cannabis sativa
aaccgaatttcgaaaaaaaaaaaaaaaaatatagagtaattcccctataatatataaacatattttatttttcaataaaaaaaatggatgatttgaaaaaaaaaagaacacacacatattcaacatttaaaagttctacttcaatatatatcttgacgtttattttgactaattaccaataattcattcaaaatattacattttatacgttaggattattgtaacgatgatttttgatcgtactataacattttaaaatattaatataacgtttaaaattttcttataacattattattagaattatattgtgagtaatttttattataataagtaaataattcgtgcttcgcgacagatgtttaaaaaaaattaaattatatacataaaataaattataacttttatttaatgatgaattgtatcaaatattaatttaatttttcatataattttgtatgaaaaataaggtatgtataaacggaccgatcctactcgtatttaccaaatcctgttactatactggaagtcagacacgccctgtataacatgatgttaggcttgatccctcaaactgttataataattgacaaatttatagaaaacttatcatatgattttaaaactgtccccatcaccatatctcacttgtaataatgacaactaagtaataaattgtatcaaatttttcatataattttgtatgaaaaataatgtatgtccaaacagaccgatccaactcgtatttaccaaatcccgttattatgatagaagctagacacgacctcttgtataacatgatgttaggcttgacccctcaaattgttataaaaattgataaatttatagaaaacttatcatatgatttcaaaaccgttcttgtcaccgtatctcacttgtagtcaacattacattcaagggtgttattgtcatatctcacttaacatgatgttaggcttaccccaatatgttcgttgtatatataaaacaaattaaataatgagttgattactcacttttataaataagtgaatctgtacaattttcttttataaaaaaaaatacatcaaataatatattaattaatgtatgatagtgtatgttgaccgaggttttcggcaactaataaaatatgaatatgataatgagctgtaagaaagcgagatgaagactttttacgtgg

SEQ ID NO: 133895 - DNA, 1814 bp, Cannabis sativa
aattcaacatatctaaacataatttaatctctgaaaacaataacaaacaacaacagcaagaacagtagctagatacaccatttcaagcaaatatttattttcttaaaactcaagaaattaaagagagagttgctcaaaggttaccttgacttagatcctcttaaatctgctagaaactacttgaagcacaaaaatcagaaccctagctggttctatagggttcgaacaagagagagtttacagagagagagagagttaacttttcaactttgtattttttttgtaaaaatgattttaatgaaatgattttttttattaataaagtatcggcataaaacataaataaaaatctgatgattaaggttaactaacttcactaaaagacaaatcaaagattggcaaaatgactattttgcccttctcacactaaaaccataaaagatcacctaggggtatatttgtcaagtctaaaatctcgactattcccgacattcccaatgtctaaaaatattgccccgctatactaagaatactaggatgtaattttaatagctaaacacctcgttccaatgctgttgagtacaaaacatgcaaaattatgaaatttctatatacgacatataaaatatagtctgaattcaaataaatcatcataaataaataattcagatctaataaacaactttcataatcaaaccctaattatctgctaatttctaaatataagctaagcggtctttacaatcgtcaaatacttgcgaggaacaaaactatacaaaatatggtacgaagttacaaatgagtcaaaactgtttgagtacacaaataatgactgggcaggtcagttgacgacatgaagaacaagtcaagatatgccttcgcacttgcatctggaatattttgggcatcaaagaaacatacaatagttgcacaatcattagcgaaagcaatttatattgcaacaacaatgactacaagccaatctatacggcttaaaagaatatttgaagacatgggagaatcacaaaaagaggctacaaagatctattattattgcaaaaattggctatagcaatggaaaataatctcgtatttcacaacaagacaaagcatatatataagcatcccactttattaggaaagcaaagctaccaaagaaattaagctcaagcactgcaagaccgaagaataattgacaaatattttcattaaggcactaccaatgagcaagtttgagctactgcgagacatgatcgagattaccgaaatgtgtaccaaggaggagtattataagttgctacgtacaattctgcaatagtaattactctagtaatttcgacacatttgtaggaaaaataaataactagagaagcctagaatatttagaagagtttagaagaaattaatcaagaaaaatctagagtaattgtgaatcatataaaattagaacaatctagataaattgttctagtcacaaacgtagggggcataaactataattaccccatcgaaattccaatagttgaaaaataaatcaagtctttcactaccaaagatactactcattcttccatttataactactcttatcaactattctccaacatccaaactaaaactacaaactataaatacaagcttactacttcctacatacaattctctcttctatgctaaactatcttcatattttaaaccaacaactactaatcaacatcattactttactatattatcacaacaaccactaaacacaatcctacatatccacctattttaaacaaaaccaatacaaatttattctcaaaccatca

SEQ ID NO: 133896 - DNA, 1553 bp, Cannabis sativa
  modified_base (58)..(64): a, c, t, g, unknown or other
  modified_base (1283)..(1303): a, c, t, g, unknown or other
tcgtgttatcaggagtagtgatgttactccagattttaatcatgtaatcactatggannnnnnntaataaagatgatgaattttttcaaaaaaaaaaaatatatatctaaaactaatgtaaattaataataaaaattaataaaattttgataattagatatgtattttaaaaataagattgtacacaaaattctaccaacatttgaattttatttcattgaaaaataattttagaagttgaaaaaattgaaaaaaagatagacacggggggagctcagtcaggctcggacatgggggccaaacttcagacaaggccctgtctgaagggcctcttgtccgagcgagctgcccacaaaacctccatccgctcacgtgctagggtgtaaccctagcctagatattttttaaaacttcaaaaaatcataactaatttaatttaaatccaaattgagttctgtaaaagcctaaattcattaatttttcaccaactttcccaaaaaaaatactttcaaaacgaaaataaaaatattttttgtagaaattttgcaatttaatccaatcatcaatcaagcacataaatcaacatgaacacattcatatgatgaaaataaatcattaccatggctctgatactagttgttggaacttgttttaccatgatttagattaacttacgtgtatgttgattataattctataatctaacattctaagtatgaatttcctaaaataataaaataaatacataagagattaagaaatccttacattgatggcaatagaataataatgactccttctattcagatctctagcctttgattcctatctgtagcagagcattatcaatatctgaacctggatcttctctccttcaatgtgtttagatacagtctttctcactatgttaggtattgctttgacatgagtgggtatactctcaattcaccataggcttcgaaatatttagaggaagaagaaggaattgaatagaagagaggctctctttgctctctatttttctatctaataaagtggtctgataataattaaaaaaaacaagagccatcttattctatttttaggattccttctagggctaggcttagaaattaaatggaattaaaaaagataaaaatggctttattgaacctccttggtcgaaaccttaatgggccttatggattttaattttgccattttattcaactcatctttcttttcacaaatgttgtattttaattctaactctgttaatgtcaattctatctatttaataattnnnnnnnnnnnnnnnnnnnnnttgtcatttaacttatttattaaaaagaccttacaaagttttttaattaataaataaaccctaaatcctctttcttctcaattaagtcattgtttagtgaaaaattcacaaacaaagacatagtcttatttagaattttaattgattaattgaaattatttaattgagactacaaaatagtagtatcctcgttagtgtggggataatggccctatgtaatcaagcttccaataagtagatccaaaattta

SEQ ID NO: 133897 - DNA, 556 bp, Cannabis sativa
acttctcttgcacttggaaaatatgatggcacgttgtaattatccaggcattttgcttcaattatattctgaaaatataatagaggtcatatgtatatgtatattcatttaattattttacaaattacaattaatatgtaatatttagttaatatgtgtagacatatgtagatatattcgattgtttggtacatcagctgacactaaagcaatacattaatgaaagtggaaattacacatttatatgtcactacaagaaatgttatttttagcacgttctgttttgtgttagcaaaagtttcaatatcaacatagatttgtcaatctcttttgtcaatacaaaaatgtgttggtaaaaataattttttttgccagcgcaatactcaacctttgccaccataaaaatgctctagcaaaagtcttaatatagttgacgaactttattaaacttgatttaatatagttgattttctagaattttcttgttgctactaagtttctagactattcttatatttactaaagtaggtgcgtctagagtcttcttgtttgttta

SEQ ID NO: 133898 - DNA, 809 bp, Cannabis sativa
ttgtaacattattttattaatattgctcttttctgctttttgtttatagctcataagcctaatccttttgtagtattgatttcccttaaacaaaaacagctgttttttttttttaaaaaaaaacgacaataatgcaaagaagccccaaattgatgtgagtgaacctggcttgcttccatattaaaacagttcttttgcaatatatttgtaatattgcaaatacattattctgttctaagtttgcaaataaaattctccccaaaattcttaagataaggatacgttcataaacaaagacacaaaagcaatagattaacataacatgccttgcaagtatgcctaagaaccccaaaagtcgtagctaagacaactctttctcgagaagtacgatataggctatagccgatttttgaaccttccaatcttggattgcatgagtgaccactattgttttagttacttagcgtgttaccaacatcaatggcattatggcaatggtcatcaaaattataaactaaaatttcaattgacaaatactttaatagtttggtttcattttcttttaaggatcaacaaataaaacggaacctcatttccttttgccttacttttgatgagaaacatgcagtgattagtacacgccacatcaatatgaattagagatttggtaaaaggcactaatagtgcttagcattttttttatgtgttaatatcgttattggttcaatttagtattgggttctttatagtttaatgtaataatttttaaggagtatcactagctaatcgcaaggcgacatgattaaggg

SEQ ID NO: 133899 - DNA, 513 bp, Cannabis sativa
  modified_base (487)..(488): a, c, t, g, unknown or other
tgcaattgtgaaaatttccctttagattatttacacaaatttccaaattttttactcttgtggttggaatttttttcaataatatcgtgtactactgtattaagttctcactgttgttctacggttgttttttagttgtttcactattgtttttaactgttttgttttgtattctactattgttttataaaaatacaatatttttgaaaaaaattctgtagcagtatttttgtaaaaattaacctaaatttataaatttccatttattttaagtggaaatcacaatatgattttttaaaactttattacaaatacatggcagatttaagtttgaacactttttataaaattagttgttttttaattttggctaattaagattttcatcccttaaactttaacatgtaccaaatcatgcattctaaatttttctggccgttaaaaattctccttgaactattgagatttaaggacttttatctaattnnattcaattttactatttcagtgatt

SEQ ID NO: 133900 - DNA, 635 bp, Cannabis sativa
cccatgtgagtgtttatgcttgatatttggccttagaggcattatggtcttttatggcatttggattattaccaaggaaatgaatttttgagataatgaaattgaaaattctggattgtcgctctctctaaccgaccctctatccctctctaaccctctcttgaaatttcaagtttaattgttgattttgggaaagaattgcttgattttggagttttgaattggaaggatcttaagcttggaattgaggtagtttctagctgagtttatttgtgatttattgttgaaattcttgctggtttatttgttgaaaagtatgttttgagttgttgtgtttgtgaagttgcatgttcttggttttgagtgttaattttggtaaattgagtgtgaagtgacatgatttggttggaatttatgttgttgagtttttagtaaggttataggatattttctagctttaaatcatgtgttagtgattgaatttgcagctggaattatgaacttgaatagattgagcttcttgtgtttaagcttgaaccttgttaagttaaagtcatgattttgtgttaaattgtgggacttgtttttggtaaattcagaggtgtttttagggtttcattgagtttaaagtttga

SEQ ID NO: 133901 - DNA, 586 bp, Cannabis sativa
tgtggctagatctaaaagttttttgtggtgttggttctaaactaagacatatagtgaaaaataaaattgcacacctgtaagtgttagtttagaactgacaacaatgcctaaaaggctcggttcaaaatcaacaccaaagaatataatttttttcacaatggaataggtgtcagttctatgaacagacactataggtataagtgtgagtccataaccgacactaaaagtgaagtttgtagtagtgtttgtcaaactccacaataacaacttcttactctagcaacctcagatcctatcggctatcaaagttcatcgtcttcttaactgcatgtccgattcattttctccatcaaagaaattcttgagtgaaattaatcaagctttgggtacaattaatcctctatttattccatcggaggtgcaagattaattactcaattcgtggcttctctcctcgatgaccgaaggaattctcacttgtgtggttgtgagttgttgtatgatttgtctcaactaagctattgccacatcaccatattattttatccttgtcattggttagttaagttagttatataaacttgac

SEQ ID NO: 133902 - DNA, 704 bp, Cannabis sativa
  modified_base (492)..(493): a, c, t, g, unknown or other
ttggatcaaattaactacccatccaacggttacagtacatcacggattgaaatccgtgtccgtacagtaacgggacgaaatccggtcccaatattattattctaatgaatattgagaaaaaatattcctgtatgtgatttttttttctttttttgaaatgttcctgtaagtgattttaaatgtagacattgactaaaaattgtaataagaagttgtaattaatactatttacaaaacaatgccatttaaatatatacataaataaataaaaatcagacaataaataacgttaccaacaaaattaatgaaacaatgaaatgaaacagttataatacctccaataatatgtatgtatttttatagcaaactcgtaataatattgaatattaatattctaaattattagaagtgatgtaaattttgtatagaaaaattgtatggtgtataatgcatgcatcttgcttattttagttatatatatatatttatatnnatatatatatatattctgatattaattttttataataatgtgtatatttatgattatttggaacattttacgaatatttgaataatttattatatattttgaaaaaaaaggagtttatgttagacaatttatatgtataaactgaaatatatgtatgtgtatataaaatgcggaataaataaatatatacactatataacttaaggatcga

SEQ ID NO: 133903 - DNA, 900 bp, Cannabis sativa
ggggggggggggggcttattctattgtggaaagcaactatttttgtaaatattttatcgttctctagtaaccattttgattgtaatataaactttaaggataatgatatgtttcatttcacttgtttttatggttctccatcctcttctgctcgttctgttacttgggatttattagacaaacttttttatacttcccctaatctgccatggctcattatgggagactttaaaagttttttggactttgatgataaaactggtagtaattattataatgtttctgatatggatcaatttgctcaatttcttcataaatttagtctttctcctcttaattttgaaggtaataaatatacttggcataatagctcgtttgtgagcgtcttgattgggctattagttctgagtcttggagggttttatttccccatgctatgttgtaccatctgcccttttatggttcagatcattgagccattaaggtggtcctgcatcctgatactaactctaatcggcctcctgggtttaaaaagtgttttcaatttgaaaacatttggcttgataatcccagtttttacactactgctcaggattcttggaagaattcttcccacctttctgacaatcaggatgctcttagtatttttttaaccaaacaagattcctgtgtctctgctttgaaatcttggcataagtctgctatgccagttttccaacctcgtatccaggatgttcaaagagagattgttaggattcagtctttaggcactaatagtagagagtctaaacttcatcttaagtatctccaatctcagcttgatgctcttctttataaagaagagatttattggaagcaaagggctcgtgtgacctggcttaaggctggggatagaaacac

SEQ ID NO: 133904 - DNA, 894 bp, Cannabis sativa
ggtaaaagttacttttaccagcgcagtagcgaactgtgctggtaaaagtaacatttcttgtagtgcggtatgttctttttcctctaatttttttattttttggtaattttaatttttaattataaattatgaataatgttaattaattaatttatttaaaaactaattaattaagtagttacatatccattattaaaaaattaaataataattgatattaatataattgtaacttattattaaaaatttacataatgttttatttgatatatatagatttttatattaattgatagtgaaaaaaaattatgtgtattattagtgattattaattttttttttgaaaaataatgattatcaatttctaagaaaaatattttaataaattaattatatattaataactaaaaaaaatctatatatttaagattaagaatgataagatcgatggatcatatatttcaataaaattttattattttttgaaaatttcatttttttttaatgatctaactttgtaaaaatttcacattcagaaaatattatagtttattatttataaactgtaaataaagattttatttgttcaataattaattagtgttttattaatttaacatttgttaaaagtataaacttttttttaataatgtatatagtttaagatttcttaagatcgcgcaacgcgcaatttttgttttctagttattttataaaaataagtttatttagaatatataaccttgtaacatttagagataaaataagaaaatacttgtttatactaaattttgtttaaatttaaatattggtacttttttttttttttttgaataaatcatgaaactttattaatagcaatcaattaaaataatagcaggtaatccaatcgag

SEQ ID NO: 133905 - DNA, 505 bp, Cannabis sativa
  modified_base (453)..(457): a, c, t, g, unknown or other
cacttgaagtttcagcaagatttagttagaaggtgaaatacatcaagcttgtggcatacaataagagagagtttatttatgcataagtcaatactttgtatttttgagatatatataatgaatcttatctcggggtttggtcccgtagataagtaacaatctgtaaggattgttgataccacgtacaaaattcttgtgcatttttatttttctgaactgtttgttttctggtttattctacagttaaagagttgtaatctgtagctacagaataactgtgtcagtaccaatattattattttataattaataaattggcaattataaaacacataattttaacaagtttaacgtatttataactctttcatgacacatttatgactaatttagtaaattcattgaaatgatatttaggatacttaaaacctaattttttcaaaattgtaggtnnnnnttttaaatatttttttttaaaaactgatttttttttattttcgaaata

SEQ ID NO: 133906 - DNA, 826 bp, Cannabis sativa
ttagggaaataattttaaggtaatgtaagtataaaaattcaaatttccctttttggttttagataaaagtgtcatattttttttagtttgaaatgtattggtttaagaataaaatattaaggatttttaagtattgaaaatcaaattttcttaaggagaggcttcgagacaatcaaaactttgatcattatttttcaataatttctttaatgttgtcgccaactctaaattatataatttaaatacaatttaaaagtttatatatgtgaaacatgatacagatctcatgttcaatttctatctgtatcaattatattgttctaacaattcatctaaaatactataatttcttgttatttttttctattatacatatatactttaaaagcccatttgaaatgtatttcccttgaatactcaccgactaccttggtttcaatacaatacgttatataatatttatatatatatatagtatagttatataattggttgaagaaatcaatatttattaatatataaaaaaccattaaatgcaccattagatttgatgcttacagatttgttttaataggtgttttgtaggagacattcaaaataatttgataaattaaaataataaagccataatataattgtttggaaacttataacaattataaattgaagaatgaaggtaatatttttaacccaccttatttttaacccacctttttttttttttaaaaaaaaaaattaaaattatctcataaaagagtaatttaatttttatagtaataattttctagtacttaaaaataggaaaattactctatatattattttt

SEQ ID NO: 133907 - DNA, 561 bp, Cannabis sativa
agggtattttaggtattaaaaagtaaaaaaagacatttgctttattattttaaaaaaaagacattaactatctatagagttagaaatagagtcatttacttacatttcgcaataataaaagagtattctagatataaaagtttcgttaaaatataaagttaatgtaactaaatttttaaaaatgaaagttacctaactaaaagaatttttttttaaaatcatttagcttaatattccctttcatagaccacaatatattaatataacgagttaaaatagtaaagtaaaaattaagaaaacaaagctctttcttcatactatgtgatcctccatatgatcaatggtcatcgtcggtgaggttggtactcctctccattgttatgcttacaggtcgatagctatcaactacaattattttagttcctccattttttttttctcttagtatttaatttctttgtgttagagattttataacaatggaagaaaatcaagatttattacaactctattgtaaaataatacaaggactaaaataagagattgattaaatatatgcta

SEQ ID NO: 133908 - DNA, 1293 bp, Cannabis sativa
atactatacgaaaggctcatgttgccaaaaggattaaatccatcagcagctaagcctaggcgaacattctgaggatctcttgcaaagtcaagatgtctgctatcaaagtctttccacgcggcgaatcaacaagatgacgcataacaccattttctctcacacgaccagtacgatgccataccatctcattggatgtatgtcttgaattgtataatcttttcaatcgaggagtcaacagaaagtaacacatcacattatgcgctactttttttctgcttgtgtcctcattaatccatctagtggtcccgcacaccgagcaaaaatcttttgaggcatgctcattgtaaaataggcaacaattgttcatgcacacgtggattgattcgtaccctaattctaattttcctaatttcttcttcgcctcatagtgtgttgcaggaattttattctccttcggaaatgcaaacttcaacaacttcaacaattcatcaaagatataatttggtatttttcccaaattttttaagtgcatcaactttgctataaagttgagggaggatatccaatcgcaaccaaactacaactttgcctcaatctcctcaaacatgccatcataatattgacccctctgtatgtcatcatcactagctctttcgtcatcatttataggagggaagaaatcttcaatgacatcaaccatctcatccgcatcaacattgatgttagcctcgacaggttcatccggctccccatggtaaatccacctctcataactgctttcgaaaccctttgtaaagatatgtgcctccacagtattcaaaggatgcaatatggtattcttgcatttaacacaaggacagaaaattcttccgtcacaatctttgtgtttagacgcaagttccataaagacttggagaccttcccagtaagctggatccttacgatttctcatggtcacctaagtcttatcgattgtcatctaccaaaaaatttacgttgaagtattgtcaaacttatttgtctgacaaaatttttatgaatttatatagaagttgaactaaaagataatttcatgtcattttataaaacattattaacttttattttaaatattattttaataattctaactatttattaattattaattcattaattattaaataaattaaatatttaattactcactatttatttttaactaaataaatttatttattatttaattatttactattattttctaaaaaatatttaaaaaaattatcttagttaattatctatttcttatta

SEQ ID NO: 133909 - DNA, 510 bp, Cannabis sativa
tggttggccacaatacgtaggcacttggcaccctatgagatgtttatgagtgctaaatttacttggagtgaggtaccacctataagtgggtaagaagtatcaggaatgatagacaagatacgacagagtatccacactgctctaatggatggagaatggtgaggatttaacaatgataataggtgaccgtatgttcttaaaggtcacttcaatatggaaatattgtttaccttaaaaggaagggcaagtaaagcatgagatatataggtccaccttcaatagcgaatatgcatgacaaattttacattttaatgtgaaaaagatatgtatccgatcccacgtagatgcttaagtatgagaatttaaaactacattaggatatgggttgtacaacatgtcagtatgcgtgataggaaaaaaggggaaacgaaaaaaaaaaagtaagagtttacccctagataagatcctatagagtgaaaattctaatagaaaagttgtgaattgggaaaa

SEQ ID NO: 133910 - DNA, 1186 bp, Cannabis sativa
aaaaaaaaaaaaaaaaaatcgtagcagatatggttcgatgggtccgatggtggttcgatgggtccgatgggtggtccgattgtataaatgggggtattttagggtttcataaaaattgtcatatcatacaaatattagttaatttgtttaggaaattttttttttaaccaaatgtaagcataaaaaattaaatttcccaatacttattccatcaatgactaactgatagcaaaaagtaaaaactgaatttttaaaagagtattgctattggacactaatggtgtctaaaacattttataggtggtatgttttctaattttttttttttttttaagttatatgagacttgatactcaattacaccactaatagcggtatcataaagaggagggtagtagatgccttttaggaattttctttgggaaggtattatttgcattccataaagttataagtacattccattttaataatttttattttatataatatatatttttaatttgtactttttttttaaaataaaaattcttcttttttatattcttaaaaaatatacttataaactaaaaataaaatatattttaaatattaaggcaaaaaattaaagtaaaaactatataaaattttattagacacaaattttaaaaaattataatttttttaaaaaaaatgtaaaaataaaacaaaactaactattgatattaaataaaaataaagtgaaaaagaaattttaaataaatattaaaagtgttttttaaaaattaatttaagttaattattttataatattggggtgcttataattttatggagtgtaaataaaatttccgtctgttgatgaccgatgtatcaaccgacgagtaaactttacgcttgtgtgaggcatcgtcgcttacactttaccagtcggttataaaccgatggataaagcctaaattccccttacccaggcaaactagatctggctctctcattctcgcaagctcgaacccaaaaactaattcagcgattttggctccccctcccctctgctcgatcttcctcgtgaaccctacctagttgggtttgggaatatgcatccaagaccgctaagaagcaaggccgacctaagcattgggcagcttgagccattgcataagggaaacttacaaaaatactggaatttgagttaaattttacaaaa

SEQ ID NO: 133911 - DNA, 1450 bp, Cannabis sativa
ttaatatgctatttttttttttttttcaataatgaattataagattcttttatttaaccattattacaattttatttttgggatggttgccaaacgttaaccttcattattaaaccaagatatttccatttttaaaagtttatctatatgaaagatgatctctggctgctatttcctggtaatgatctcaacttgtattttaaagaacttgttaagttgagaagtaatattgatatgcaggctatgattgcggctggtagttctgggaagttcaaagtgaagtaatatttatatataaaaagaaatttttttctgctttaaaatcaaaattatgcaggatcgagaaaaatgaatgtatcaattagaaaataatttttcttattcgccccatctaaaattatcttccggcttcgtccctgcaggtttattttggcacgtggtggataaaaaagataacgatatcctgaacataaggtctaggcgacatgttgcctggtgcaatttttttaatttagatctgaattttaaaacgtcatgttttctatcttttctcggcctacaaataaaagaatgatataattcgacttctggggactagagagagatagaaaataacttttagatcagaaaacatattgaagagcaagagagaagagatcccaagcaatcatcatcaagagtcattttcttattcttcttcttaattttttttatttaattatttaattatgaacacgattagtattgcgattatgtttgtcattataaattaataaatattattttttagagtgttgatgaaactctttagattatgaattaaagtttttagattattctcatatttgttcttgctatttgtttatgtagttttgtgttatcatcttgttaatgtttgatcaccattaattagcatagagattttaggtttaacatgtagtctaaaatcagacttagaattacttgcataacataagaaaattatgagattgagagattccactacttccatgagtttcatttaaagagaatcatatcgcgttagtattgcttaattaattaacattggatagagatatcttgttacctttgttagttgcaaatcgctgacatcatggacctttccatttactactacaaaataaacttttagaggcacttttttcaacttagtattaaataactgacgacatagggttggaaatatactgaagggaattttgtgcctcttttggcgtcggttatttggaaataaccgatgccaaaaggggtttaatgccctacctagccctttgtcttcctcattcgatcagccaacccagaaacccccaaactagagaaaccctaaaccctcttcgccaaccaccacaaaaaatcacccccaattcaccattttttttttttaccattttagatcatttttttctttctaaatcttctatttttcata

SEQ ID NO: 133912 - DNA, 808 bp, Cannabis sativa
tgggactatgcatggctactttgaggctagcaggggattaaggcaaggagatcctatgtcgcctttgctttttatacttggcatgggatacttatctcaaatactgagaaaagcaggggaaaaggaggagttcaaatactttgagcgatgtaaagatcttaaacttaaccccctttgttttgcagatgatgtgatcttattttgccatggagattggagcctagcccttcaaaatcagctgtctattgctgtggcatggaagatagggaaattcagcgagtggtggacatttcaggcttttgcaagcaagaagctccattcaagtaccttggtatccctatatgtgctaagaggatctcaagcaaggagtgtgaaatattggtggaaaagatgactgctagaatcagagtttggagctcaaggaacctctcatatgctggtagagttatgttaatcaattcagttatgctagctattcactaatattggagtcacggtaatttggtctgatttagtggcggtcatggagtttgtattcccctaaatgatgtggcctaagtagaggccttagaagtagggcacgaggtcggagtgatgtaaacccaccgcaggttgcccaggctgcccaagattaggaaaataggtttgcagcgatgcaaaccaggatcaatgaacaagatgatgagattcaacggttgagacagcagggtactcctgcagtccctactctagaaatatcagtggcacctggccctactatttaggccgaacatgtagctgcagtgaatcggatggaacccctgtatga

SEQ ID NO: 133913 - DNA, 1929 bp, Cannabis sativa
  modified_base (1879)..(1897): a, c, t, g, unknown or other
caaaatatgctaatattaacaagtatttttcctatttcgttcattgtataccatagcaaataaaactaatataccacactcttaaattaatatactacttttacagtttttttctcaatatattataacacataaaaaaaaaatatgccatagtacaaagtaactataccacacacttaaattaatattccattcttttattatttttttttctttatgatatatcatattacatacaaacttaaactaatattctatcgaaagtttttatttttttcttttcacaatatataccatagcaaataaaatccatataccacaaatctaaataaatatatcatagtaaaaaattaatataccacaaatttaccatagtcaaaaataaatatactaaaaacttaataaatttacgatatacctcttataagtttttatttttattttcttaatatatcataacacataataaagatgtattatagtgcaaattatcaaaaatttaaattaatatttcattcttaaactttttttttttctttctttcattcaagatataccacattatatacaattattataccttagagtaatatggatttaccatttcatagtaaagattattaatacagtaaagattatttattatggtaagaaaatcttctcttactccttctctatacatttctcagttcattatgttagatcagtagcctcaagtacacataaacaattgaacatggaatatagtgattcaaccatcttaccaacatgtagtaattatttttactgtgatatgtaatctcttgaatgaaagaaagaataaaaaaattgaactgagttgtgtaaaggaactacggtggtaacccaagggagtggaggtcggactggaagcgagagatggagattgagctttgtcggcaccaagagaagagggaggcaagactttgaaggatgagagaataagaaggggtagaacgctagggtaaaacttaagataaaactttcaaggttataattgtaaatttattgtcaaatttttgacaattgagccattttgctaaatatttgaaaaagaggccattttaaatctcaatcccttactaaatctcgccttaacaaaatgctaaacttgatctctattttaagagttagacctcacaaaattagtaaacataaattgtgcatgtgccaaactttagcggccaaaaaaagtagttagtaattagcctttagagatgaattctacccaaataactaaaagatcttattcaatatatataaatatatatatatattttaaatcatttgaaataaaataaataaataatacatttacacattcaatatctaattgcacatttataattctatacaataaaaataacaaacaaaattcataaaaatatacaatttcatcgcatacaatatatattatatgaaacctctcccaaaaaaaaaaaaaaaactacaacaaatcttacagatatattatgtaatgtgatatgtgacatagaattatcatttttaataatttaatttttttttaaaaaaataaaaacctaaaaacatgagatttagaattattattattactattttttttaatagaaaaagaataaaggaaaaacagaaagaggtacatattttatgaagtaataaaaaaataaaaaaaaataagagaattaaggagagaataaataatactaattaaagagatttttcagtatatctttcatttatatatatttttttgtttaattttctaattaggtactttttttttttaatttttgaaatgggtttgaaattttgatttttgaattttttagttatggggactagtgtctcattttaatgtgattatataaatatatatatnnnnnnnnnnnnnnnnnnntgtgcctatataactgaaattcttggtttatg

SEQ ID NO: 133914 - DNA, 725 bp, Cannabis sativa
ctatactattgtaatcaccattacattgaatacgtatttaatggagatgcaaattggtaattgattgattgtaaaaagtttgcttcaatggtgtgtcaaaaggttattcaaatttgttatatagcaaaagttgatttaaatttagatcacaatataacattgtaaaatttgtatcccaataaatatactatttttatatttatttttatgtcatttttaatattttattattaaatttagttaaaaaaaattggtaggactcttgctataagtacaatatctattgtcatagaaagaaattgagtgttcattttttttttcttttagtaaaggcacaagtaatactcttaactaggaagcttcctataaatatgtttttcttgtaaggtcctataactaggtttatatgtgtatatagggtaattaagtggtggtcaagctttttggccctacatgccctaagttgttatatgctcagtcaactcagtatcttttcttttcaactttaaagatatactttttttctttttgttttgtgtaaaccaaaataaacttgaactctagtgaccttaattagatgagaaaggttaaaaggtactaataataaaatatcgttattggtataattaagttttaagttctagataatttaaaaaattgctaaaatgtactactagtgcctagcacactctttagtgttatactgttattggtgtaattaagta

SEQ ID NO: 133915 - DNA, 1076 bp, Cannabis sativa
  modified_base (369)..(393): a, c, t, g, unknown or other
atatatatcatatatgtaagtgacctaaatagaatatcaagaacaaaagagttatagattttgctttcattctcgacaaagtgaactgtaggtttgaacgatggaaaaccggagttagcagctcggattgtctttattaaatcgactgttcatgccattctacatttgaataaattatatagtttaagtgataataaaactagtacttcatttttggaagagcaaaaattaagtaattgttctgtaactcttcatcacaatttagaagagtgtaatttaaaaaattgttatacaaattaatataggatcaaagttatcatattgatattagtgttaggttgtcaggcctaaataaaactcattttaatnnnnnnnnnnnnnnnnnnnnnnnnnaaaatcagaaatcattttatgttgcataattcacatgatttatttcatgattatgttttatgtataaattctattaagtctagaacatatgtaaatatataaatttgttcatgagtatagtatatatcgtcagcacagtgaaatataatcatgattatatattcaaaaatttaattcccatgatttttctgttcactggaattagactgacatgataatcgacgataaggtatacttacaccttggataagtgttatgtcctttctagggcattggcaaaatttactaatatcagatgtatggagtatacattggatgagaccaatattgaacttagataagatcataaacttaccgttatatatttctaagtcaatatcaatggttgatattaggtctatggatcttaatcctgatatggttaagttcaacttagttgtattatttatgttcttcaagttgtttgtggaaactaactaatggttctggcagatatttacatcttgggagcatggtagttctattgagtgggagcgctaatcatagatatgaaatttataacttctctaagtatttagaagtaaacgatgcttttcttcgagcttggctgaatagagataaaaatgattgaggcctcatttcagtaattatattagtttattggaatatcatttataggtagc

SEQ ID NO: 133916 - DNA, 753 bp, Cannabis sativa
aaggctttactagaagctaccatgacacatgcttatactttaatggaaccagaattaaacaagtcatttatttgctactctatgtagatgcacgacatgctgataatcagcaaggaaagagtcaaagttaacatggtaaagcaattcctaagttcaaagtttaagaaggaccttagagtggctactaagattttgggtatttctattgaaaagaatagaagaaaaggattccttaagttgtgtaaagaagactacatagagaaactatttgagaagtttcctatgaaggaggctaagaaaaaaattcagcctattactaatcagtaccaagtatttaagaaagactgccctactaccaagaatgagaaggaatagatgagtaaagtgtcatattctaatgttgtaaggtcagttacgtaccaaatggtgaacactagacctgatcttgctttttctataagtgtacttagtagtcatggctaatctaggaaaaaaaaattagttgttatgaaatagatttccaggtatctaattaggactattgaaactagtttgatctataaacaaacaaaaaatcctactctaatagaagtattttgtgactctaactatgttggggatagagacaccagaagatctgattctgcctattattttttaataggtggaaaatgtgtgagttggagagttcaattgtgttgtattgtggcctagaaactaagtcttagatttatgctcctaggtatatttccc

SEQ ID NO: 133917 - DNA, 637 bp, Cannabis sativa
gtaaataaatagtgtgacaatattgatagttaaaataaataatatatcaaataataatgtatgatatcataattatagcatttttgaagaatgttattataccattagagtgcttttagaagtaagagaataaaaaataatgtggaagaaagataaaataaattattatatttttaaatgatgtgaatatttctagcacctttaaaaaatattaccattgactggctctaacattttgtcatttctatccatctttgatagtcaattgtcaaataagttgtccatgtgtacaaagagtattacccacatggactagacacaatgtacacatagcataatattattagcccatgtagataaatatttaaaaaataaaaaataataaaaataaattattaaaaaaatattatttttctttcttttttcctttctttactttcttttttgcttttttctctcgtttacaaactctctctctctacttcaatgctaaactggagtcgcaccatgccacacccgtcaagcgtccccatcaacctctccttcctcactcaacaacattgtcccactctttcccactgttcatcatcgtgcaaccaggacttgtcaattgaaattgtcaaagtgaacgaagcaa

SEQ ID NO: 133918 - DNA, 979 bp, Cannabis sativa
ccaaaccgcataaaccacaaaaattgcaccgcatcgcactattttttgcggtgcggttttcgcgggtttttaattttgcggtgcgggtgcggtttgagaattttgaaaaacgcatgtgcgggttggtttgaaaaaatagtcaaaaaccgcaccaccctcaccgcaaacacctctagtatcagattaccttttgtatatgatttagaatctataatttgtataattaatttgtatatgttaattatccataattacatattaattttcgtcataaattaatgataaaattttcgttattaaatcttaaaactgtaggtgttttatttattgttaaattctcgttttattgatatattatatgtataaaatcattgagtatatgatgagaattttaagtttaaagttttagggtttttatgaaattataatttgtggtttttaattttattgtttttgatctgaaattgattatcaatatctcattatcaattgtttatgaatgttcttacatgattaatttcgtattttggctgagattggtattacaataattttttttttaagttctttaatttttggattgtattttttcataagatctattttttagctattaatagccgaaattagtagtgtagatcgactagaaatccaatcacgagcaaaacccctccttttcccgtgctttcccgtcgttttttggccagtttttcacgtcagacccgactggtctgaaatcgggtcgcgtgacccgcctccaacccggctggaagaagaagaagacttgccaaccgcgaagcccattctcggcctcggcgtgttggggcgcgtgcggcacctctgggagtcgttttttgacgtttttttccagcgtgcttaaaattaaatttcttattttcctatgatttttaataaattttttgactctattatgtagttaaaaaattattaaaaataatttttgatgatttttcgaaat

SEQ ID NO: 133919 - DNA, 1698 bp, Cannabis sativa
  modified_base (394)..(395): a, c, t, g, unknown or other
aacaataccaagcatgctcttaatattttatttttcatatttttttttagaattagaaacaaattacttaaagatcatagtatatttatattaatttttttaaaatcttttttaattttaaagttatatcgatttttttaattttttataggttgttgtgggttgttggtatatatattttgttgtagagtatatttttgttttgtagtatggtatattattatttttatatgatatttattttttattttatgtataataatggtatatcattttattcacataatacaaatattttaatgtaaatatacaattttattggcatgctacatatatttaattattatttttatatagtttaattgtgaggtatattatttattttaaataatanntaattagtttctattttattatatttaataatgatatataattttgttatcatgatatatatatattataattatgatatataatattagttagtatatatattagtaatatgttttcttttaattattattattaggatatatattttggtgaatagtatatgtattttttgttatatgatatatcatttttctaaaatgatacatttaagttatgttttctattgtacttttattaacgtgacatataattttattagcatgttatatgtatatatttatttttatttattgttattatatatatatttctattgtaattttgtaaggtatatattttttttatatggcatataagttttattgtgtagtatatcattttattttagatcatgtttagtttttattttattatatataaagattgtatataattttgtaagtatggtataattattttatggctatatataattttgttaattagtttgtgcaatttttttttatattattatattattttattttattttattttttattgtaggtatacatattttgttgtgtgatatatgtttgtttttgtgtatagtatatcatttatttaaatgatgttagtttttattttattatatataatgattatttataaattttttcgtatacttttaatagttgtatatataattttgttagcataatttatatattctttgagtattaatatattaagtttatcattattataattttttttgtggtatataatttattactacattatattaatttatattgttatatatatttatgatctaatatatttatttatttttgttacaatataaaactaaaaaatttatatcttaatttatgtaatatataatttttttaaaaaaataaaagttaatatgtagtaaatatatttttataattttattaactaattcagtatatttaacgatttaactaattaaaaatttaaatatttccgttactaaatttagaatcattttacaatttagctttatctataaacctttataaaaaggagaatagttcaatttgggcttttcatagtctatttacaaaaataacccttcttaattatttatttacctataacttaaacaacacctgttaattattcaatgacaagtgtggtaaggtgttgcatgcgtgggcttttcataactcatattaattatttatttacttataatttttaatgagataacacctgtcaactattcaatgacaagtgtggtaagttgtgttgcatgtgtgtttttttttttttttt

SEQ ID NO: 133920 - DNA, 828 bp, Cannabis sativa
  modified_base (447)..(449): a, c, t, g, unknown or other
atagtttggaaaaaaattaagcaatttacttttttacagaactcgatttcgattttatttgaattagttataaatttttgaaaatcgggaaaaatcaaggaggtgatcacccttccacgcgcgcggaaaggctactggcagcctcccagcaccgtggaaacacagcaaatcacctcccttccgcgcgggacccgctagacatcaaaaattagccatctagacatcaaaaattagccatcaccactaaaagctaattttcaccattagatcatcatcaatggtgggaagtactttatttataatttttctcctatatttttaggcctccttcacctataaaacgaaagctcccttagctcatctttcgcattcaaaaaattatccataagattagagcttctctctctagaattcgaagcttctgatacttaaacacttgctgtaatnnncatttcgtgagaaataaaaactcggagtagacatagccctattactatcgcgatatagggggtgaagtattataaatcttatgtgtctctctcgttgattacttaacaacttattaatcatctcgagaatttagtgagttgatgttggccatttttcaacgtcaacactacccattaagtgtgcaccaatctctctatatatcaattctaatctattaaaattgtgcttttcgttgatatagctattataaaacactttggctctatatactatgtgaaatctactagtaatttttttggccaatataatgttaaatgtgcgtgttcatatgaatgaatgtatatatggaagaggtttcaatggttacatttttattgt

SEQ ID NO: 133921 - DNA, 912 bp, Cannabis sativa
atattaccaaatgtgattatatatattatatgtgtgtttgtgagttactacaaggcatctttcattttcgttcaacacccacaaaatatattttaattaaattttatatatatgaaatatgatattaaattattgtgtaattgtatatatatatgcgattcatttaaaaattctctacgttattatgtagtcatgtactaatatcacgctaagattaagtttagttagaatgaataaaaatatataagaataaaaataagaataagaatgaaataaattttgaaacgcataaaaaattattaaattttttcttattttatattaaaacgatcatttattttattttaaaatgtaataattatttcattaaactaataaaaaaattattatattagaatgatatttttaattaatacattttaattaatacttaaaaatacaaccaaataaaaaaaaaaaattaataaaaaaatattttcttttcattccactccacttcattagtgcttccaaccaaacacaccatctaatataagttgtaatatcttaccaaagattatcaatttttatgtaaaaactatgagtcaatatagtacaaccccaaaatatcattatacatgcagttgatatctaagaaagttttccaatctattttataggatcacatataaatttttaaaaaaatttaaataaaattcataatactaaaaataaagttgaaaatatttaaattttattttcaacactataatatatgaaattttttaagtaactacaatatacatgtacatgtactaggagttaaaataaattacactaaaaattcctgtactaaatgtaaaaaacaaaaaaaaaaaaaaggaaaaattatatcaaaacttccttatttaaggataaatcacaaaatccaaa

SEQ ID NO: 133922 - DNA, 827 bp, Cannabis sativa
tgtgagtagatctgagatcctggtaaaataaattccaacaagatcctggtaaaataatttccaacaggtctattatttttacaatgaaccaattagttagttagtagttttagcttccttgtaaatataatttttttaagatttatcgataagttattgatagaatatcgacatattagatattgtttatcgatatttttgttagtaccgtggcttttaatttattttttaaaattttgtgtttatcaataggatatcgatatattatctatggtttatcgatgatttttgtttatgttctatttaattatgcatttatcaataggatattgacatattagctattgtttatagatagttttggttgggattgtggctttcaatttattttttgaaattttgtgtttatcgttaggatatcgacatattatctataatttatcaatgatttctatttgtgctctattttttcttaattatgcatttatcgataggaaattgacatattatctattgtttattgatggttattgttgaccttgcttttagccaacgacagtgagtcaaataataagcgattcaataatataattaaaagagaacaaaaatgataaagtaaaaagaacaccagattttaaagaggttcggcctcgtgagcgtggtaatagcctactccccttgtattattttagcttaagagaaggaaaaaagtgttcttcctctttaaaagctcttacaattgatctctgagtaactttcttagatcactattttctctctagaatctctctctgaagtaattatttcaatccctttcatagtgagac

SEQ ID NO: 133923 - DNA, 1196 bp, Cannabis sativa
  modified_base (506)..(507): a, c, t, g, unknown or other
  modified_base (1121)..(1124): a, c, t, g, unknown or other
tttttttttggggggggggggggttatatcataatgggagggaaataaaatttaagataagaaaaataaaagtttgaaatttaagatgcgggaaatgaaattttaaatctgaaatgcgtgaattgaagcatgggaattgccgaaggtttaaaattgtcggctatactacaggcggcgatttaaaactgtcgcctatagtatagccgacaaccattggcaactcccttttacaaatacacgggatttcttaaggcatgtttaaaaacggtcgcctatacatcctgacagtttaaaattgtcaggaataccatatttttcctgaaggtttagcgacggttaatttccccaaaacaaacattttcagaactgtcgcgaatatccctttttgtagtagtggcatcatcagcgagtgtcctggtccgtgagtctgaaagctcgtatatgttcccggagactctgatactttagctgatgtggagacttcgctcaaagaggagttggttaanntagttatttctaactaacttaataatcttgtttcctctagccatcgactttaggatcttgattctaaacctataaataccaccttgacttgttatttcataagacgaaattaaaaactaagttcagatgagattgagagtttgagagaaaaaatattgggaggtagaaagagaggtgcaaagaaaattaagagagagattaagtttggaattgtaagaagaatcttctatagatgaagaagattcttgggtgtaagtgcgagagttgaaacacttaatgaaatctcaatagagaatctcgtctcaattgttttatacctattcttgctcaatcaataaagaaagattttagtggtgttccaaaattggagtagagtcatagatcacattgatctatcaaacttgagccagtatatatcttggtgttgatttctttaatttttttgcatttattgtttctggttttttgtactctgtttgcctctcttttacttccgattgttgttctcgtcttgttaatcttgtcaatgctaatcgtttgattgttttaaaaaagtttaatttttttgattctacattattagtcataattttcacaatatatatatatatatnnnnattctatataaagtgtggctatgtaacagaattcttggtttaacgatatttttttacgttaactttaacaga

SEQ ID NO: 133924 - DNA, 1079 bp, Cannabis sativa
tgtgagtagatctaagatcctggtaaaataatttccaacaataaggtatgctagcccaagtttgctggtaggattagattcttgagtataaccactcggaacaaagctgctttgattaaaaatgtatatggtccattgcaacaaagataaacaatatatgagtgaagtgggtccataatgtctatttaaagaataaggattggtagagttacaaggcttcaattcataacagttgatattggaggaagttagtggacatcaaagatgaggtgagtcatctaatggacttaatcaatttacattggggctatatcaaatagttggtggatataaaatgctcaattgaattcaagatatggtccaatggagcaaacaagtatggttaagacttaacagccctaatcatagttttatgctttggattgcagtgcagaatagactggaaacaagagaaagattatacaattttcatattgtaaatgatgcaccatatactctctacaataatattggtgaaatggtcactcatttcttttttggttatcaatttttttgttttgcctcgcctaatatttatgctgactctgccattggcatactttcgattggataaataaaaaaatatgagtttttattataacaatctgagcagatgtgtaatatccctatattatggtctttataatttgtattgaaaatataacactcaagttaatttttttcttagaaaacactctagttagtttatactacaatctgagcaacatattaagttttatgggtatttatatattaggttatgaaaattttacacttcacacattattttttatttaattatcaaaaattacttgttcaagtattaataatatttttatttgtttgagtatgtttcaatactcttatttatatatttttttttcctttctcttacactactccttttctctctttcgtatttgtctcttgttgtgaaaattatatttctttataattgcgcaagtgtacacaatcacaaacaagtaatacaatgataagtaatcaaagttcgtctccacagggactttttactaaataat

SEQ ID NO: 133925 - DNA, 545 bp, Cannabis sativa
ttttttttttttaatttggccaaggagatatcaaaccttgtaatcattagaaagaaagcctaaaaaaaagtcttttataataaggcttcatgaacaacaagtacattaattcatttgtttattataaatatacaagagaaaaactaaaaaaattacccccccaagaaaaagggtaagaagaaaaaaccttccatgcaaaggtagttatcattatttggtgaggaaatagaaaagggtagaatgttggtgaagttataataaggatgggtcttaattaatgtccaaacccaaagtttaaattacttaaacctagctattactacatgtattttggggtgaggtggggcataccttttttaatctttcagtaaacgaaattggattatttttcaatatctgttattttgtacagtacagaaaacgcagtcgtatctacaaccaactactttgattatatatattaatgttcttatatatatattgggacacgattttgtgccgtgatgtactttcacagaatgtattccgtggtacattagatgggt

SEQ ID NO: 133926 - DNA, 544 bp, Cannabis sativa
  modified_base (40)..(56): a, c, t, g, unknown or other
aatacatataaaaagaggtatgtttcaaataaatataaannnnnnnnnnnnnnnnnttaattgattaataaaaggggtatttttcaacttaccccccctaattttctctttttagaatgtaattcagcccaacaaaggagcccagcccacagccaaaccggcccactttctcctcacaaagagacaacctcgccacgtggcgggctgtgattcgagcactagaaggaaagcaggagtagcaacacccttgtctcctcacacgcctcccgcgcgcgtaaagcgcacggaccctcctggtccgtgtgtttcatccactcgccagcctcgagagtggtgcttccctctctccgcgccccatcagcccaaagctactttccacgtggctttccctcctctttgccacgtgtccacatgcaattagtgagaaagtgacacgtagcagatccaaattaagttatttcaatagcaaaaatacccacgtacaatttgtaataagtttaattgtgcattagtcattttacccttctataaatagaagcttagg

SEQ ID NO: 133927 - DNA, 522 bp, Cannabis sativa
aataacttttcataagaaaattattttcaatctttctccatatttctactttatcattcttttatctcttaaaaacatatttttctttcttctaacaagaatcaaatctaaatttgagttatatattacatatcagagaagaggaattatagtaaaatggtaaacaaacagtatatattaactataccatgatcttttttttttttttaaaaaaaaaaaattaaattacatttcatttattcttcttcattcacataaaactcatttctaacaacaaaagaaattcactaatttgattttgttttaatgtttttaaattttttttaaccaacaagttagaaaacgaaataattaaaagttttagtcaaaagcttaatcaaaattaaaattatgaatttagtttataagtctttttgttgcccctaattttgtccaatgtacgtggaccaaccagacaaggacacgtggatcaagcaatttacaatatttgctaagtctttatgccgtaaggcagcgtccagg

SEQ ID NO: 133928 - DNA, 503 bp, Cannabis sativa
ttattctatggcaggaaattctctcaaaaatcatctgtagatctgataggagaaaaaccttatatggaatcaaaattggttcttcgaccccgccaatttcataccttatgtttgctgatgacacgatcttgttttgtcgtgctaatgaagggaaagcaaatgagctcatgaattgcatctctttatatgagaaatggtctggccatgcttgtagtaagtcgaaatctagtgtactgttctcaaacaatctaagcagtagttgaaggaactcttcattgaagtttttggacatcaagcaagtgactggtgatgagaaacatcttataaaatccatttttctttaagggctcatttggtacgttgtataagggtcgtatggtattaaataataaataatattatgtttcgattaagtaatatattgtattaactattacgactaaattttttaatacaatgtatgttgtattatttaatacataataaattgtccgtattagctt

SEQ ID NO: 133929 - DNA, 1098 bp, Cannabis sativa
gggcataaaacccaacactatttgggaatggaagtaaaaggaaaagatgtttcatcaaaaatgacatctcttgagatgtataatcggccagaagagtctaagcacttgtaccctttatgatttagactataccctaagaaagtacatggagaggacctaaattgaagcttatggttattataaggtcttatgttgggaaaacatttgcagccaaatgtttttagggtagtgtaatcaggtgaaagattgaattagcttctctataggttttttttttgttgaaagataggtgtaggtaatctgttggaaaggtagacagaggttctaaaagcttcatcctaatatttaagtggcatagacgcttgtgcaagtagggtaaggccattttcaacaacatgtatatgtttcctttcaactaagccattttgttcatgtatagtgggacatggatgcctataaattcccctccccaatcagtttgaaggcatttgatctttttatcaagttgtaattcagtttctgttttgaattgcaagaatcttttcaaagcctcaaacttgtttttgagcatataaatccatgtgaatctagaataggcatcaataaaatggatgtaatatttttagccattgacagaggttgttttggcaggaccccacaagtcagcaacaattaattatattggttcattatatataaactgtaagggaagactttggaaatgttagcctgtggatcttgcctaaacaacacgctgaacaaactattaaggaatttttattactaacagtgatattacaagtttgaacaacatatttaaaaatcttttctgatggatggccacctctattgtgccatagatcatactcagagagtttagacctgttacagtgagtacaattggaagaatttgactcagtgttgcgtgacagggaggttgttaaggtacatgggacaacagctggtgtggttggttgcacatgaaactgagatggcttaaaaatatagaggccatgatggtgtatcccagcgagaagggtgtcttttttgtcctgatccttaacaaaacacttgtcagcatgaaactcaaaaaagaca

SEQ ID NO: 133930 - DNA, 801 bp, Cannabis sativa
  modified_base (196)..(196): a, c, t, g, unknown or other
aattactactcaagcttgatttttttaaaaacttttgcacatcagttaaattatcatatttgctaatgtttggaaagataaatgtacccttgacttatgtatttgtaaaggtgtgagagttttgttgaggggaaaatattgatggttatgtacaagtgatgatgagaaaaaaattattattcccttagaatgaatntttgtaagttgtaagtattttattaaaaaaaatcaatgaaaaatcttttaactccatttttagcatctttaatgtgacaaaaatattttatattttattatacaattttggctgaggtatttaaagtggttttcatatttcgtgtatttgactgttatattaattaatttatttttggaagaaaagttgtctagcttttttatttatgaaaaatatggtaagaaaagataagtttggtgattcatccctattctatctattcacctgtgttaatctgatgttgtgtgagtttcttattatctttgatcagatttctttaggagaaaatcgaagttaaactttccttttctataaaaggaaagtcgcagttactgttcatgattctttaggtacagaattgaaaattcctgggctgattgatgatctattttagggaattgtatagtgagttgtgatcttgttcagaccgtgtgtgagctgtcattaaggtgtatattgattataaatacaccttatagcagctaggtttgacatctctttcatacgctttgaattgtattcatatcatttcaaaatttgctaactacttttaaaattaaatgtta

SEQ ID NO: 133931 - DNA, 1230 bp, Cannabis sativa
ctatttatggtgataagctcacctgggataatcaccgatctgggcagaatcatgtcaaatttgtgcttgacaaaggattagtaaatggggtgtggcttaggcttttcccgaaagttgccctatgctcctctctgacttacaactctgaccatagacctctttgcattttctctagcagccaggaagaaaaatttaaaagtagctttaagtttgaagtaggttggactagggatgaaagaagcaagttggtggttgactatgcctggaagtcggttattcactcttgggcccccgctaggattttcaagaagatgggggctactcgggtcgctcttttgcattggaatagatctcaatttggtaaagttgacactttaattaaggagttggaaaagaagcttgatcgaatccagcggctcccgacgggtatgagggtttgggacaccgaatgtgctattcgtcggtctctcaatgaggcttgggagcgaaatgagttatactggaaacagagggccaaggtttcttggctcaaggaggggataaatgctcgaagtttttcttcctttctgcggctatcaaagggagacagaatgctattgaaagtatcttgaataaagatgacatttggatttctagacgggatctaatcggtaatgaatttattgacttcttcaagggaattttctcgggtacaagcgtcggtaatgatttcaacagcaactacctgattaaagataggatctctattgctgaccaagctgacctggttcattctcttactcatgaggaaatctgtagtactctgttttccatgagtaacaataaggctccgggaccagatgggatgtccgttcttttcttcaagcactattgggaaactgtgggtatggaattttgcgatgcagtgtctgatttttttcagacaggaagaatgcataagggtgtcaatgctacgaatattgtgcttatccccaaggttcagaatccgaaaagaaccaaccattacaggcatatctccctgtgtaacgttatgtataaggtcatctctaaaatcattgccaatagagttaagccccttcttccttcccttatctgtcctacccaagcagcttttgtcccaggaaggaacattcagggcaataatgtgattatccaagaaatcatccactccttcaacaggaaaaaaggaaaagaaggtttctttgccataaaaattgaccttatgaaagc

SEQ ID NO: 133932 - DNA, 725 bp, Cannabis sativa
aatgtggcagtgattacatgggacttgcatgccctagcctttcaaagacacaccattaaaaaattgcatcttatgttaatgaagaagatgttataactatattactatcatgtctttgttttaaagtataaaacactcaaaatggtgtccaataatatattttcatgaacttgtgatataaacttgttatatcaaatggtaaattaacttttcttatgaattttgataatactaatcaaaacaccacataaaataagaaggacgatatattatatatcattatagttcttttacatgtgcactattggtcactttagagcatgtagcatctaaggatattaaaattttacacattatttaaaaaatataatattttattttattttttttccacattaatttttgtactcttacttctaacaatactctaatgtatatactttttaaaaatactataattataatctcaaacattaatacatattttaatttttaggtacaataactttttaacttcaattttttattaaaaaataaaaaatagcattaatggtacaacataacatccatgcaaatttatttagaatgacatcctttgttctccaatagtatagcactttattggagaacattgtcccacatggattaaatgtaaaagtattgagccatacataagaacatgagctactccactcattgctaataggttttgagatggaacccca

SEQ ID NO: 133933 - DNA, 516 bp, Cannabis sativa
ttaaggttatatatatatttttaggtttgatttgatgtactttaattttttttataattaacaaccgttatatcaaataacataattgttatattcatttataccctaacttaaaggtacaattcaaatataaatcaaagtctagtggagaataataaatatggcctaaaaatagaaatgtgcaatatatacaaactcataaaaataaaacagagagagagagaagagaatcattaattatcaataaaataatgagcaatgaatgagttattagaagactattatattttgtttaaataatattatccaaattggtatcacatcacatcatcgttcaataataattaaaaagaaatactgagagatttgttattataaaatgtacataaacatatattgagagatttgttatactattttttttaggttaattagaatttttgtcccctgaattttgacatgtactaaattatgtcttctgaacttttaagatcgttaaaaataccccctgaacta

SEQ ID NO: 133934 - DNA, 1238 bp, Cannabis sativa
gcgttggccagctctgtcacactcactccagcgtctcatacaagccaaaaaagaaaaaagaaaaaaaaaaacagaattacaaatcagaaaaaggaaaaaaagaaaaaaaaaattagagtttcacaatgtcatagtgttaaattctgtaaaaataattaaccagtgttggctaaataaaaaatgttatagaagtgtcaaatattggctaataataatattcaatatattaataacactactcctattttaaataaaagatgtaaaacatctttggaaacttttaataaaaacagaatacctatttttagaaaataataaaattgtataatattggacataccgtattatagtaagtaaggtactaaaatggtatattctttattatataataactactaataaaagttttttaatagaaaaacaaaaatgaagttggaatacatgggctacctatacagattacaatatcataagcatattcggatcttttgttttgcacattctttgttgaaaatgaccaaagctttattatcccacctaaactaaattgtctggctttatatttttaaacaacatgtgtttcagcaatgataaggataaaaacaaggtagataataatgaaataatgttttcctagtttgtcatgtaccaaaaatgttttattcatgattatacaaagatacaagctttttaagggattacatttgacgtggaaagatgtattgtgtttaatgataaaattataatgtcaataaattataccaaagtggtaaaacctgtttttagggtttttttaactgtaagatgtttttttttgttgaaagcatttattcggggacgccgcaagatgcagatcatacgatcagtgcatcccacaaacgtaagatgttgctgtctcttcttcttttaagtttctttatctttcaagtatcgatgcacaacaagatgtaggggagcttccccactcccaatttttttttcagttttgattttgtttcaatattttatttatttttctcctatctattttaaaaaaaatttacattttgatctttctagaaatatatattatatatgtatattttttaaaaccatcgcctatagtatagggcacggtttacaatcgtcgcctatgttgaccaaaagtcaatcactcacttattttgatgataaacaaatgtttgattattatttgttgctaatcttttcttgaccattttgcaagcaaattcacaaag

SEQ ID NO: 133935 - DNA, 663 bp, Cannabis sativa
ccagcaccggcaggtctctcccttccacgcgcgggtgaggcacacggcctcaccctggctgagcgtgcgtctcaagccatgccccgcgactgggcattgtctggtccgattctcttcagccattaagagtcaaaattgcttcagccaatcaaatagcgacacatggcagtagtttaccacatccaccaaacttgtcactccgattttaattattggtatttatatttttacccacatgcaatttgtaataagtttaactgcatattagtccttttacccttcttttaatagaagtttaggattttagaattcaataccgtttcagagtttcagatagaaaaatctagagaaaacgctcgaagcggccgtattaatttaccgtttttttagttaattttcttatgggtttctaagttctcttattattaaggcggatgataaaacctagtgtatttaattaagtatttatttttattttgattctaagtacaatatatgcctatgattttcgcttcttaaaataatttctttcatctttaatatcatgtattttttatggtaagaaattattaatgcttggttctatattttataaaaaaaataatattctttgattttttgtatttacattaaattgtttcacatttaatgcttagaagttat

SEQ ID NO: 133936 - DNA, 767 bp, Cannabis sativa
gcctctaaaggtaaattttcaataggcgggtattttcagaccctttagcttccctttttataaaatgggttcaaaaaagggaagctaaagccttattttgtagtagtgttaatggaggcttatatcatatgtaattgaaaagtctagcaaagaagataggatatatatataaggaacaagcaaggtttccataataagtgcaaaaaatatgtcattttaattcaaagacttctattttaatcataaacaagtttctttctcaagtcttgctttattatgtggtgtaaaatgaggtcttagcatagtatcaaaattctaacattttgatcggtgatttgtcataattcaagtggttacatatacttttattttactcggaacatcagattttatttattttttaatctgaatctaactagtaacgaaaattacaatattaatgaagcggcaaaataaacttaattaaatatgtaactactcacatatatagctacataaatatcatcaaaacataatagatgcaccaaattaacacgtacagcaaagaaaaccattattattgctgaaataaaaaagttccactgtacgttgatttacttggatgaaaatcctatagttaataattattattcattacttctattttgtaccacacacaatatatatttatagggtaaatctatagtaggcaagtttgtttttaccctatgctatagggaactaaattgaaccaataaaaatttaaaaaaataggttgcattgatgtt

SEQ ID NO: 133937 - DNA, 648 bp, Cannabis sativa
aaaaaaaatgtatggttaccataaaaatataattattgagtagtcacccatataaatatatatattaatttatattattttaatatcttttcaatgaatattattaatgagtggtaaagatgtaattgaaaaatatggtatttattgtaggctaaaatttagcacatactattttttgtgctaaatttgatataatgtttaatttaggttgaattcggcacacattttactattattagaggtaagttttaataaaatattataaaaaagtgacaatatatcacatctataactctccattagaataatctaataaatggaaatatgttaatgtattaatcttgagattttttttattggtgcttaaaattttcctttgttatattcttattggtgtaataactatcgggtcttatataaaaaatagcttttaagaatattactaaccaattgtaaaacgagacttataaaaagtattgagtactactgtgtccaattataatactctttgtacactaaaaatacaaatataaaactttttgtggagagccgttgcaggtacattaccaacttgtgtccaactagtgatcaagcatgtcgatatttcagtcacttgccctgtttgtactctacaacctgaaaccatca

SEQ ID NO: 133938 - DNA, 1079 bp, Cannabis sativa
ttttttttttttttttttatagcttaagaataattgttttctattaatttaatattattttaggtgtataaatatttacatgtttgatattcttttgcagatttcattcattggcattagacaaatcattttatgattcaagtgtgactaattaattgttatataagtattctaaactcttgtaaatattcttttttcgttgatgtttatttcaatgtctttgtaactgaagtttcataatactggtgtttgtgttgtatttgttaatttttgtgtttattaaagaatactattgcattgttggttgtttaaaaaatatattcacattttattttgggacatatgtaatatttataatttataatatattttgttttgataatagaataaatttgtttatatatatagtaaggtaaaagttgtgtaaatatattttaaataatttatatctataaaattgaaaatggaaatagttaaaaaaaacgaaatatattttttttttaacaatgccaaatgacacttttatatcaattattaatacattttttttttcaatttcttttatcaaatcagttaatttattgttttaaatgtatataaaaaatcagtaatttagtaacatttttgttaaatgtcactaatattttagtaacaattttaaaatgtcactaaaattattttaaatataaaaaataaatatataaattctttattcgtgacaaaatattattaaagtaaactatttagtaacattttatctattctcacattggtatatcttacattttttataaatgttacaaaagtgttactaaaattgtacaattatgacattttgaagtgttaccttatatcattttgaggtggccacatgttaaatcagtacgtcaaacaatttaataaacattatcaattaattaacatgttatactgccacatagaaatatgagatttgttgaaaaatacttcttttatttatcaattagggaactaagccgcgcttcgcgcggtattgtcaaatatttctaattttttttatatatattttacttttttagtgagtgatacaatctaaaata

SEQ ID NO: 133939 - DNA, 503 bp, Cannabis sativa
ttttatttagggcataaaaccctgagtttagaaactctgccattttcctttgtcatgactgttaaagaaattgattccaacaatattcaattatgagctgtcagtggagaatgtccgtacgaatgagagaatcccaggattgatttgcaatcattttgtaatcattatctttctaacaaacttttccgttgcacttttattcctacacgtgtaatgcctatattggcccctgtttttcctctttattattctctactactacttaatgaaatgcttatcaactcactcaattgagctgagttttcctctcttaaatttctctcgtatatcatcactatgagttcatgcgatttcacagtccgtaatgtttgctttctgaactgcataatgtatatctttcatcctacttattctaagcttcatgaaattttttgccctaactcgagaaaatttcaaactttctgagttttgacttttcgctgaacattcttattctttaatct

SEQ ID NO: 133940 - DNA, 1420 bp, Cannabis sativa
atctagatcctggtaaaatagttccaacactaagccacctaggtccttggtcttcaaagttatggacctatctctgagtccaactattgagccaagttagcgagctttgactaatcaggaaatttttcactaagatttttctcaaacctctcatagtagttttcttccaaagattattaacctcactagattgttgaagtaccgatctcacctacccgggttgttttctatatcgatgtcaacctcacgtcaactaataattttccaagagaatatcaacctcttaaccgaattattgtagtgataatctcactcaaatcgagttgtttataaaaatagtgtcaacctcacttataacttgttcagatatcagtgccaacttcaccttaatacaatggaaatgagattttggaatgcaaggcaaactctctctaaaatagtgaaatacaatttagaatctaaagagaatagcaagcacactaaagaaaataatgacaagtttggctcaaatatgtgtgattggagtgtttataaaaaaattaataaaatgtagggttatgtatgtgataactctatggtatagagttatagagttattttttatgcttttaaactgaaattattgtgagaagagtactgaaaatgtgtttgtttgcttaattttaattagttttagtttcattttctatttagtaagctaacttttaagttttgtaaaaattattatgttaattgtgtttttttaattaaatattgtttgtttgttgtgggaaagaagaattaacttgctagaaaaaagaaaatgatgcagaggaaaagttggaacaaaagctaaaaactagaaggaaatgttgaagcaatgctatagcattctgggcagtttgggaagtgacgtggaaaaagtctaaaaaacgaatttcacttatccacatcagcaagtatgtaccagtcactcaaagtacgccagctggctgctgtgaaaggaagaaaactaaatatagtgggccaagattggagaggattgggcttctatttttagggtgtcattttgtaccctatttactcaacaataaaaacacatctaagtacaccttcttcttgaggatgatggcagctgccatttttgaagggaattaattgcagaaagtacggagaagaaggaaagagaagggggacccaagtgcaagaaaaaaagaaggacacaagcttttgtgtttgcattttttttgcccttttcttatatattccttttcttttctttcttgtctttaaatactagaaacttgatagttgtaaaaaaaaaggcagcacccatggatgaacaatttcgagtttggattgtatttttttttatttgaacgtgagctaattttcttaaggcttgaatgttgggttttgtgccctaaataaaacccattac

SEQ ID NO: 133941 - DNA, 629 bp, Cannabis sativa
atttattagatttgaccattttcttaattttattttttaaaaagtggacatttactaacttagttaccaaattgagggtcattttgcatctcaatcctttgactatctcggtgggggctttatatattgtttaatagttgcaagtactttttattactggtttttacagaaaagtactgaatttggatggcagttttatatttatacagccacacaaatttttttataaaaatattgtcctcaccttaattttttttcatactgtacacaccctaaaacacataagaagtctccattttcaacacttatagtccgaaccaccagagcatgcaacactagaacagctgaaaaaaaaaaacaaatactatactttaataaatcttttgcgagtagggacttccataacatcacgagaggaaactttcaacttggaaaatttccccttaccttaaatacataaaaaaataaattaaaataaccgttaaaaaatacaaaaatcaagtatataatactaaacaccgaataggacatacaaaataaaaaaacatataaaatttaagaaaatcagagtgatgaacaaaatcctaaattgatatctgaaattgaacatacacaaaaaaaaaaaaaaa

SEQ ID NO: 133942 - DNA, 1106 bp, Cannabis sativa
actactttacaagacaataatactataatatcagtaaaacacgataaattaaaatcatattatacgtaataatataaatattacattactagaaaaaaaaaagttacattcttgacaaaaaaaaaaaatacattaaattaaattaaacctaaaatacacacttgaaaagatttgttaaattattataattctgcgagttaccatgtgtcgagacagaaatttagccaactcgttcatatttatagacgagataaaagtcgtaaagagcatacacaagaatttatagtagttcactccccatgtcgcgatgggtaatggagctacgtctaattcgagtttttatttctcacaagaattaaaaaaaaataattaagtctgcaaagtctaatttctagagagagatactttgaccttatgggtacttttttcaatatgaaaaatgagttagaggacatcctctttcataggacaggggtcctattaaaataataataaaatattctaaaaaatataaaaaaaaaaatacatttaggctatttttgaccgttgatgatgatttaatggtgaaactgactacagaggtcagtcgtcaatttctgaaacttgaatcgcatctacgggattcacttcgggtaacttgtggcttaaattcgtaactttcttgagggtgaaattcggagttaccaactttagaattacgattggagcgtgagacatgacttgatagagtattgaaataactttgaaatgcaagttgaatcatgtcaatggaatcaatattgagtgagttatgactgttttactgaaggttgttcagggaccagtgtccaggttgacatatgacgtcaacctggatgctgggtgagtgggaaaatgttttgggatttattttttgatgcctaagtaatattttgacatcacttagctagtttctatgttctggtaaagctgttcaccagttctcagagatgttgttttacgaaatcaaaggacttgaaactccctgatttgcaagtaagtcactttgccgaaaaagtgaaaatatgaagttgtcatttgacttgtctgatttcaaagctctaagttactatgaaaaactagacaaa

SEQ ID NO: 133943 - DNA, 1294 bp, Cannabis sativa
tgttgaggtgttagagagtgagagagaaagagcctataaaaatataaatgatgaatatgtggttcacatatgctggaatccaataatactttattcattaatgatctttgaattttcacttcatttgtcacatttcctttatcaggtcgaacttattgacattgacaataattttactaataaaatatcggaataaatataggaaattttataattttatgtactttatactacttaattatattatatgtactcttcaacttggatactattccagttaagttattgtctagtttggtaacgaagatttttgtttaataaaatgatttttaatttcaaaaaaaaaaatattatatgtatttacttaaaagaaatcataaaaatttatttacaatttattatacattttattaattatgagaaacatattttcttttcaaaaaagaatatatctttaattttatatataaactatatataataaaaataaataataaatatatataaaaaataaatagtaaacatacatattttatttataaatttgtattttataaattttaataaatacataatatcaacatatcatcacaaatattatcataaaaattatattaaattaataattaataaacatggtcaataataatataaacataatgtttatatataaggtcacatttaattacaaattttgtttattttttaaacatatttttcaataattaataagcataagtgttacattttaaattatttataaccttttaataaataaaaaaaaagtgtttattcaaataaataaaaaaaattaagttttttatttttaaaattattatgactttttcataaacaaattatattatttttataataaacatactaaattattaatagcattataaacattactattattaattgaatatttaataaacatctatacattgtttataaaatataaataaaattttgtaaatatatttgtatattctttttttttttaatttcgtattaaattttagtaaatatattattttagtaatatatcgaaacataaatattaatttttatatttatatatttaatgtttattattttttttagaaaatcaattgaaagtaatcaacaagttaaaatcgtaaatatatatttgtaaatattcataaaattatattaaattatataattatgtaattattttttttacatatttttttttgtaatattacacatttacttatatatatataaaaaaaagggaattaccccatttactatttttttaattttt

SEQ ID NO: 133944 - DNA, 635 bp, Cannabis sativa
atggactaaatttgtacaaattataaaggggtataaattttgatataggttgtattattagggtcaaaaattgaaatttcccttataaaatagttttttttttctctttaactaaaaaaaacccaatgtttcaattgtttattttacactaaaagcagtctcgtcagtttctttattttattaaaattttaattttttatttgatatatttctttattatttttctttatatatcatttaaatatatttttatttatataaacaaaaaaaattaaaaaatagaaatgtgaaagagaaattattaaaatattgtttgaagcataaatattacttctttatatgtaaaaatgcactaattataatataaaactttgagctattttagcttatttgatagagctttgttttaacaaaatttctttatattttaccttttgaattattttagctaattttatgtgtgttctaaaacacacaaggtcaggaaagctagacccgtacttagggcctaccgttcactcatattaagaacttaaataaaaaatattttttaaaaatatatatatatattttaggaaaattctataatgcaccccttaaaagggatacatcgatacatctctatttgttttagt

SEQ ID NO: 133945 - DNA, 838 bp, Cannabis sativa
  modified_base (41)..(67): a, c, t, g, unknown or other
atgcaacataaaatgcgatttctgatctttattagtaaatnnnnnnnnnnnnnnnnnnnnnnnnnnnagggcacaaaacccaacagttatgactccatgctacattgattttctataaacttagaaaatatagggttttcaattaagattataggtgttgccctagtttattctcaaaatacgtggccactcggtgtatgacatgtggaaaaagaagacacctcacccggagattagttaaaggtcgtatagaagaggcaacacgtatggttcagggagttagctcctggataagtgtaaaaggaatgccttcttcttcggtagttaagatatagtaaggcacctccgggacgagagcgatctagtcgaacagtcacctcgcatttaatgtagcatgggaaaagcgtctgggaacgcccataagaggacgtgtcaaacatcgtaagcctgatttagggcgattacacgataatcaaaggggctagtaatggctccattatgaagaatcacatcaataaaggaagggtgaaggctaatctcacctaacctctacgatacatactatgtaggtaatgcatgccccattttgtatcttttgggaacttgtgcttatccttagctggctctcaaagacaagctaccccttttcgactattcccaccaatctctataaatacccctgaaaaatgagaaaggagatcggaaaaaaaggagagagaaaaacacacaaagaacattctctgtaaggaaactgtaatatcctgaaaaaatatattgatattttaattggacatattttattaaatatgtgattaagtgggcattagagtaggattat

SEQ ID NO: 133946 - DNA, 1465 bp, Cannabis sativa
gaaggtcaattgtttctcttagggcctcgacttccacggtctgcctgatcgggggcacatcgtgcatgtcgtccataatctcgaccttgcaaattgctgacaacaaggctgcccttcgacaaacctaccgttttttggcctctaaatgcccttttagggccctgttcgttttcttctccctctacatatcgagaaggtcaggaagaattgccttcttggggaaggtaaactccaccgagggaaccctaggcagggccatccgaggttggcctagcctcacttgcaggtcgtggcactagggatggacccctgttttacaggatgacaccttaagcctctgcctttttctagaacaactgccaaaaaatgctttgtaagaacctgctcactccattatagattaatttcaccaaccaaaagttgacacagtatcgaaaaaaggtcattgtttaaccctaaaattttcaaagacaacaagattgaaaccaacgtcaatgaggcaaattcacccttgcgactccctattaatctctatagcaaagaaatggagaagaaaacttaccagttggcggtagatggtggggtttggcagttttggtgcaacgtccttgacaaaagaatcagtgtctgaatgtaatggcaataaagtcttgtgcgacaggcaagaattggaactcaagagctctggttcgacatggaaagtgaagagtggaacgattgctgaaggtatttatgggatacttagaaggggtgccttccataagaagcagatgcttcagtttgctcgcccaaaaggcatctgacgattggatgagcaaggagctcagaaggtatctcacctcttaacaactgactcccatcattacatgcatcgaagagagtactcactgttgttttaagcttcccacagagcacgcgaccattatgcgcgtaaaacctataagtcagcatttaatatcctgacatggaaacagaagaaattatgcctccctaataatgacacttcagtttggtgactgatgacgtagtgcattaaaggacttgccatgagtcccgcgtatgcaaaaatctcttgagagaagatgttgtaagatcaatattggtcccaatccaatgtatactccacacatccaatactagcatactttgccaatgtcctagaaagaacataacacttaggggtgagcaatagtcggtttggtcggtttcttacacacaaaaaaatccaaaattgagttttcagttttcatggttataatccaaaaatcgatcgatcattatacaaatgtaaaaaaccaactattttaatccacaatttggtcggtttaaaccgaccaaaccaaacttcattttttaaaaaaagaaataagtctttaaattttctataattatttgaaattaaaaaaattagagtattgtatcaaatatcatataatttaagaataaaactttcttagttaaataa

SEQ ID NO: 133947 - DNA, 1275 bp, Cannabis sativa
acataaatttgagcaatgataaaataagatttaatatgtttgatgaaaagagttttatctacactacctctttgataatgatgagaaattaaaaaataagttaacctttcataccaggcacgaggagcttgtttcagaccatacaaagctttttcaagtttatacacatggtctggaaactgaggatcttcaaatccttttggtttctcaacataaacttagtcactcataatgccattcaaaaaggtcaacttcacatccatttggtacaatttgatatcaataatacaagcaatgcaccagagtaaatgaatagattctaatcttgctacaggagcaaaagtttcatcaaagtcaatgccttctacctgtgtatacccttgtgccactaatcgagccttgttcctcacaattgtatagaattcatcacttttattttttaagatcccctttgttccaatcacattgatactttttggtcttcgaaccaaatccaaaccttattgcagacaaactgattaagtttctcttgcattgcattgagccattcttcaaaagtcatggcttcctacacattttcggttcaaattgtgagacaaaacaaagaaagctaatcaaattaacataccttttttcttgttaccatgttttcttgaagatttctaagaatgagatctttaggatgattcaattttactctagtgcttggttccttttggatagaatcagtaatgatatttggttgaatcgagataggctgttctggttctcctacatcagttgcagcggtagattcgtcttttgtgtctttagaattcaatcctgctgcatcagaatctacattttctccttctagtagggtatcgagaaaaattatctatctcgacttttgtagaaaattctaaaaaacctttaaaatcataaacaaccacattagctgattccaaaacagtttgagttctcatgttgtaaacacgatagggtttactatttaaggaatatccaataaaaacaccaatatcacttttagtatcaaattttctaatatgctcacgtatagaaacatagcaaacacatccaaagacataaaaatgacttatatttggacgcttacctttccagatttcataggatatttttgaggtacttggacgaataaacactctatttattgtatagcaagctgtgtctatagcttctacccacaacctttttgttagcttcttgctatttaacatcactcttgcgatctcctacaatgttcgattcttcctc

SEQ ID NO: 133948 - DNA, 634 bp, Cannabis sativa
gtagtagtagcacaaaagaatttttcactaaaatttttgtaagaaaataatgaaaaacattagtggtagtaagtggaagggtcccacaacaacacaaggaacgaattatcaaaaagaaacacatgcatggtcccgatcccgaagatgagtgcaccacatctcggatgccccctcacccctccaaatgtcaagttttttttatttttaaaatgaaatacaaacaattaattatctcatttcatatcaatcaaaccactcttattttcctcaaaggccctataaattaagccactctctcattctcttacatagtaagcattgaaaactcaaatctatttagattttcgtttcgttgacttaacactcctactattcacagaatccattaatggcggctctaagaaccttgcttacgaggaaacccagtcctactggaaatgctacggacaatattaaatattgtagtatggcattgaagaagcttttttcaacccaatccgttacggagtcctcctcttcttcgtttgctcaacgactcagagatcttccaaaagatctccccggaaccaatatcaaaaaggaagtttctcaagtaagaacaatcaaaatccccttctttctccataaaaaaaaa

SEQ ID NO: 133949 - DNA, 988 bp, Cannabis sativa
aaaaaaaaagaaagaaacttgtgtggtgtgtggtgtgtgtgtgtcccacattactcatgtatgagtaattttgtgttatctagatctgatccaattatatattggatatattcacctaatttatccaacatccattggatgttggaatggactgaatatatccattagatgtatttcatataaacctattggtttatttcagatttgtccaatattttagacttagtattttttggatcggatcatatcaatctaatattttagatctagtatttattagattggattgtattggatctatccagtgtaaaaaaaaaatattaatgttaatttttatatatacatataacaacataaaatctaggagttcttacagataaatctcatctttttcgttattgtttatatttttactcatatttttttttttacatttttactgtactaagtttttaaaaatacaatcttaaaaaaaagtttttaaaaatactatcttaaagttttaaaattataaaaatactgtattttagtaaaacaaaaaaaaaaaaaacaattaagacagctaaaaaacaaatgtagaacaccttaacaataatattaaacaactataaaacaacaaaaagacaattacaaagtaacagaaaaataacaagacatcgtcccagttacaatatgcaaaataatatctacttctcaatatgtatttgtattacgaaataaaaaatagtaaaaatgaaaatagggtataaatagaataagtgtaaaaaattctttgccacaatataattgtaaagtttgaaaaaaaaaatacaatattttatgtaaaaacttctaaaatctagttacttatccaaactaaatgaaaatacttattagtttgattagaaattagatgcatttgatttttaaatactctactcaacatctgatcgtatctaattgaatagtaaaaattaattacccaaaatatgagaaaattttaagagtt

SEQ ID NO: 133950 - DNA, 589 bp, Cannabis sativa
tctctctctctctctctctaactaagtcttattgtctccacccaaagtcccaaaattcatgaactcaaccaccctgaaacccctgaaatccccatcgctggagttctcaacttgtttattttttgcattttttttagtttttgacgatatcgtgaaacaccgctaaatgtcgctatatcacgaaatgtcgctaaatgtctctaattcacaatatcactaacacatcactaaatatcgcaaaattatactcaagtttttacgatgattagcgatgtgttgtaccttttttagtctcatataaaaaatacatcgctaaatatcgctaaatacgtaaaacatcgctaaattttatccctaatcttaaatttagtttatcattgcaaataaatcattaaatatcgtaaaaatctggaaaactaaaagaaagaaacactgaaaacgagagaggccatgagagacgacgacgggggcttgtgactggagttctaggtctctgcatgtgttcgacgacaggggttctgttggtaccaaaagtggtacgttttatatttatcaactcgcaagggcacaaatctttattgtagtatgg

SEQ ID NO: 133951 - DNA, 898 bp, Cannabis sativa
gacgtactcgtgtataagagccttcactctgtgggtgtaagggcccaatgaaggcttgaagcggggacgttacaaaggtagattcttaacatttataattttatgtataactaatttatttatttatttggataattgtagtctatatatctcaaaatattcctattaattttcataatttactctttcaattcttttcattaattttataattatctctactacttcaatttttctatcatggagtatttaatcaagttaatttgtagaatctaagaatcttttataactaataatttatttgtttatttggataattgtagtctatatatctcaaactattcctattaattttcataatttactctttcaatttttttcattaatttcataattatctctactacttcaatttttcaatcatggagtatttaatcaagttaatttgtagaatatgagaatcttttataactaagaaaaatagaaaattagtaagtatttttatttatgagagaaagttgtataaattgcttcttttttaatttttttaataattttgaatgtagtgacaattacaaataaaatacgaagatgacaacaagtttgaatatagtggcaaccataaatgaaatacgatgacgatattggctttgattgtagtgacgactacaagtgaatacggtgatgactacaaatgagatacggtagtgataaaaatttaaatttgtttcatcacatgacataacttttgtggtttgtagtgttcaacacatttctattaaactacaacaaaaaattggcattttacataaatgtatacattttcttaaataattacaaaaaatgtgcaaaaaaatacaattttaaaaatgtacacatttgaaaacatatttacaaa

SEQ ID NO: 133952 - DNA, 1256 bp, Cannabis sativa
  modified_base (1162)..(1165): a, c, t, g, unknown or other
acattgagattattgcttaatgctcattatatgttagtctaattcagagatgattagataacatgtgatttagggcctaaaagatctgaaaagagttaggttaattcttataatgtgtcattcacattaagaaagagagtagtaattagcattaacaattgggtaattaaatcaacatgattcttttccctaatttgtcatctttgattaaatctttttattcctgaattttattttattgtatttcttaattttattgtcataaaaattattggttagccaaatagaaacataagttttatttaatggtattcagttcaatttcctgtgggatcgacctcacctatgtgagtactacttgattacgtacccttgtgtagttaaatatatttttcctaacactaggccaacaattttttaaaatttttggagaacggcggtcgactaatagcagcaattttgagggtttttatattgcctttttacttgtattgaggtataaatcactttaatatatgtcttttagctttaattacatttttttgtgtgtgtattttttttaagcgtgtgtgatagggttaggatacccgcagtggtggtaagaaaatccacgtttgttattggaaaatcaatatcggtactcagaaatttggtggtagttatttaaaaatcaagtatatttctaacctttaatttaaatcgaaaataatgttatttattgattttttttgttgaaccctattaatattatatataaatgtaggattaagtgagtttaaagttcaaaaataatagtttgattttagggtgttgtggtatttagggctcgacagtgtcggtgttaaacggtggctttgacttagggttaaaatatcaatttttttagaaaacaaacacctatgtcttaactgaagacatacgggccgggatacctatgtcaccataataaccgaagacatgggtaagcaggtggaggttactcaaaaatctttcttggtgagaagaattttctaggtgtgttattatcgtattggttcatttcttgatgcttcggttgaagccaatccaagctatatttggcgcagtatgatagaagcaaaacaactagctcttgttggtgctagaagaactttggtgattgttgtggacattgtcccacatnnnntaaatggtagagaattgagccatacataagaacatgggctactccactcattgtcaattggttttgagatggaaccttatgattctcaaca

SEQ ID NO: 133953 - DNA, 1334 bp, Cannabis sativa
  modified_base (530)..(545): a, c, t, g, unknown or other
ggcataaaacccaacaaaaacagctatggaacaacccgaaaaacaatattagaaaaatcatgacagcccaatattaatggttttaatgtttctgcttgatctcgctggatttaatggttgttttctggttgtaccttctggtgttgcagtggtggttctattctatccgtgggtgtggaagatggagacttcgttttttattttcggtgtttacaatataaaagaaaaaaatgccaaggtagtaaaaatctaatttttgtcgtgtggcagtataaatgtaaacattcgcctaaaatctattatttttgtaaaaactcatattttattttagcaacctagtccatttaaatattaaaattatttaggcttcctatattcatctaagcctgattgcaaacatataggctcatacaagacaaataatttaaatgggctctatcatgttactaggtttatcacatatgaaaaaaattacaaaatttacatgttacaaattatttatttgatttattgacaattggactatgatnnnnnnnnnnnnnnnngatctatcaacaagttaatcatagcaatttaaatcaaataaataataggttgaattaaatatttaaacaaacaaacaaacaaacaaacaatgtaacaataactggaaagttaattaagataattctattttaaaataaaatatttaaaaaatattttaacttgaattcaaattaggttgttagaaaatatttaaaaaaattattaaaatctaacaaactcctaaaatatcttaaaatcaaatttaaaattcaaatatctaactaatttttaaatatctagtttatttaaatttaatttaaattaattaaataactaataagataatataacataatatcttaatttaaaaattgagatattttaaatattatatttcaaatcttataatttaacaaaataaacaaatttgaaaaataggatgtttttatggttaagatattataaatattatttaataataaataaaataaaatgtcctaaatttaaaaaatttaatggttagaaaactctaaaatatctattcaaacaaaattaaccaacttttcaaaaatttcatgttattttaataaaaatatataaattttaattaaaacaaatatttgatagaatgtcaaaaaactaacatttatctaatcttataattcaaattaataaaatatattttaaaagtaacaaattttgaaaatctaatatttatggttagcaatttgaaacttatctagattatttttaagttttattaatattttaatgtcaaaataagatcatttcaaattttattaataaaa

SEQ ID NO: 133954 - DNA, 527 bp, Cannabis sativa
aagaagatgttaaacaaggcaaagagaaggcttctcagctattcaagctctttgaaaaataccttaatgaccatcctgatgcatacaacaactaaaacatgttgaatttcatctcacaatatgtgtttctcaagttccctatgtgtcatctttcttctaataagagtgtgagagttgctacttatcaaatgtattcttttgggggcaaaataaaatctaaaaatgttacaaaattctaaaataacaaatagagattggctgcacattatcgttgaaagttgtttctctttttttctatgaagatgtttttgaaaactaatcaatggctactccttagaagacaaagtttcagtggaaaaacttggctataaaataacaatcaaattgtaacgaacaagtcactttgttgtctaatcaaggcccgccttgaggctaagcgggctaggcgtgcgcctcgggccccctaacgctcagaatttgtgaaaaaaaaaatattaatatatagataaaatattaaataataataa

SEQ ID NO: 133955 - DNA, 750 bp, Cannabis sativa
cggcatgctaaataccatgttgcggcacctgggttcaaaacccagaaaaccagcagcagaattcaaatttttagcctccaatcaacaccaaatcatcccaaattacaaccaaacctccaaaccatcaaatagggttgctagcaaaatattagggagcaaaaattcacaactcaagcattaaattcaccaattaaacacatcaaaaattcagattaagcaacataaacacaagctcaacactttgagcaaaattcctccatgaacacatatacaagagctagaattcaagaataatctttacaccaatttcacacctgcaaagattaactaaggaatcattctaactcataatttcaaataatatcacaacccaaaatcacccacaataaccttcaagcatgatcaaaaatataatatcataaaaacactaaaatccaaacacatgcatatcaagagaacatatatcaatctcatgattttctttcaaacaaatcccagccaaaacctcaattaaactagttaaagaaactacctaaagtattgcaagatccttcttgagtttccacactccaaaggtagcaaaaatcaaactttcaaccaaatcaagacttagaaaaaattagagtttaagagaataaaagagagggagagagggtcggcaagagagagagaaagaccagaaattaatccatttttttttccaaaaaatttatctttatcaatcacagaaaataaaggtcaaatgaccaa

SEQ ID NO: 133956 - DNA, 595 bp, Cannabis sativa
aggaaccgcttcgatggccgctaagaagacgatcaatattatgcttttaaaagtcagtttatacaaaaaaaaaaaaattatattgaagcttgatgtattgaagacatgtgctttatttttctagtttgaaaagaatttagattttttttttcttttgattttaaaagaagaacgttaaagaagaaaaaaaaaaattagttcagatttataatgttttgttttattttgtagaagaagacgaaaaatagagaaaaaagataaaaaaataaataaataattttaatgaattttaaataatttatttattttagcttttaattaaaattattatttagacttataacatttagacatgtggtaattttgaataacttaacggactagttaaaataaagactaatagacttacaagaaaaatgaacttagggactattgtcactatttttaaaggttgagaattaatctgcatcacagtaaatttttgtaggacttttgttataatatcccaataagcctaatggtaaataatagggtttatatttatattatgagttaatcaggtaatgagtgagattatgatcctactaatttattt

SEQ ID NO: 133957 - DNA, 769 bp, Cannabis sativa
aaagggtattttcgtcatgatcctctttttgaaaagacgcatgtcctttgatttttgcagttgtacgatttcaaggtacatcagcattaaatgaccatctttttcacttccgtttcgaattgtgtccgtaggatcaaacatttctctgatctgacgaagtcgatatcgtgagtataatgtaaggaaaaaggaaccaccttttatattatttcctccattctagaaagcctgaaaatttcttaatcttttttgctaagaatcaccatcgaatttgcctgaggacttgcatgctattcctgtccttgacattttttctacgagtttccttcaacttcatcttctcaaagcgatccttgctacattcgaagatttgcagacggagcatccagtcatttccccaagccctaactccaaacggttgttgctttcttcctttacatgcttgttacattgtgtttatttgctgcttaaatttgtttgtatcgttgccatctcatctagttttggtagtttttagggttaaactgtatttaggtccatactagtgttcaggcaatacataggttttcttcagaatctccaactcaccatcttcgggtttgataaaattcgttccagggatggggacttctttctgcttacatcaatgtcccactctagttcatgaatttattgtccaaaagatttagaatttgagttccctacaaaatcaaccatcccgtatagacccaacccttcaaaacccacctccaaattagagttgaacgat

SEQ ID NO: 133958 - DNA, 504 bp, Cannabis sativa
ttttatatttttaaattttattgttttaaaaattcgtgtttagaatgtttaaaaatatactagtaaatctaggtcctggtaaaatataattcagcactgtgatcctatgactcaataataattgtattgtagcatgatatacatgatgattcatggcaattatatttataaacaattcaaaataacttatatatgtttaacatattcccagagggtttcgaagtatgttatatgtctatatattatatatagctagcttagcttgaaattaagcttgctgtgaagcttttcaacttatttggaacgttgataaatgttgaatgagatcaagaagaagataaaacacaagttacaacgaaccgatttaatccttatatatggaatttttatcttattatgaatataatatatattatatatatttatattgtaacgaccgtcgaacaccatctatttctctattggaatgatatttttcgctttgagccaagccctcacggattt

SEQ ID NO: 133959 - DNA, 853 bp, Cannabis sativa
  modified_base (42)..(49): a, c, t, g, unknown or other
tgaggtctaattggattggatcgggtgatgattttccaaatnnnnnnnntaattggattggatcggatgaggagaaaaaagttggattggatcgtatgtccacccctaatttttaggctcaactgagtaacgacatgactagaaattatttttaaaatttaagggtagagagagaaataagaaagagagaaagaagaaagacagaaaatgtataaacgagggtattgaaacatacccaaataaacaagtccttttttacaattaaatcaaaaataaggtttcaagtgtaacatgccctatttattttaacttattttgttatggaattggttttgtttatatttatacctctgtttttttggaattgatttccactttttttttttattattttaaatataatcaatttctgagcattatgtgttatttgtttttactcactttattgtagaactaattctgttttttatttatgtttcactgtctaaggaactgattttctcttagtttttttaattataatcgggttttgagttattatgtgttatttatttttacttattttattgtggaacataactattttagtttatgtctgagacatctaacttcggtgacgataaaaactcatatgactttttcgatgatgatgacatctccgataactttttcagcgatgatgacttttttgttgacatttccagcgtcgatgcctcctctggcaagttttttagcgatatttcttattaaaaattttaggctaattaggattgtttccccccgaactttgacatgtaccaaattatgcttcatgaatttttaaggtcgttaaaaatgcctcctgaactattga

SEQ ID NO: 133960 - DNA, 963 bp, Cannabis sativa
tggagtacatgcatacacaatattgagaattttcatcaaagtgttaaaatgtatagaatttttaagaaaattttaagggatgtcagaggtatatggaagactattttgtaaaaaattattaaaaaaagactattgtgtaaagtgataataaaaagggtaaatattattttggaccttgtgttttgtaaaagtaattaattggattttctattttgttaaatgaccaaatagaccttatattttcttaaatagtaaaaatagtaccctgaactcaatttttaactattttatttttgtaatataaccaactttaagacaatttctaatacgaacagatacaaaaatataatatgttttgttataacatctctagatcagattattattaagttttattttaacaaaatatcagcttagtacaattttagaaaatagaaggtctattttagcatttaacaaaatagatggtctaattaataacttttataaaatacatgattcaaaatagtatttatcttaataaaagtatgactatagtgtgaaatatcccataacattaatattggatattgattattattaatatattttaattaaatatatgttaaggcgttgataataaatttttattattcaatttttacggattcccattttaattgaattttaaagagtcctaaaaaaaaccaactgtctttataattacaactataaaaaaacccactcataaaacggtggcgtgtacattgcttgccttattcggctatacatagtacacacaccaccaagttgaattcatgttccataaatgttgctatagaggagaggtcaagaagagctgtctttcttctttttcagttatactagttggaacaacacgtgcgtagcacgtgtaatctttttgaaagtaaatatataatttttattaatgtgctaaatcagttaaaagataagattcttcct

SEQ ID NO: 133961 - DNA, 680 bp, Cannabis sativa
aatggtttgataagtattgaacaggaagtgagggatcggtatgtcaaagtgcagagaaattattccctatttttgcagcagaaatctaagtgtgcctggatacagaatggagactcaaatacagccttattccatgcaaatatcaagcaaagaatccgacaaaatcaaattttttcaatagaacaataggatggagcaagagttcataagcctcaaaaaattacagatgcttttatatcttactataaagctttgttgggaactaaactagaaggaaggaagaaagtatcaagcagaattgtaggcagaggccttactctctctcaaagccaagcataaatgctcacaaagaagtgcactagggaggaggtgaagaagctgtgtttggaattcctggaaacaaatcacctggccctgatgcttactcaagctttttcttccaagataattgggaggtgatttgagaggaagtttttcaagctgttacatccttcttggaaacaggtagaatacttaaagagataaattctacagttcttactatagtgcctaaaatgacatgtccaaacactattgaagactttagaccaatagcttgttgtaatgttgtgtacaaaattgcaaccaagctattgtgctctaggcttaaagtgattcttcctgatttagtttcccaaaac

SEQ ID NO: 133962 - DNA, 511 bp, Cannabis sativa
ttattttactattgtaattatttattaaatataaatatgataaattattttattatatatttatgatatatattattttattttatagtttaattatttttattattcttttttatattttggtgggaattatttattgttttatatatttttattttaatttaagttttttttttaaaataaaataaataaaatagtctagtctattattaaaccaaacacaaaattacattcagcacaatataatcttgcccacttcagtccaatccaattaaactcttttcagtctaatcctaagttccaaatgggcgcatactttttaagcttaatttttgataataaatgataaaattaatttttttagcgaaacacctgttaattattaaaaaagtaatttacagtaaactcccttttattttatcatacacttagggttcatttgatacgtcgtattgtattgtattaatgttatttaatacaatactatatttggtattgacttttattaata

SEQ ID NO: 133963 - DNA, 867 bp, Cannabis sativa
ctaaaattttaaacatgaagccttatttttgcacgtggtgcttgttattggccccccaaatatttaatcctagctccgcccctgcgtaaaagacatcaaaactataaaaaaatattgcaaaaaatatataataatactatcatatatacttcaaaaactataattataacatgaggaaaacaaattaaatatactttgtgaaattcaaaattaatgccataagagaaacaaaatctaagaaaagatttcacagtagaagatcttttctttaatttgttacgttgtctagtttttttaagtgcccctaatttacatttattgttgagaaatagttgtgcttgtatttatgtaaatgaatattttccatcattcatttatgtaaggtcaccaatgcaaagtactcttataattgcaatggtggacccatttaatattttaaaccaataaaaaatttcttaaaattacgtaacttaccagtatctactacaatctcacaaaattttcactctctctcatccacctctcacccacttttgatcccactctctttctttcaaactaccctcatttaacatgccctaattaatttcattataaggatcatcattcaagaaaaataataagcaaagaaaaaaagttggtttttggttgttaaatgggtaaacataacatcagtgtgtacgattgtattatgaggatttcatttcgttttatttgtgtggcagctgattcccaacttagtactgcccttaattatttttgtcaaattagtctccttaattgttttttttttagtttttttaggaaaaaattctcaaccacatatataatttggtttgaaagaacaattacaaccgcaccacttac

SEQ ID NO: 133964 - DNA, 1376 bp, Cannabis sativa
aagatcttctatagatgatttgcatctagtagggataaatttaccgttctaccatttaatatattatatctttaaaacacttagcttcttataaatgatattttagtaaattagtataattactgaaataaaaactcttctatttatgtttattaagccaggttctaaggaaattattgtttcacttctaaatagttatagaagttatagatttcatatctatgattagcgctcctactcaactgcaccactatattttcaagatataagtattggatcgattcaaatggtcagctttaacgaacaagtcaaaaaatatatgtaatacttttaagctagaatctaaccatctcaagattaagatcttttaatctaagatcaactaagtaacattgacttagaaaagacataacagtaagtttatgatatctttttcactgtcaatatcggtccagtccgatgtatagccaatacatccggcactagtatactttgctaatgccctgaaaagattattccacatatcattatgtacgtaaattttatcgctgattatcatgttagtttaaattcagtacactgacaaatcatgcatgagactaaataatttgaaacatataatcactattactttctaatgtgatgacactattgtaattgtgagtaactatatattttagatttaataaaatttgtatattaaaactataacgccctaataattaggcacactacgattatccgataaacatgactacttcccgctaaactgggattacaaaaaaataagagcagaatttaaactttaaattatttacagaatgaaaatataatttgtaactatttaaattttacaaactattcaaaatattacatgcatttcgggatcccgtaaaaattttcacaaaacattacaagttacttttatatgtcgacctaaacggtaaaattcgagaacacataatacaccaactggtagatccaacccacgtggtgtaatatggcccgagcatgcacaatccaccgccaagccttcaaactcatggctgatcacaaactgatttactatttcctgcaccgtagagcacccatgagtcaagtccaacaagacagtataaataacaataagataattatgataataattacactttataccgtacgctactgcgtatatactatgccactgcactttgtttcacattattccatatataatgatgctactgtaatgaaggtctatattgcataatctacgtgttacattcacatgtctattaatgtctatgtagcatagacccacgtgttacactcacatgtctattaatgtctatatagcatagacccacgtgttacgctcacacgtctattaatgt

SEQ ID NO: 133965 - DNA, 1605 bp, Cannabis sativa
  modified_base (26)..(29): a, c, t, g, unknown or other
  modified_base (60)..(67): a, c, t, g, unknown or other
ttaatttcattgttttagaaattcannnnaggatgttaataaaacatacttgttagtaannnnnnnncctggtaaaacatatttcaacaacggcatgtacgagtgacacgtgtctgtcattccttgcacttgggcggagagatatactgaacagacttcaagcaacatgtctgcacacacaaagtctgtctggccaaacagagcagaaggcaaattatccaagcaaagaatgaagttagttcaccaagtcgtgtgtcaagacttgaccacttcaaaatggtatcgtgaagcccaagcacaaaggcaatccctacaatcatgggattgtattagagggatatggcaggctgtctcaatcccccatttcatgtattctaaatatgtaatgaatttatttaccaattatagatattgtaattaaaaggaaaaccttccctcatgcatttagcccaataaatagtgatctagcttcacaagaaaagggatcgaaagaattgctttacacagagatctaagagaaaaacattcagagatttgattgtgagagctttgagagaggaaacattgtgttctttgttctcaagtcaatacaatctaaggagagtacgctattactgaactaaaaggatcaaacctctataaaacttggtgttctttatcgcttattgatttttgctttattttattacatttttgatcgcttattaattgactcactatcgttggctaaaagcgaggtcaacattatggtgctttcattgagagcaaaaatccaagtttattctttgtcttaaaattcaacagacacatagaatggtggtgcaaattcgtagaggcttagttgatcagagtgacccattgctgacagagcctgccatgtaaacccctgggaatacaagggtcccaccaggaacaaatcctgagcagcctaaaacacagccacctattgtgggccaaggtgtggcttcccctctagatgggatcacactaggtgtgcaagagactgagaatatcagttctgtagctcatcaaagcactcttaacactggaatcccatccacaaccaatgctcagacgacggtaggggacgacactgagattcaaaacctccgtaatgcccttgggctcatgcaaggtcacactaacaccttccttcatgataaggaggatctccatgctgcaataaaccttgcattcaaagagcagcgatgctagttcattgagtggagggatagagagatggaaacattaaaggctcaacaagaagccattgatgaccgaaaaaggtaggatattgttatcccaatttttgcactctgacgtggcatcgcataatggtgacacgtggagtcaacttggagtatcttctcagagcaaacagtccgagcagcatgcctcgctggcatgcccagagcaaagcaatcagtaatccgcgcagagcaaccaacacttagcaaattcagctttcgcattgtgagtcatcaatgaaatccctataaactttgggatctgattacagggatatgacatacacacgatcccacgatcagtgtattctgcatcaatcccatgatctttgtactcagcattaatcccacgatcttt

SEQ ID NO: 133966 - DNA, 608 bp, Cannabis sativa
tagtataaattaaaatttaatatagtattatataaaaatatgatatataatacaatacgacctaatacgacgttccaaacgagctctaaaattgaaattactgtattaggattaccctaatgttaattgattgaccattatcgaccgcaaagcaacaccctattttttgttaaaataaaatttaataataatttgatctaaaggtgttatgtcaaagttgtttacatttttctgtatttgttcatgttaggaattatcttcaagttggttatattaaaaaaaattgtcaaaatttaagctcaatgtactgtttttaccattttggaaaatacagggtccattttattatttaacaaaacaaatagtcaaatcggtaacttttacaaaacacaaggtccaaaatagtatttacccttgaaataatagtatttgcataatgataaagcttcaatggttgatcaagtgatcaattttatgtctttgaagatattttaggattaattgaaatgaagaaaagcacctccaacaaagagcagggcaattaacatttgctgagtattaggttatttttagtattaattttagattaagtttagtatatttttaat

SEQ ID NO: 133967 - DNA, 1263 bp, Cannabis sativa
tgaaatctcaaagcatagtgaaacttaaagccttctggtgatattagtattacccctgcacccgaaccctgctcgttcgatgtaccatccacgtataacttccaagtttccgcttctcggtgtacatgcgggatttcttccggagttataccttctacgaagaagtcggccaaggcttggcccttgatggatgttcgagggtgatacgttatgtcgaatgccccagttcgattgaccatttaatcaatcttcttgaagcatctagttttgataaaacttgtctcaaggctaattgtctagctaggtgggctagattaatcgaagagtctaatgtttggactgatgttattctctcttgtgctactgctagcatgttagcagatatgcctaactggtagtttgtaattgatgtattctttcacaaaaaatatatttttcaatgattttgagagatatagtaaaaacaattgatataaatttattaatttattttttttttctgtagattttgaccatgtttagtaaattttcaatatggtaatgattaatttttaaatatagtgacaattacaagtaaatatgatattcatcatattttgagtagatttaggactataagtgaaataatatagtgattgataataattttgaatattgtgccaaccataattgagataagttaataataacgattttgaatataataatgactatgagtaaaatacgattataacagcgattttaattttttttttctctttcaatttacatagctaaattattatttttgacttaattatattgtaacatttttattcacactctataaaattgtggtatgtagtattcaacacatttttaagaaaccatatcaaagaatcatgatttttttttttgttagacagctacaaagttttttaattcaaatatttaacgggttttgaaattgaatttttatttattttgttgactaaataaattttggtttgatgtgtttgctttttattaatcaacataagaaaacagagaattaaagttaacaacatttaatagatactaatttaagtttttattttattatatttaattttcacaaatttttatttattaataataatttaataaatataaaataaaattaataaatgattttaaaaaaaatgaaatatctaataaatatttaaaataacacggagaacggtatgttgcctaattatgtaaagggtaaattgcagcataaatacctaatgtttcagattttat

SEQ ID NO: 133968 - DNA, 716 bp, Cannabis sativa
  modified_base (675)..(686): a, c, t, g, unknown or other
atttttttcactatatgggtgatttattaattatatcttacccaattaagtataaattttatgatctcacaatatctttgatatttggttaaatgaataaaaaacaaccaattttttttaattttttggatatttctgttaacctttatttatttatatttttatatttctatataatatggatatttattatagaacttttatttttatttttatttttttaaaaaaaagtcccatatagcttaaaatgtgattagtgttagacttgtaacctatatataatttatatatatcactcattcttctttttattgtataagtgattaattacttaatctttacccaattaaatgttggtataataaataaataaattaaagaaaacaaccaaaattttaaattttaaatatatagtttagtcaccatttgaagtcttttttaaaaaaataaaaaataaaatatattagccatgtaggacaaaatataaaagaatggtcacaacttagtaaccggaataattttgaagaatatttagtacgataatggtttaatgacataattttttcagtaataattaagaaaaaataaacatatttattcttataataatttaagttgtagaaccataaatttaatgaggcttttttatatttacactttaaaatagtttttttnnnnnnnnnnnnttttatgaaattctacatagaaactcctat

SEQ ID NO: 133969 - DNA, 604 bp, Cannabis sativa
ttattgattgtgtttgcagaatcaatggtggagatttcttggagagatttaaggggaagaagattatgttcataggtgattctattagtctcaatcattggcaatcttttttgtgtttgcttcattcggctttgccttttggttccaccattattaatacacaacaaaatggctatgtttcctttctatttaaggtaataattatttatatatatatatatatatttacttaatcccatatattaaattacattaattaacgtatgtatatacatggtgatggtgatgatggtggtaaatagtactatagaaaaaattacactgtatattcattatattttgtttgttttaatttttacttttatttttatatttttttagatataccaatttttatagatgatgtctccattatactttttcttaattaagttaatataatttttatattgtgctatttttgtaaattaatttttattatgtcataattttttagatttacatccctctaatttattgaggaaattacactctataccattttaatattgtcctcttttatttttaccatttttttaaattctattatttttacctctttttt

SEQ ID NO: 133970 - DNA, 898 bp, Cannabis sativa
  modified_base (696)..(700): a, c, t, g, unknown or other
tttatgccataaaaaagtaaactataccctcaattcccatatttatgaaaattccctttttttttccaaagcatgtgatgcaatggtgataagtctaggttcattatcaactctatttctcgcttccacacttaatttcatccaaagattagaacataaaatgacaatgataacaaaaataatattaatttttttttttttgattttaaatatcaaatttaatattattatttattttataattctatatattttttttattttaagtcattttatgtctataaatagaagctcattttagtagtgaatgctgtaattattagtgtagaaaaattatagcaaaattactatccatttttcttttcattttttttcgttagaaattttgtaagaatgattagcatatttttaagttctttatctatctatactactatatatgttattctatactaaatatatgtagacttagtcatactcttattatatatttttatttagtgattatagtaatgatagtattgttcaagttctatctttatgttaatttttttttttactttttgttaaataatatataaattaagtcatgctctctatatgtgtaaaaattaataaaataatattaatatatatttctttcactatcgttatcaccaccatctctatctcttttgttaacgcagattttcgttnnnnnaatttgagcctcacagtagtaattttacacagaaaaataaaagctatagaactaaagatatgagcacagggttttttacgtggttttgcagttaaaattctgcattagtccacatgtcaatcttattcaaatttctgattgtttttttaggaactctctccttagagttttttcgtcttgcctgccactatttataat

SEQ ID NO: 133971 - DNA, 630 bp, Cannabis sativa
  modified_base (26)..(50): a, c, t, g, unknown or other
  modified_base (586)..(601): a, c, t, g, unknown or other
tgggtgactttttatttatatttaannnnnnnnnnnnnnnnnnnnnnnnnataataaaataataaaataaaaatctattctatattattatctttttaaaagttattctttacactttttcaatttttttacgttattaattttatgtatttttttttaccattttatagataataattaatattttaatttatttaagcatgtaaattttaatataattttttgtcaaatatttaaaatatattttattctttacgtaatatttttcttgtattttaattcaaaaaaaatatatatttttcttgtatttaggtttctttgtttgtttgtgacgaaaaaaatgaaataaaaaaaagtatctttgtttcttgaatttcaaaagtgcttgagcaactcaccaataattgtgtgaaattgattcgatctggtcaacaatattgtacatatatataatatacattgtggttgaattaattttgcctaactagctaattaaatattatacaattatttatatctatctgttatatataaagtttgcttagataacaaaattcttagcttatgagaaatttatgggtgactnnnnnnnnnnnnnnnnaataaaatagtttattattaaaaataaaa

SEQ ID NO: 133972 - DNA, 751 bp, Cannabis sativa
aagtttatctgttttaattttgcacactaggttttcttctccccttttaatgtactctttaggttgttatgtactctttaggttgttccacacacacacacatatatatatatatatatcatcttctagttctccatttaagaaagcaatagttacatccatttgctctacctctaaatcaaactgtgtaggcataaccaacattattctcattattttatacttcactataggtgagaatatctctatataatctaccccttccttttggctaaaacctatagccacaagtcttgccttgtaccttgttggatcacctggtttgatccttttcttgtgcttgaacaaccattttacaagcaatcacattctttccagcatgtctttttaccactttctaggttctatttttccttatagaactcatctcttcatccattgcctttaaccatttcccaaaattcttgccttgcattgcttcttcataggaattaggttcagttgtagagattttcatagcacttaggaaatcataggctagttagtacttcattccaagcattaaagctgaatctctatgtaggcttaggtactctcttgcttctgtctcttgtgagttgatactcccttagatcttgatcaccctcatctgtacctatgtcactgttggaaatattttaccagaatctagatttactaccaagtatgtttgattaacatcctaatatgaattttaaaacaatgaaataaa

SEQ ID NO: 133973 - DNA, 658 bp, Cannabis sativa
taagtttgctacaatccaaaaccccaaatcccaccattaatgcatctatagctaattgcaattccatacatacatgtagtggttggtgtgagtacgaccggggtttttcgacacgtcacgaaatcagcacgaatacaatctaacaggaaaaaatatatagatttctgcacgacacaatataatgacgctgtaaattggtaaaacaaaatacgaaagaaaatagagttaaacatgacacgacacgaaaatcttaaaaataccatacgtaaacacgaatagatcctacccaaaagcacaacacgttaaaaatacttataatatataataataataagtaacaaaactaaactgtaaattaaacaaccaatttacttattactacaaactaataataaaaaaaagttaatatttatataacaaaaaaaatggactaattaaaagtaatattatcatatataataatattttttaattatttactttgataatatatttaaaaatataatagagaaaagtttaaaataaaaaaaaatatgtatatatggaatactattgatgaaacaaaagtaacattgattgtgaaaaagagaaatcctcttaattttcaaaataataatgctaattaagtttttttttctgaattttgacatgtactaaa

SEQ ID NO: 133974 - DNA, 1385 bp, Cannabis sativa
aatgtaaattcattacaacataatcgttacaagtttcattttaggcaggtttgggtttaatttttgctaacccatgagatcaagttggactcgtacccgcatgcaaacccgaccattttttttcatccaacaatctagtttttttattgaacttaccctatatttccaattgatcccataaccctctctttgaggctttggggattgaccataacactccccacaaccaaaagtagactcaagtatttgaccaaaactaacttctaatttatgaaaattaaccattatttgaccggaagcaatcaaatatttatccagtagcgacttaaaatttggcagcctccctattcgcatcaaaaaatatcaaactatcatcagcgaaaaataagtgcgaaaaaataaaataaatattaagtcacttaatgtgatactataagtcatcttttattaaagttagttaaaaataaaataaatatatataattgctacaaaagttagtcaaaattttacgatatatacttctagaatattgccggcctaacatcctttgatgtggcatatgtgtagtgtgatttactattatatttaaagtactagatattttgttattatcatatattttaaaagaatttatatattttagttgcattttttttttgaaatgggatattttacttacattagttcaaataattaaaatcattttgaaaattaaaaaatttaatggcaattgattaacataataccaaataattatatataaacaaaatatatagatgagaattataattttgtaaaagttgtaacaacaaataataattaatagaggaattttcaaaaaatattcttttttatgttttatttacaattttacggtctaaaatttataattacaaaaatactcttgtaaagttttaaattagaaaaatacactttgttttgcaaaaagtaaaaaaaaaataaataaataaaaaataacgtgaaattaaccccacaacaattataaattgataaaaaaaattcatgacaactataaataaactataatgcaatttaaaaaatagttcattattttcactgaagtggtattattgtaaataaaaaattcaaagagcaaaaaatgaaaatttttctatattaatgtatttttgtaatttttttaattttttggtctattatataaatttttctaattaataggtataataaatattgcacatgtcttaactatttatttttattttatatatagacaaaaagaaaaaataaactattaatcaaaatgatatatttaaaaaacgaataatttgcggcataaatacctaaattttatcctgagtagcagataaatacctaagttcgtcgtatttttggcggtaaaaata

SEQ ID NO: 133975 - DNA, 591 bp, Cannabis sativa
acgttctaaatttttttttaaaatatataaaaaaaaataaagaaataaagaagaagaaaagtttaagagatcttgtgcgaagactcaagctgaccagccctcccatatcaataattggcatccaccgattctattttcctatcctaaaaaagacatgcaaagatgctctaagaaattatacaataaaacttttaagtttgtagttataaaatcgcattaaaagaataattataacttacataaataaaaataaattaataacaaatttttaagaaagacataaaacttacacattgattaaataaaacaaatatatatcaggatacattagaagttgaccactaagcaaaatgattattagttattatatatatataattataatttcaattatttttatatctcttttaatataatctatactcagcagctaagttaccaagttttaattctagagatttttggtaattggataaatactttttttgagttgattaaatttatcaaaaaaaaaaaaaaatcaaaattcttacctacaattaggtgccgccgtttggtaacacttatgttttttaattttttaattacaaa

SEQ ID NO: 133976 - DNA, 746 bp, Cannabis sativa
tagcaagaaatttttcaaaattaaaacacaaatcattaaaagattttgataattcatcataaagacatatcaagtgcatcatcatcactttcactttcaaaatcacttaaggattacttaccttatcatcaatagccataaagcaagtgttggctctctcatgttgttcatcttcagaattttcttttccgctttcactccaagtaacaatcattgcccttcttctattcctctttctcaaaggacaatatgttttcacatgaccgtgctttttgcattcatagcaaataatttgatcatcttttcttgagctctcccttgagttactccctttgtcaaatttatttgcattcttcttgaactttaaaaacttggaacttagctcaagctcttgacgaaaagcaaattgatgaggtgggtgacgctcggcgcacccgccaggatccatgagcattattagttagaatgctcatggattggggagtaaatgagcattccattctctctcccttttagtttagcactttcacccaacctttttgtatattatggagactaaattctcggttggtgttataaataaatatgcatcgaaacttaaattttctaatggtttagaagttctacatgtcgggctaagtggtggcctttgttagcccaagatatgtttccaagaggggggtgaattggaaatttaaactaatttcggtaaattaaaatttttaacacaaaattatgcaattagt

SEQ ID NO: 133977 - DNA, 1528 bp, Cannabis sativa
  modified_base (855)..(869): a, c, t, g, unknown or other
tatgaagtgaacaaggcttgcctacatgcctccggttgccttatcagctttctggcacgtgctttgggcacgtggtggtgtattaatgaccatcattactgcatttattcgctttttgtaggcgtcgatttatttcttgtccatttattgatacggcgcattaatgggtgtcaaacgggtactcaaacgttttcaccgccttgagacgatttaatccaaccgttggatgtatggaattcgaatcgattgctatcccagccattcgatggtggctgatcacagctatctcacacatgctttggcctataaaagccaacttctttcttcatttggttactttcagctgttcatcaaatttcctcaagttttcgagagagaaaagaaacctcaaacaccatagatttcttgcttttgttccttcgccgttgtcaatcgaccttttactggcgatcaacaccaacacccagtttccacacttcatgtaagtccctcgtatcttgtatactagacagtttgttcatatagcatgttttactgttcatcgattttttttgggttggatgttgaatttctgggaatttttgtttgagtttctgcacaacgcgttagattcctcctcttttgcatttagaatacttcttttcaccatattttggtcgaggacccatcttcatcccacgtaatgacacttaagggtttagagtagacttcgtcttctcgattttaccccttttttttccttttctctccttacttttttgtaatgtcactatctgtgggattcttgcacccgactcttgtcaaggaaaaccttgtgaggttttcttttttttggcaagtgtccggagggggccnnnnnnnnnnnnnnnggggacccccattccctttttgaattagggtttggtttggggcctgactgctggattttttcgatctttttcagaaccaaaatgtctacatccgattctaagtcttcaaagaagggagagaagtgcttggccaccctggaggaggtcatgaagggtcccttagcccaagaggggcataagtcccgtgccaacgggtgggaagcggctgagcttcatcctaccctgacctgcacccatcaactggagcaaatcgtggtagtggcaggcatccagccttcaacctccgagacttaccaccagctgccccaggacgaggagacgcccaaccacaactacgggggcttcggagcctggagccagacgcacctcatggccggggccatgctcccttttcaagactatttgatgaacttccttgtatttgtcgaccttgcaccatatcaacttattcctcaagcttaccgcctgctttcaggcttgttcattttttacgctgcccggagccggggctcacccagtccggcagaaattttgtacttttacgaacttgtttccatcccaaaacaaggagataaacttaaggacggtttttacggtctccgagcccatcctttgactgagggcccggtcccttataattatcagaagcacgtgaagga

SEQ ID NO: 133978 - DNA, 664 bp, Cannabis sativa
atctaccaggtccaagacatcagctctgccatggccgcggtgagtacttcgtaatttattccctcccttgatcttttgtctaaggcatcttatctcactcttgtttgttttttcagattactgctgaaaccggtcgcctttccaagactttaattgaccatggcttcgtcatgttcgaattcgggggcatagacgaggccatgaggatccttcgggacttgtctgccataaggcgggcattccaggaggaggctcaacggagggaggcccttgcgaaggcaaatcttcgagaggaggccaagcagagggaggtcgaagtggaggtgacgcaccaggaggcgctcaaggcggagggcgaggccgtggctatggccagacgcgagcttcgggaggccagggaagccatggatgaaatggctgccaaggtgaagtccctagaggagttgcaccaggcagacttccagtctaaggccaacttgaccgtggagctgaaggagctgagggacttcagataccatgaaggctaaaagagatgagctccggacccccgtctcctgcaatgctccaagcgttttgacgacggcgtctacatggcctggcagtcaaatggccaaagtattaagcttgacttctatcccaagcctgaagaggctcttgctaaatt

SEQ ID NO: 133979 - DNA, 2180 bp, Cannabis sativa
  modified_base (198)..(207): a, c, t, g, unknown or other
  modified_base (281)..(287): a, c, t, g, unknown or other
ctatttagttataacctcccaattagaatataatttacttggtcccaactgtattcttggataaaagttctactgtatttggtatttaagtaatttattcaaaaaaataaaaaaaataaaataatttaggtttatgtatagggaaattttatttacaccctaaaaatttttaagtacaccttattttaataatttttnnnnnnnnnnaaatttatatctttaattgtactaggtatttttaacttttctctttcaagttatattcttaaaaaatatacctnnnnnnnaaaattaaattatattttaaaaattatgacaaaaaaattatatgaaattttcttagaaaaaaatatatacatgagttagaaaaaattaaaaaaattaaatcaaaataagtattgaaattaacataaaataatgtgaagaaaaaaaaaatattaagagtaattttcaaaaattaattaagtttatatattttttttaataatagaatgtatttataattttatgagatgcaaatataactctcctatatgacatttgatttataataatagtagaaattttcaatgtatatatatatagtttaagagagaaatttatattatgaacaattttttatttttttaattaaaaaagtaaaagtacttttaaaataagaatgttcagtttttaaaatgagaataaaaattttgcaaaaagaaaattacttttaaaatttatttaacatattctctttcattaatatttttgaactcaaccctatctcgagacctcaaacaccaattctggctcggatcttgattttggctttgactatgaccagaacttgcactcccacctacgccctcggcccccaaactccgacccaaacttggaccctaactcccgaacctgaacttggacccgaactcgaacctacttagatccccaccctaaccttagaccccaacccctgaaccaagaccccaacctctagcccaaatgcaagaaccgaacatgggttcatggcccgaattggcaacccagtgtcgatcgacccactttcatagtttattttttgaattgttaacaatactcctcaaaatattcaattttttcgtaaaatgagtgacgtggtggatactagttgataaatagatacaaattatatattttttttactcttttttacgttaataaataataaaataaaatacttttttaataataatttaaattcatacttttagttttttaattattaaggtaaaaaaaataaaaattatatgatttgcatccatttattaacgatccaagatcctcagctaaaaggtagtatctcatagtgtgttaagccaatttaagttttacacgttaatttattttttatttattaaaaaattaaaattaaataaacaaaagaaattaacatatttaatataaattaagttaattgacgtgtcaaacttagattggtttaacacagtatgtgatatcattttttaacaggagttcttgataattaaaataacagtggaacaactaaaaaacaatcgcggaacaatagtaaaaatttaatacattcaaaagtataaaaaatacacagtatttaaaaaaaagatatcgccccgcggcgaaaaagaagaaaaaattaaaaatttcagcatatagtgtaagaattccaaaaaaaaaacaacatgaggaaattacacttattatggaattttaaaagttctaatgataaatatatcacatttaagtttgaccaatttatatggtattttttttgttttcaggtctttttatggaatttgatatgccatatatatgtaaattaggttttcaaatcccatatttaatgtttttatttgtttgggtagtttcatttgtcattgatgccagaaaaattgtcagagttgctgccgatgtcggaaaaatcagttacttgatgaagaaaccagttacttaatgaagaaaccagtttcttggtaatttttttcgatgatttttctaacgataatgccaattctgacgacttttttagcgttagcagcaacttcgacgatttttctgatatcagcagctactccggtgactttttcggtaccaacaataaacttcggggaattcgtcagaattggcaatcgccggaaaagttaccgaaaaaatcaccaagaaactggtttcttggtattttt

SEQ ID NO: 133980 - DNA, 701 bp, Cannabis sativa
tattacaatattgtaataaaaatatcatgccatcacaaacttttgaatttgctagcacccaagtattgtacttgaggtgaccttaagcttatccaaacactgagtcggatgaaattattatacatggtttcctagtccacaatagagacaattttcttacatttgttctcatgttgacacttggcaccatctttcaccataaatatactgccatgtgctactttacacgtaagctacaccacttttcagtctgatccacaaccacaacatataagccagggttaaacaagcttgacacgtgtcaggatcaacatgaatacaaaaagggtgtaagaaacggaaattatatagatagaaatcgcttaaacctaaaatttagttgagacaatttgtgttgtcctattatattgtttttattatttaagttgatatgtttaattagtcaattttaattggtatatattttgtgttaaaaaatttctaactctatatatttatgttacaatacattttaatcaacaatttttggtattgtattttttttttttgacaaagtgattagaattactcatgaatttacgatgtagatgtctgccatcggcgctggaaccttttcaaaccaggatagctcatcgtctaactgcagagcatgctttgccaaaccatgggtcgctaacttctcaaagcgagccacataggac

SEQ ID NO: 133981 - DNA, 815 bp, Cannabis sativa
  modified_base (771)..(786): a, c, t, g, unknown or other
gtatatggggtaatttcccaataatttaattattttttttaattagctcaataaacataatatataattgtgaataagaaaataaaaaaaaatattaaattatttctcatttgtaaaatatatagttatagtttattagtaaatcaaaaataataaattattaaattcaaagctaaaaaaaataagatcatcaattaattaaaataattaacataacgaaaactaaagtatttatcaaaatataaaaaaaaattattaattaatttaaaaataaaaaggaaaataataatatatatatatatagtaacaccattgtaatatttgtgactttaaatttgaaagagtatcaatatacattaaaaaaaaaattgcatgtacacctgttataactctttataaaagttataatttacaaaaaatacataattaattgtagtttttgtttaagtgatgaaaaaactaaacaattaaaaatatatttattctcctataaagaacaaattgctaaattagtagaataatagaataatttaatttgaatggcacaaatgtaattaagttataatattaagactaattattaagtataataagcattaccaaaaaattgactcactagaatataagaagagtgcaaaaaatggtgtaaaatagagtgcgataatttatttttgataatatctctttcttatgtcatttacaaatttaatctattaatatatggatttgtaagaaaaattattaataaacccaagatcaatttgtatatannnnnnnnnnnnnnnntaatatataataattaggtatgcgtacct

SEQ ID NO: 133982 - DNA, 1209 bp, Cannabis sativa
ctctcctatataaagagcactaggtcaaacctaaaggctttgaggctctcatgcctaagctcttgaggtgaagcactcaaaaacctagctcaccctctcttctacatgccattaacagtgtagtagagactaagtctccctcacctcaatcccttgagatttgtcttacattctcactattgtaatacataaagaactactctagaactcacaacacttgtgatttgagtggtattatctctcgtatcaatacaactaaaaggagagtaggtcgtcacccactaactaaggggggcgaacgtctataaacctactatgtccttttatttacttgctctaattgtttacacatggtgatttcgatcataagtacgacttcgctgtcggttggtcaaatttgaagtcagctgaagcaatgagagaaggaggcacctagaccacggaacaagatctaaaaagaaatccattgaagcaaactacagacctaccatagacgaccataaaggccaattatcgaggatcatcgtcaaaggagaagaagcacaaaggacatgtttgttttgtgcatgaagaagaagggaagaaagggagtatgatgaagaacaactccttcattagtatttttaattggtttttggtatgcgaatagagagagaaaactatatatatattaattgtttcatttttcaataataataattcaacaacaacaacaataataataataaacagagtaaaatatgctctgcacacatttcatgaccaacattgttggacatgaaaaatctcctaaagaatttcatgacttacgctaatcgtgttaatcatgagaaagggtcattaaaaatataaatggttgtagtgagataagcaatagactaacacaaaattacaacattccaattagggcaaagcagactttggctccacctaaaattttaagaacaaatatatatttttaatattattttaataatagtgcaatttttttagaaatttttacaccaaaaatacaaaatacatactttattacatatatatatcttcacacggtcaaaccaacatttatacttatcaactttattttattacacttttaccacttacacacacacactccatgcagccgtatacgtcattgattgatgacttatatcaatcataccttacatcatttccatctctttttctcttctttttttttttatt

SEQ ID NO: 133983 - DNA, 1392 bp, Cannabis sativa
ggtaaaataatttccaacagagtgatcatttaagaatttaatgataactcatatccacccctgaatgtgtattcatatgttcaaatatagatgggaacacttctaagtggatattggcatgatttctctttgcaaagaatgatcttgtccaaaagcctatgaacaagatacaaatgccttagatgtattagtgtggttgtggtattttaatgattccttaatttagttacaacaaagagttcttagaatagttcaagtattggtcacagaatataaaactcattatccgatcatttagcatacagtttggatccattgacaaaaaatagattttaacaacttgtgaaagttataccgtagtgttcattgtatctagaaactgaaattgaatttttatttggaatctaaaatttaaagtcaaagatctaaatttatgccaaatatttaatgagtaattatcttttaccaccactaaagtactaattcaactccatgtttaagttgccttttgtaagcatataaagtaggagattttctaagatcgaggatttatattattacaggatagaatatttggaatatagtcatctgcgctactcatttttataaaagaaaatagagtgacattataaacagatgatttataaaacttcttgttcgatgttatatgttaagcaatttcataaaagaaaaactaagaggaaaaccaaagaacaatttatattaaaataggaatctagcgatgtcctggtaggcgaaaatcaaggttattcttatttcataaacatcattattgtttcggcattataaatactagtctaagttgtcatcatagggatgagtcaactaaattttgtattaacaaaagacttatctcatgagatctaacactattatattgtctaatggataacaatacaggttcaatataaattcatacacaatttttaaaaatttataaatatttagcaagtaatgaagatatggaaaaatataaaataaacatatctcaaatatttttcaaaacttttaactagatgatatacagtgtcccggtaggagagagtcaacaatatcatcaatttaatagagtagtcagctcactaaaatggacaacattttaggaatccaacgttgtcccagtaggcgagagtcaatgttattcttattttatgagcttctaccattgttttatatttctaaatttaattctaagtagtcattgtaaggatgagtctactagaaaaaaaaattctataaaatacttatcttttgagatcttacgatgctaatgttcgatggatgaccatccattaggatgatgaaatctagcatctcgaggttccattgaaaataaaaaatcatgtaagaccaataatggagatcgaatat

SEQ ID NO: 133984 - DNA, 834 bp, Cannabis sativa
  modified_base (26)..(63): a, c, t, g, unknown or other
ggatctatatgttgagcttccaatannnnnnnnnnnnnnnnnnnnnnnnnnnnnnnnnnnnnnttcttcgttgaatccattcttagaacctttaagtacctcttcgatacattacgggtactctcggcgagatggggtccaccggatattgttgcaacatgcccgtccacaggtggtggagctattccgagaggatatggggttcctagtccaagagccagaaaggccaccccagttgtagctagcggagtgggaagagcaggtagagacattctaggagcttgagggcgtgcaaccccctatgggggatttatagcaccctgttgttcgggaagcatcatatatccctagactaccccatgtttgggataaatgattggaatccagaaccattacccctaatgtccggctcgaaccaacatctcaatctcgtcgttcagatattcacactcattcatagtgtgccccttttccccatgatactcacattgcttgctttggtctcatctgttccttccatcatttgacatgcacgggggctttcgataatggaccatatttcatatcgctttatagacattctctccaatgtttattaaacttgtatatttggtgtactttgggtcataatctttccttggtttcttcaacgaatcattttgactgtggctttttcctcccctatttccttgtgaatgccccgcactagaatctaggacctcgaatttggattgtccagggaccgcacagcacccacactactagaaaatcagattttagtgacacacattgagtaactctaaaagtatatagtgacacttcaacgcgcgtcac

SEQ ID NO: 133985 - DNA, 1967 bp, Cannabis sativa
  modified_base (1930)..(1936): a, c, t, g, unknown or other
agcgaggaagcccgaactccaatactgaagctatcgtagggattgaagctcaaaaatcaatggctgaaggtatttttgatctttcattacatatgtttatagtttatttttcgcaacatatgctgtttttcatatattataatttagtgtaacactatgtgcatatatataacagtatatataattagcagaaagattattgtatataatatatctatgatatctatgagcagaatttaatggagaagagagataaatttgttgtgcatgaatatatttatagtgtacaaaacatatgtatggtcaataaataagacaaacctacaacctttactagctagaactagttagtacggatgagtggcccaaagtagcaagtagaaggaaacgagcttaatatcaaatatatcctttaatataataataataatgagtacactatttgtaatacaatgaagacaacttctgatgagaaaagtggaccaaattttcggagacaaaacagtatatataatattaaaagtcatagatatagatatataggatagctatcgctgaaaaaaaaaatctagcagagctcgagtttttttcttctttttcttttgaagagatagaggagagctgcagttaatatataatatttaaaaacactattgagaacgagagatatattaattaggtagcctatagcttagagtttgaagtttgaatattggtgtcgagatattttcaaaagaatataagaaaagccacatacgtacgtcacagttccaatgatcagacctagctacaaagaacaatacttctagtactaataacctctatacgatttataaaataataataataaactacgtgcgtaagtgtacctacaatactcacagtaacagattagctaattattagttgatgaacaagataatgatcgatagaaaaattatgtgataaagaccctctcaaaaaaaaaaaaaaaaaatagatatgaaaggtaaattggggttctcatggttaaatgtaaagcatgcatggaccaaaaaatacatttgagatgtgtgttattcttgcaccctataccatttataccccagccattttaaaaattaatttctctctctaactctttgattctttatcttcttctctcatttgcccaaaaaccttgaaactccaaaaaccgtcgacttgaaccctccaccactgagaaccctccatcaccacatagagatagtgagcgattgaccactgcgagaccccatcactaccaaaatgttgagaaccgtacttcatcactgtattttataactgtcagtttctgattttctattatgttagttgggttcaagggtagttttatcttttatctttgtttactcttttcatgtataaaaggttgtatctactcaattttcaatcaatgagaatcagttgtttcttttcgtttgtttgttattctgttctgtcacatggtatcagagctatagctctgattctcattcatcatcttcttcgttggttcattgatgacttcatcgccaatcatatcatctgcaacaagccagtcaacactgtctggagctacaccatcatcgtttatacctattgtattctcccacaagctggctacaaaattgcatcacgacaactttcttctttagaaacttcaagttccttctgtcattaaaggtcacaaactccaacgatacatctaaaaaactactgttcctccagcaagattcctctctgacgatgatcgtgctgctgaaattgtcaattctgccttggttgattgggaacaacaggatcaattactattttcttggcttctctcatcaatgactaaacccatcctcacacgtgttgtgaacagtgaaacctctgctacactttggttagttcttgaaatgtactttgtgttggaaattattttacnnnnnnnttagatctactcacaagtatgtctattaaca

SEQ ID NO: 133986 - DNA, 521 bp, Cannabis sativa
ctctctctctctctctctaaataaaaacactcctccatgtgtttaaggatcttttatataaatatacatatttattttatttaaaataaaatttatttttcttgaaaaatatttaaaataagatttggttgttatatttaatagaataataacatcaattaattttttatctcttatccagacctaagagtactcattctagttttacatatataaagtaactaggtaatataatacctatataactgttcttcctgcggctaatataattattgttagtattataataaaaaaataactatatattaatgtaaaaaaataatcacttaaaaataattctaattaataataatagtaaaattacattatttaatttcatatttgaattacaatatttggagttatttactaaaaagtttaaaatttatactatcaatatatatggatgattttttaataggtaatactcattaatgggtactaaaaaaatgaatgaggtggcaatttagtgacttgctaga

SEQ ID NO: 133987 - DNA, 616 bp, Cannabis sativa
tactcctgcttccaacacttgatctcaggttgcttcatctcgaaatctaaccattattagccccattgccatcttagacacttgatggatccctaaatgtccccagacccgtttgatgtagccttcgaaaatgggaataaggggatttgctcctagaactttgcagataacagctgatttccaacaacttccctcttctctaacctcctccacatcaacttgtgctatcttgattccctcccttatcataggttctgtgaaaagaagtttttggtcctgattcattgtttttccatttgtgaatgtttcccaggtcttcttcgcagacatcgacgatgatgcagggttcgaatgcctgctctgttcctcctcaacctccatcgcccaactcgtggacctctgaatctcgccctgaccaacaacttcagccgacatagcatcctggtttttaaccaggtctgcaattaggttaagtccctctgtcgaaccattctcttcgacatcctaagattcctcacatcctgcttgcgaatcgtcaatgatggattgagtgactggcttgcgtcccacctttttcttcctcgccatgggagaagaaagcagagcaacgaaagct

SEQ ID NO: 133988 - DNA, 725 bp, Cannabis sativa
  modified_base (643)..(651): a, c, t, g, unknown or other
tggaggcttgaagcggggacgttacatttgtgtagcttagcttccatgacatagagagtattcactttctttcctctcaccactacaagagaaccatgggtgagcttccatttatttttactaaaacagtttataaaccccttatcatcaactcatcaagtcttctagtagatatcaagttaaggcgaatgtctggaacatgcctaacatctttgagaactaattcactgccaacattagtttccaagcaaatatcttcaatacccacaatcttcgatgcaccactgtttcccattctaacattgccaaagtcaccaatagtgtaagaagtgaagaaatcactacgagcagtaacatggaatgaagcaccaaaatcaatcacataactacaatcttgggttgcaagaatgacacacccaggggcggatgtacatatacatctaaggaggccctggccccccacacttctcctaaaacctttatttttatatataattttaaagtttgtagagagagagagagagtaatttattcaaacacataaaaaagtgaaaacaacactaattaaataaattacattttctattttttatttacatatattaatattaacaatatatagtgttatagtgagatttctctnnnnnnnnnactcgagaccagactcctatttaaaggacacgtgtattcagatttccaaggaaaactgaaatgtccatgagaga

SEQ ID NO: 133989 - DNA, 1260 bp, Cannabis sativa
  modified_base (1233)..(1235): a, c, t, g, unknown or other
tttttgatgatgatcatcatcattttgatgatgatcagctttggccagcttggttaatccaataaggcataacaacaacgtcacaacaataataagtttattatttttcatactcacaaattcaatttgtatgtattttattacttgaatttaaccaatgataaatagggtgtgagtgagttaattgttattctctgttcacaatatatataggtagtgaagaagttgataatgagagtttggtattgtaactattatgttatttaattatgtagggttgttataaaggggtatgcataacatattgctcagcatactttctttttacaaaatcacatttactacctaactttattaatatgatttagtaaaaagaaggtatactgagcaatatgtagatagtaaatgtgattttgtaaaaagaaggtatacatttactacctaactttattaatatgattttgcctaaactttagattcgtttcgctccgcttttgattcggctttaatatatattttaaaaaagaaaatatacttatttagtaccctgtcttatttcgaaaaacacatttaaggtggcgtttggttggaggtaacaaaatggaatgaaatggaaagaaaataattttcattccattcctttgtttggtttcattttaaagtattggaatgtcatttcaatagaatgcccttggtggaatgactattccattttgaaatagaaggaaagaccattctaatgtaaaaaatttaatgattttaatgatttttttttttttttatcaatttctttaatttcttttatacattttaaattttattccattctcattcctattctttatgtttttattcctcctaaccaaacgccaccttagtaacttgtgttttcaataatatttatttgatacattatattttaaaattgtacatgtttagtaccctaaagtaaaatataatcaatataattttattaatttgaccaaatagttatatgtaatcaaataattaaatttgaatttagaatttgtaaaattgaagacattttgattgtattgataaaattttatcaaaatttttttagtttaaggtaccaaatatgtataatttaaaaacacagggtactaaatgaacatattattgaaaatacagggtatcaaacctgtattaattaaataaaacatatggtaccaaatatgtatacacccttaaaaaaaaagaggaaattacacnnnatactctttttatattgtcctcttt

SEQ ID NO: 133990 - DNA, 612 bp, Cannabis sativa
  modified_base (127)..(153): a, c, t, g, unknown or other
tctagatacaagttgtcactaatttagttttttgtcataacaaattgtaatttttgtaactaatatttttaaccacgcaccttttagtcagaccacaagaataataatttataattagtcataactnnnnnnnnnnnnnnnnnnnnnnnnnnngtgactaaaagtaagatttttgtagtgaaccgctaactaattattaagtgtcaagtcttagaggtattaagtacctaagcatctccggggttgcccatggagttatttttatcatatatgtaatgtggtcattatttttaatgtaattttatcaatactattgtctatatataacaacggttatgtgacattattattttttttttattttaaaaaaaattacttcatgatattattttataatattaaataaaatttaattatttaaatagtagtatgtttatgttagacgatggtaggtaacttttagaactgtcaactattaaagtaatttttctaattacttatgtggataaaaaaaaaggctaattaggattttgccccttgaactttgacatttaccaaatcatgccccctgaacttttaaggctattgaaaatgcccctaaactattgagat

SEQ ID NO: 133991 - DNA, 643 bp, Cannabis sativa
aaaaaaaatatatatatatctaatatctttgtatatttttagtgtcttgcagtgtaagacatgattgccaaacttttctgtccaaattataatagttaaaatcgtaaacattatttaaccccttctagttgtgtacgtatcttagtccaaaatttagtgactttctttgaagaagaaacataaatattatttataaaacaaacaaagcataaaatgcacaacaaatctttatcatgcatggttttattatttgggaaattttttaaatactcttttttatgttttgtttataattttaaagcctaaaatctttatttacaaaaataagtttgtaaaattttaaattaaaaaaatatacttttctcagcaaatgtaagaaacaagctaaaaaataattaaaaatcaacttcacaacaattataaatcaaccataaataataaattataaaataactaaaaactatccaaaaaaaataaataatttcatgaaaatataatacatctataaataacatacaaaaataaattattatttttacaaataaaaaaaattttaaacccaaaataaaaatttatcagtgttcgagtatgttttaataaatttttttaaattttttagtcaaagttgtgcaaatatttcttt

SEQ ID NO: 133992 - DNA, 632 bp, Cannabis sativa
  modified_base (570)..(597): a, c, t, g, unknown or other
accttatttttgtaatagtaattttgtaacctactgtaaaagaattttataaacaggggatccccgtattatggtatttagtatgaaagttttattttaacttaatcaaatgtttttaattaaatcccactttgttttctaaactagtagattacgagaaataagtttgtaaaagcacacacgtggcgtccttgagggtcagggcgttacaaaatcccacgattatagggattgtcttcgtgtctaggcataacgagatcattttgaagttattatctcttgtaagttgcttggcataacaggcttctacctggtcagatgtcttctctacaactctgctcgggtaatcaacaattatagatgctgatgaattatgtgcagactgctagggatacttccctctgcccacgtatcaaagatataagacacgtgtcgctcagtcctatcgccacgttaatgtgcaaaaaataacactcacaatctcgagggtctagttccaatgaagcttccccaccatggtcaggtcccccatggattgttatcgtcgttagtgttggaaattattttacnnnnnnnnnnnnnnnnnnnnnnnnnnnntttattaacaccctaaatatgaaagatcggaagag

SEQ ID NO: 133993 - DNA, 1299 bp, Cannabis sativa
ctggtaaaataaattccaatattacttaccatatcgtctcttacgttcaccattctactccgaccacttcgatgtctggattagatttttgttgaacgttcccttttcaccttactcaattcctacaatgcaaaaaaaaatatgttagctatcagtacttgtatttaaaagtttatcttagtacaaatataattagtacctaaaattcaagagttagttgacttttaataaatttcaacctatccgtaaggtcgatttcaagatgcttctcaaggatgtatgccaactgttgcaaatcattttcttctaaagcaggcacaatgatgttttttgtcattttgttcttgaagtcttacatgaacttcccagcaaggatcatgcaattatgtttgaaatcatatcacactataaaacccgtttagttttaaggaaaacaaacatgactggagttaacatctgacttaatcaagcacagataaaaattcttacaaataaccgcttacctgtatatcttttgaaatcttatttttttagtgtaggcttgacttgcttccaattttcataggacaaccctatcgtctgatggtatctaactcctaaaatcgatactgggttggcatagtttttgccataatactctcctttatcattgacttggagaggaagtctttttccttggtccattagcttcgatacttctttcatctgagtagctcctcatttaggtatctctctgggatactctattagtgggtctgaatctgagcctgaacctaagttagccgtatctacaccattaaaaaaaaatataaagttagctttaacagagtaactacatacataaaaaaaagtatcacaagtaatctataaaaaatattaactacataaacaaacattatcacaagtaagctatcacaagtaagttaccaattagacatgttttcttttcttttttttttttcgttcatgtgacccatattccctcattgatatcgtctctaatgtatttagcatcgtcttcctcaaagttacgatcaatttccacaacttgttcatgaattggttgcccaataatgaagtcatcataacacaaattagcattctcctcatcctcttcattctctaagaacctcctctctggtgtcgataaaacagcagaccatttatctttagccggataagaaatgtcaaaaacttgtattgcttagccatgatgaatggatcattcttgcttcctctcttacttaaatcaaccaaagtaaaaccaaactcgtcagtttttactccaacattgttgtc

SEQ ID NO: 133994 - DNA, 966 bp, Cannabis sativa
ttttgtttatttccttttttggggtcataaatgtaaatttcatctatttttggtttattatagaaaaaatctcaaaacaaaaagagaaagaagagttgtgaaataacatagagtaataaaagactaaatcaaaatagaaatctacaaaaataattgataaaattaaataaagctcaccatataattatagacggaaagagttgtgagaatatagtaccccaaaatagaaatctattaaaaaaaattaaataaaactcaccatataattataaacagaaaaaataataccaaaacttttaaaatagtaggcaacaaatttataaaaaaccatatatattaataatttcttaaaatattgataatgaatagaaatcaatttaaacctcctcatgtgactaaacacattctcataataatctataagtatttctctagttgaatctaaaggaattggacatgaattaatcttctcgtggtggctcttgcatattgtgatatatcaaaacttgcaaaacataaaaataacataaaaaagcatccaaaataaagttaatgggaatgagttcacttaaaatataatcaataatagcaacaatgagaaaattatattggtgagtaaagatgtgaattgctaaatagaagagttggccccaattccttgatcctcgcatatggtgaatagatcactcaagttgaagagaaaaaaacccttatttaaaaaaaatcaaaaaaattctaatttgtacggtatatatataatattatatgtttaataaattcttttttttattattaatataatgatataaataattaaatatcttctaattaattattaatattttataaacataataaaaataggagagaatacatacaattaattagaattaattaataaattttataataaaaaaaataaaaaatgagaaaattaaggagagaattgataaaagtatttggaat

SEQ ID NO: 133995 - DNA, 643 bp, Cannabis sativa
tgagtagatctaagatcctggtgaaataatttccaacaaatggtccatcataagggactatatgcttagagcgaaattctcgggtacaagaactccgacatggtgacatgtcaaatatttaatcaagacaaagacaattcaatgacacatgtaattaaacaaggtatttaaaaaattaattgtgtctgagcacccaaagtgataaaaaacacatgtttttctcacttagaaatttcatcaaacacttggtgggaccaatttttagtagtctaaacctataccaaaagtttgcaattcttgcccaaatttacaaattcaactcccaattagtcaaattctatcaccaatatcaaaaccaattcaaaataaatttaaaaccaatttaaattccattcccacaacacatatcaaaacacattcaagaaacacaagttctaacctaatttctatctccataaccattctattcatgcaatttgtataacaaccaatcacaaattaccaaaaaagcacaaagaattagcaattgctgttgggctttgtgccctaaataaaattcttttttaatgtaatcttttctattcaattatcaataaagaaacagatttaatttcattacttatttagtatgtcatttggttca

SEQ ID NO: 133996 - DNA, 552 bp, Cannabis sativa
aattcagcaacaaacaaaaatcacaataataggaaattacctcaagccctaagcaagaaaatcaagcttcaacaatttccccaactataagcttagccaagcaatttctcaataatttaataattttggaacaagatgagtatagaaagagagagggtcggtcctagaaagagatgcaactagaaaataagttttcatttactcaatattcattttattgaaaattaatccgaaaagcaaaaatgacaaaaattgcccccaagggccatatgctcacttaagcacacatacaagcgcaatatagtcatttcatcacatatgcactccaataaatttcaggttgttcagttatcaaaatcatgccaatataaaatcccgaaaatgaatttcggtcccaaaacctggtttggcctaaaatttctaattgtgactataccgcgccgacctgtcagaaaatatctaaaataggagcagacaagtatattatataataatatagtccataagcacgcaattaaataaatttacaattttacccttctcgggtcataa

SEQ ID NO: 133997 - DNA, 923 bp, Cannabis sativa
tctctctctctctcccctttctctccctttctctctctctctctcttaaaaaagataaataaaattagtgatgttgaaaaatacttttacaattcaaacattagtcaatcacccacttatctccaaaattatttctaagcttatggtataatttaagggacaagggaaaaatgtaagtagattcaaaaattaatttcataaagtagttaaaaataattgaactggctaaagctcaaacaggaaaacaagggataaaagagataaaggtaagctcgaaaaggcccaaatgatccaaaaaaaattgcctaactcatattccaaacaagcattgtcaagaatttcaccttaagaaataattcgtgcaagttctatcttattaaatcaatcttaccaaaaattaaagtaaaacatgcagtatgatgcaatccaaatattgaaaatttacgatgacacaactatttcgaagaggcaaccaaattaatccaaagagtagtcaatcctagcacatggtttaatttttaattcatcctaaaagtgacaatagtggaaattattcattcatccatattatcagcttaattagcaatacactaaacaaaaaaaaaaaaactcgaaaattaaacacttaaaatagaaaatagaatataaacaaacaataagtccctcccccaaactaatttttcacaatttcgccaatgtgacaaacaacttaagagagagcgacttacctgataactaggactaagcatgggttgggttggccgggttgagataattttaatgacccaatccaatgacatcggcctagaaattttcaacccattcacatcctaaattttttataacccaaccaattttttatcttttgtgggttaggttgggttgggttataacccttatcccataattaaaaaaaaaaaaaa

SEQ ID NO: 133998 - DNA, 1020 bp, Cannabis sativa
tgttaattgattttgatttgagatcggtgtgttatgtagagagttactcattttatattgtcaattcattttcagatgaaacctcatgcatcttatatatatatatatatatatcttaaattctaatatagtagagccaaaccaaaaaaacttctagtgtttcctatttaatctctatttgggatttttcggccaataagtgtcagtttctagtattggggtcttaattagacttgtttcaaaaataaaaatccaataagtgaccgtttttagtattgggtctttaacttatttaaaaaattcacaaatttctcgacgtgtatatctataaatttctcaatttggccttgtgagagttttttaaacgtcacgttcagtcgtgtggtctcttaacaatcgttcgttatactcattttttaagttcaaacgtgatgagaatattagaattagtatatgatgtgtgaaaataaaatatcatatatataataaatatattattcttcttattttcaattaattttgagataaaacctcatccattttatcttaaatgccaacatattatcttcatcatatttttaagcaaaattatttccataaagcatataatatactcttctctgtatataaagttatgaacattgttcatatattcatggtcggtggcatttttattaacaaaattcaataattaaattagtagctaccactcaccaacccaaatggtccaatggaaccaccacatttaatcgaagattaagcaaagctggattttttttttttcctttgaacacaacaaagctggatattgataattaggtttattgaattaatataattcaaatgttttgtcacaaaatctcgacatggtctctcatcacatatctatcgttgttgttgtataatacctcaaaacgaatcatcattaatttaaaatagggtaatttgcggcataacttctttaagtggtcagatttttgcaactaacccttaattctaaaattttagtagtaaaacctc

SEQ ID NO: 133999 - DNA, 577 bp, Cannabis sativa
tccatcccttttagtctgggttctatccttattaggactgaacatatcgagcgagttcaacccgaacccgatccggccaacccgcaattttttttttaaaaaaaaatgttcgggcgggttcgcgggttaagattttaggactaccgggtttcgagttgaacccgaacccgcccgccaacccgcaaattaaatatattatacacatatttttttatttttttattacattttatatatattaaattattaattaaaaaatgaaaaaccctaaaagtttttgttttacatttcagccagccttaccctaccttcactttcacatacgagacaacaacaccacacgacacacacaccagacctcacctcctcacctcacggtttcattttttaaagttcatatgctttctcttaattttgttgtttaaattttgcagctttgccaatgtcatctttgttccctttcccatatttcatggtactactcactatgtttgttggtgaaagttcctaatatatatctattctatataaagtgtgcatatataaccgaattctcggtttatgagaaattcatggg

SEQ ID NO: 134000 - DNA, 2149 bp, Cannabis sativa
aaatagtagagcctattgtgtttacaacatgagaactcaaactgttatggaatcagctaatgtggttgttgatgattttaaagatatttcagaattttccacaaaagttgagatagatagttttctggatactccactagatgtagcaaatgtagattctgatgcagcagacttgaattctgaaagaagcaaatgtcaaatctattgctgcaaccgaagcatgagaatcagaatagcatgtctcacttcatccaaacatcattactgattctattcagaaggaacccagcaccagagtaaaactgaataatcctaaagatctcatctttggaaatcttgaagaaagcatggtaacaagaaaaaggtatgttaatttaattagatttctttgttttatctcacaattcgaacaaaaaaatgtgaaggaacccatgacgtatgaagaatggcttaatgatatgcaagacgaacttagtcagtttatttgcaataaggtttgcattttagttcaaagaccaaaaggtatcaatgtgattggaacaaagtagatctttaaaaataaaagtgatgaatttggtacgattgtgaggaacaaggctcgattggtggcacaaggctacacataggtagaaggtattgactttgatgaaatatttgctctagtagcaagattagaatctatttgtttactattgtgtattgcttgtttcttgatatcaaatggtatcaagtggatgtgaagtcagcctttttgaatgggattttatgtgaggaagtttatgttgagcaacaaaaggggtttgaagatccttagtttccagaccatatatacaaattagaaaaagctttgtatggtctgaaataggcccctgtgcctggtatgaaaggttaactcctttttaaatttctcatgattatcaaagaggtagtgtagacaaaactcttttcatcaaacacataaaattagattttatcattgctcaaatatatgttgatcatatagtgtttagttctacatctaaccatgaagttcgagtgtttgttaatcaaatgaaaaatgagtttgaaatgagtatggttggtgcacttacattctttttggggctttaagtcagacaaatggaaggaggaacattcatgtctcaaagtaagtatgctaagaatcttgtcaaaaagtttggccttgaatcggctaaacaggtaagtactccaatgagaacctctttgaaattgacaaaggatgaacatggagtaaaggtagacactactctttatcatagtatgatttgtagtttattgtatttaattgctagtcgtcctaatattagctatagcgtgggaatttgtgctcgatatcaaagtaatcctatggaatctcatgtttctgcagttaaaaggattatttgatatgttaatagtactcttgactttggaatctagtattctaaagacactaattctagcttggcttgttttagtgatgcagattgggcaggtaatgcagatcatcgtaagagtactagtggaggttaattctttcttggaaacaatttggtttctttgcatagtaagaaacaaaattctatttccttgtctattgctgaggctgagtacatagctactggtagttgttgtactcaattcttatggttgaaacaaatgttaattgattatggatttgagttgggtattttaataatttttttttataatactactgccataaatattttcaaaaatcatgttcaacattctcgaacaaaacacattgatataaggcatcattttattagggaacttgttgacaaccaaacattacatttagaatatgttgatactggaaaataattggctaatatttttaccaaggccatagactaaagtcgctttgactccctcagaaaatccttgggagtttgcattgtctaatttcatttgttcttgaatttgtacaaaattgttgagtagttcttttcttgcatctatccttgtttcattcttggttgacaaaatatgtttctgtttttagatgataattagcttagtatcttgtactcttcatacttttgaggttgagttaaaagattcaagttacttatttatgtgtgattgggattacataaaggtcttatacagagttgagcaattt

SEQ ID NO: 134001 - DNA, 512 bp, Cannabis sativa
cccccgccgataattctcaatattattgtaggatttttatttctaagaagaccctacacacagcaaaaataataatcaaaagcaaggtcaaaagtgacctttacccagtcaaagccctcctttttgacccctactcatcaaacccaacgacaaccctattttaattgtactgcaggtcgtttattataatataatagaaaccctaaatgtatcacacatatatatactttcttatcatttaaaacacacacagccaccacaaataaaaccctatcagagaaaaacacataaacggctacacccacaaccagcctccttcgttcttccttgaagaacacagcagtaacaactgcaatttaataacctcactgcccagaaaattaaacccaacacccttttctaaaccgattataacccagaaaatcccaagcagaaaaataacaaacacagtatagaaattgcagaaagtttaaaggaaagaatgcaccagatttatagaggttccccaaaaa

SEQ ID NO: 134002 - DNA, 788 bp, Cannabis sativa
ggtctagagtttggggtccatgggatggggtccgaggtcagggtccaagttcggggtcagggtttgggttcaagtctaggttcgggtctaggtttgggtcagggtcaaggttcgggtctgaggtttgggtcttaggttcgatctcgagtctgggtcttggtccaagttcgggtctgagtcttggtctttgatcgggtttggggtctgagtccaggttcgggtttgggtctgagtccaagcctgaggttcggatctaggttggggtctgggatcgaggtaccagtcgaggtccagattcgggttttaggtccgggtatgtgagcaaaatgtaaaatatgatatgttagacaaaaaaaaatatttttaaaaatagaaaacaacatttcgatattctctgttttctagtttttaaaaaaaatcagtttttaagttatgaagccaaacaacctcaagtttttttcctacaatatttttttccttaccaaacatgagaaaataagtttttttttttttttcttaacgtttcctcacttttttcttttcccatcaaattctcacttccaacaacagccttagtgtattttgtgaaagaattagcttgaagaccataaagaagaggaatgataatgcttacaagaaaaatgaagaaaaattggagcttttatctttgaatgtagggaagaataaactttttagaaaaggcatattattttggataaatagtggcataaatatttaagtttttaagcggcataaactcaatatttatttttagcggtttaactact

SEQ ID NO: 134003 - DNA, 907 bp, Cannabis sativa
aagagcagagtctggactataggtttgggcaagagtcaccaagagtttctccattggcctggctgcttcaaaaagacaaacaaattaagtgtcagaagtgaccacgagagaatatgcacacaaaaacatagcagtaaaactactcctaccctgactatctaattcagccctagcaaagtcttgtaccacaatactggcttcgtcatccccaagaaagctgtccgaggggagaaaccagctggaagacagataagctgaatgatccaggggaatatgtgcagaggtccggatcccatcctggaccggtctagaaaatgacctaagttggaaaaataaaagcccttggcatgatcaccccaccgggtagcgggcattctaaagctaagaagacgttcgtcaaattctataggcctacatcgggaataatcttgggcagaagggacatgatggaccgttaagggagacttgccagatcctgatgtgctggcatcaggagccccagtgttggggaccgggaggagcatcttaggcagagaaggcgcctgttctttccccgcttctatccgaagggttctctcagcagcagcgtgagccttgatgtaggctagctcttgttccctcctaaagaggtactttttggtaccggtccttcaccgaggcaatgatgcccgcccggagtgccttctcagcttccggggtacgaatttttgggcagaggaccttggagagattgaagtcgtctacgaattggctccccgagatgagcttggccttccaacaattctctgttgtgaccaagttccccacgttaagaccatttttgtcataagtggagaaaaccttggcatgctggaggaaaagctgggtaggagcagtgcgatgcagtggagggatcttgatccactcc

SEQ ID NO: 134004 - DNA, 633 bp, Cannabis sativa
aacatacatgattgtaaatctagatcctggtaaaatatttcctacagggtgaccaaccacattgattacctcgagatgctccttcttcagcttttcgagggacttcattctggtggctgtgcgcccgagccgcataatcgttaatttcctcatcggttgggattggaacgtgctgccacgatgcttacttgggatatatatagtcactagtatagtcgttcttagcgaggaggcccacagacctcaggttgacctcgttcaaaaggaacttagccgaccgaagaccatatggaagacccagcaggagcctgcgtcgctcagccatctcgagagtaggagttggtctttttgacacggctgtcaaaataataagattgcaagctagtgaggctaaaattgaagacatggagtaatttaaaacaatgtctaaggcagatagtcacttacttattatactgaaggtggttgtgttgattggggaaaggtcggtcgtccaaaagaagtcctctttgaaaggggtcttgtttggcaacccaacaatgatctacgatcgcatgtgtgcattcttcctcgcagggactgccttcaccgagtagagatatactatttctaggggagtggggcactcccatc

SEQ ID NO: 134005 - DNA, 626 bp, Cannabis sativa
gatacgacatatagcccgtttactaccgcgaccgcagtgtaattaattgggcgacatcacccatatccctgcatgggttccattagaagatcaatcgagatatagaaatcgtaaagggtttctttcccaaaatgttcttgttgtggttgattttgatataaattttcagtactgtgattcaagagtgttaaaaaatgctatttgggaaagacaacaaaataagctaaaagttccaaatggtatttatttgttatagtgtaggcatgataatttgtttcttataatgtttataaatctaatgaatataatatttaaaattgtaggaaaatattgtgtggttgatggaggctatgcaaatacaaaaggttttctagcaccatatcgtggaacacgatatcatttgagagagtggagtcaaacacaagcaccacaatttaaggcattcaaagcttcgaaatttagttgaaaggacatttgcttttttgaaaaaaaggtttctcatactaacaatagctcctccatacaccatcaaaaaataaggttggattgtattagcatgttgtgtacttcacaactttattcgcaagtggaattgggatgatgaatttttcgaagaggacatggaa

SEQ ID NO: 134006 - DNA, 865 bp, Cannabis sativa
ttaaattttttaaagagttgaccgagttgaccgggttaacccgccaacccggtcaacccggccaaccgaaacctgccaacctgtgacccgccaactcgccaacctgcgaacccgtgccctatccgggttcgggttcggtttcatttttttgaactcgaaatccgcaaattcgaaacccggtaaacatgcccgatgttcagccctaatggtaatagcctactccccttgtattgtattgacttgagagaaggaacatagtgttctttcccttgaaagctcttacaattgatctttaagtaattttctctcttagatcactcatttctctctagagtatatttcagtagcaattttctcactccccctcataatgagactaggtcactatatatagagacttaatgcacgagggatggtttcccttttgctgataatgcacaaaataagaaattacaataattctataattacaatatatgaaataggaaactaggacaggttgccattttactcggactcaatcccacgattataaggattgtcttcgcgtctggacacaacgagattagtctctaaagttgccatctcttatatgtcgctcgacataaacacattcgtacctggttagatagccgactattacaaatgttgattagtcatttataagttgctaaggatattttcctccgcccaggtttcagaaatatgggacacgtgtcatccgattctagtgccacgtcaaggtacaaaaaataggataatatttgcccccaagtctggacgagaccttcctggtcgcacgtgaacttcactcagcctagagtcttgttcggatgggtgatgcgtgtgttgggttttatgccct

SEQ ID NO: 134007 - DNA, 930 bp, Cannabis sativa
tgggaaaaaggatactaaatagttgacatcttttaacatagaatgaaaagcagaattacaatgaagtgcagcttttaacccctgaactactaataatgaatcattttcaatgaagtcagcagttaagccgaggttgatgagccattgcagagataaagccatagcagtagcttccatctcttcagatttgaaacaccctataatcgatttggaaaaagcagctttgatatagctattggaatccctcaacacaacacctataccaattaatttatgagatctattgcaggctccatcagtatttagcttccatttacccacaggaggtgcaatccaaggagtaggagagggtgcatttgtagagacaaatgttggagttgggtctgcaactgaagaaccagcagtatcctggtgcgagttgtgcacagattgatactttgagatgggagaaccagcagtatcctggtgcgagttgtgcacagattggtactttgagttgtagccagtagcaaacatgaagatagcagcaggctgcttgggcaatttatcatgaaactcagcatttctctcaaaccaaatgctccaacaaagagtgagaaactgttcaaaagctggtgtagataaattggccgagacatatagcagaaattcctctgatgtagtggtagcagccagtttaaaattcaaagcatgaggaaagagacaccaaacctccttagctcgggagcagaggaacaaggcatgatttattgattctttctgcattttacacaaaggacagtaaggtgattctgcaatatgcttgcggttgagttcagcagctacaggtaggacattatgatatactttccagacaaatatacgaagtttcgaaggtaatttcaacttccaaaacttagtccaccgattttcacttgagaaagtactgcc

SEQ ID NO: 134008 - DNA, 540 bp, Cannabis sativa
  modified_base (482)..(486): a, c, t, g, unknown or other
ttgatttatgggtaattagggttaaaaaatagtaatgtaccctgacacttatctaatgtaccctgagactcatctaatataccacgaaatatattccgtgaacgtacatcatgggacaattatttatatgcatgatatgatattatgattagctattatttaataattaagattataacgatatgtttaaaatagttaatatgtttgatgtgtatggataaaccgtacacactattagggttgaccttaaattttagtcgactatttaaaaataagaaattatagaccttatttagaaaaaatatggtatttttaaaatcagtaaacaaatgtatgtttttataaaaaatatgtatttttaaaaaagattttcttttaatctctgggctgaatagatcttaagcacatgcctaatccacttatacttaagactagaccaaatgatatgtaagtactaggggtgttcataaaaactgaaaaannnnnaccgaccatcaaaccgaccagaccgtaaccaaattttcggttccacgtcatcac

SEQ ID NO: 134009 - DNA, 1166 bp, Cannabis sativa
taatccaatggcttaaaaaaatgtaaccatgatagttacattacaataaaaatgtaactattaaaacctcttccatatatatacatgctctaaatggttattacccataaataggtattttattattggctattagattaaatctaatggtttatatttacaattattaattaattttaaaaaattaatatttttaattttaacttattacctgatgacatgggagtcacttttttttttttctttccatattttctattccttcttctttcctaaaataaggaaactattaaacaaaataactctaaatggaactattataatttaaaaaaataaaaataaaaagcacatgtcgacccttggtaactaatggaaggtaaaatactttaagggagattcatatcaatttttatagacatgatcttttggtattagcataggcggacttaggggtgttgagggagggctaaagcccaccctaagatttataaatacattaatatacaattgttatttttcatatatacatagtagttaaatagaataattgcccctttttttctaggtgcatcaatattttatttattaaaaaaaacaaatgaagtataaagttcaaactaggatcaaacttatgaccactagcatagagagatactgctaaatgatcattccactaaaatttagctagttatttattgttttgaattatattaaatgtataactaagtccaccctaaaatttaatcttgagtccgccactgttagtgtatcgaatcgatagaacttcatcaactgcccaaagtagacatttgattttgcttgatactaccacaatatttaccttgacaatggtatattctttattttaaccgcttatttttgggtattggtatgtggctgatatagtactctgcatcatgctgtttagtgttgatatgttcctaattttgatgctctttttcttttctgtataagcgactcaacgaagttgcgagctatttttacactagggatgttggtaatgtataagcggtggccttctagtatcgatggctttcaacctgctcttatgggaggaatgcaaactatgatagcattgtcgatggtcccattgattatgggatctttcacaatttaagtttaactgggatgtatattatcaataa

SEQ ID NO: 134010 - DNA, 664 bp, Cannabis sativa
gtatcacgtgcccgttagcaatgctctatatataattaagagagatagagagaaagagaggagtttaggcaattgttcatgaaaaaggaaagaattagggatcgccggcagaagcaagacatatagaaaaagataagtaatgtaaagccaaattaagcaacgtcaatttggtagtgattttcttcattatatttaatcctataataataataataataattacttagagattattatatattttgatttttcaaatgccatacaaagtcacgattttgatagacacaattataaattttaaaacatcaggaagatgagtttttgtctcaaaatagaaacagtactttgggacgtggaaagaacaactaatccactatataatgtcatatatatgtgtataatataatggggtaattttacagcaaatcttctaaattttcagaaattttttggttaatttttttaattgcgtacgttatagttatttaagatcacttgtaattcaaaagatttcaaataattaacattgctgaaaaataaaatttaaatattttgttgcatacacaactgtttttctttatacgtgtgttaaataattgtttaaatctaatttttgacaatgtaaactatttgaaattttctaaaaatttataaatggtcttaa

SEQ ID NO: 134011 - DNA, 831 bp, Cannabis sativa
gagagaggagagaaacgaatacagaaaaaagagactaagaatgaaacaaacgaaactgaacacaggaccaaaacgaaagagaaaaactcacagacacgaagcacagcaagatagaagaaacaaacaccagacaccagatgaagagagaaaacgcaagagagaatcaaacagacaagagattggttgaagaccaagctctaggaagagaaaactggtttaagaccattctctctaggtgaaacaccgcctaaagttcatcgtattcgtaacattaacttaacttcttttttttttttttgaaatccacattaacttaacttagtaatatatatctttttaatattaatttctaattatatttaaatttaaattttttttcttctggaaaagataatatttaaatagatatttagttaatcatttatataatccatatcgtagtgcgtgtataattttgttttatttaacttttaaggaaaagtatggtattattaattaatgagatagctgatgtccaacaatatagcccatagagacagaaaatctgccaactaaatttacgtaagtagtgcgtgtataacttaaaaataatagataattataagcaccgtcaacatacgttaaatcaacgtaactcgatgaaaaatataaataaaaaattctgataaaaatataatctaatttttatattcaacgggttgaaaataatatcaactcgtgtaatcaacccgaattaactcgatcaactcaattaagaagattatatatatgtatatatttttattatatataatatatatattatataatttatataaatatttataaaaa

SEQ ID NO: 134012 - DNA, 808 bp, Cannabis sativa
tatttattgttggctagtaatatctttgtcaaataatcttctttgacaagctttgccaacccgcatgatctccacaaaagccctcgtggatttcattgatgatctcgtttgcttctactagaagaatacaccgtaggagaggcattcaatagcccctcctatacaatttgccttctactatggtacaacaaggcactagatacaaaagttttcatgcctcgtttttgtcagttggaagttgcctgttgagaagatagttgactatgggtgtcatccaggtaggcgagctatctatcatctcaacttcttctttctcacatatacttggctcgtttaacacctcgaccagtaccaagttcaattcatccagtttattttgcgaggccaattttgctaagacatcggcattagagttttgttctcttagtattttctcgattttgaaataatcaaacttttccaagttctttcgaaccttctcttggcattctcttaggactcgatttacaattaattacgaatcactatggcatataatatttttaaccttcaacacttcagctatcttcaaaccagtaatcaaggcttcatactcagccttattatttgaagtttcaaattaaaatcttgtcacttttaaaggttgaatctttgcatgacacgtgtccgagtggtaaaaaatggtccccattatccagctgcaacacacacgggtgtaatgttacccacaggaccaatcagtcagctctgcattgtatataatttaccccaatagtgggatttaagcagagatcctaggtgggtcatc

SEQ ID NO: 134013 - DNA, 2405 bp, Cannabis sativa
aaataagaaatttaattaccattcataggtaatacccattatatgttataaataaagagtagaaattggaattaaaaatatagttattaaatggtagaattaaatatatatatatagttattgaaattaaaaacacatagaagataatgcttttgtgataaatattaaatggtagaattaacaaaaaaattgcatgcgtttttataataaaataaaggaaaaagataacagtttctaaatttaataaaataggacttctgactgatgatgtagttattttaaaaatattgttcagactttttttgttttatagaaaaaaacaatttaacatactatttatgaaagttttcatattttattttatggtactattggattgttttctccacaaaagtaaatgtattgtaaaatggttcgtcataacattatatattttttaaaattaaaaaatgagggttttatataaaaaaaaaatattaatgatagatttttagtctatgaaatgtataataagggggttaattttaataaattatgtggatataaaatttctactttaaatgaaaaggaaaatcatgactcacatgattaattatttccataatgaaatgtgtatttgtcttacttttttgtgataattaagatgataagtaccgtatgaagttggtttagcaatcgcgcgattgttataatcatcgaaaaataaattttaatttatatgattattggttattttagaattttttatattaaatagttgttaatgtttttactaaataagtaaaatattataaatcatgtgtctgctattttcttttttatttctacatagaaaatgaaataattttttattagtttatagatataataatattatatatattcatctaaaattaataattaaaatgaaaaaatctaattttttttatttgttaaagattttttgtaaaatttttaatatttaacaaattttaaaaaatacaaagatacgtgttgctttcatttaaaacaattataaaagcaactaagaaattatctttattttaaatatatttaaatgaaaattacaataagaaactcttaagaaaagactttttatataaatacttaacaaagattaaaaaaatgtaaagaatgtgttttgcattaatttaaaaaaaaatatactaattgtgtatgattaagttcttcaatcacctacataaaaataaataaataaaatactaaatttgtaataaactaaagtgaaaaaatagtgatctatatataacctaatttatatcaccacaataatttctaaacatactctttaaaaataactctcatattctagaaatataaagaaaaatatacataaaaaaatgtgaacagatgagaaaatgcaaaaagacttatagcatgccacttcaattttatttaggtcatcctttatatatattgttttagatatatttaaataaaattacagtaaaaaacttttaagaaaatattttttatatgaaatacttgataatacataataaaatacttcaataacccacataaaaataaattaataatactaactttgtggtaaactaaaataaaaaaaaaaagtgatctatatatataacctagaagtatatcatcacaatggtttctaaatcatattggactttttgaaaataactctactctaaagacataaaaaaaaatggagaaataaatgagaaaatacaaagaaagatttatatgtcacttcaattttatttgggctctcctttatatatatacaagattaagtttatcaattgctcacatagaaaataaataatactaactttaggacgacaaacgaaagtaaaaaataatgatctatatataatataaaagtatatcatcaatataacgagttctaaatcaattcagactttttgaaaatagctcttacattaataaaaatatgaaaaataaataaaaatgagaaaattaaaaaaatatacgaaacacatataagatatcacatgattctttttatatttttctttatataaatgtatatacattgatattgatcattactatcaaactctcataaaatttaaaaaataaaaagaaaaaaatatagaaatatttttctattttcctttattaaggtaaagaatgaaaaatgcttatttttatctccaacttgtctatttaaataatttaaactaaacatacaaaagaaaataacaaaaatgctcatataaaaaaattaatttgtataaatagttatataatactctaaaattgaaacaataaaaaacataataaaaaataaaaatatatataatcaatattgttcaaaaattcatatatgacattgaaaatcacttttacaaataaaattttaacttttgaacaaataaaaattcaaaaaaaaa

SEQ ID NO: 134014 - DNA, 858 bp, Cannabis sativa
ttattaatctcttatttaattctagaataattaaatattattttctactaaaataatatagttctctctcataatattatttagcaataatattatatttaactaatatatagttttctatgaataaaactaaatagttaaatctatttaattagtaaatttatagctaaataattatataaaataataattattcaaaattattattttttcctctagaattattctcatagaaattacttttttttttttagtttattcctcaaattaaaccttgccctatacaattttctatagacatgatccgaggaccatagacctatatttgaagctccaattaactctaaattactattgaactcatcaataactcaatttattaattctattattacttgaccataaatatagaattacactcgttgaaaatatagacttatattatagaattctttctagcagtacattaatataattaacataagtagttcctcctccaattattagttcataattagagttggtcaaaactaatgttttacccttctaactacatcttgaattctttatgtgccattaattcaatgtgaatattaatctataagtcccataatagatttagatctaattgtattcactcccagaattaaacactataagtgttgactgtagatttagccaactgacgtagagtctaactaggatcaaatttcgcttatgactgtcatgtgtggaatgataattaatattaagacacaatgatttatagaggtttggcccctatattctggtaatggctgttggaattattttaccagtatctagatttactaccaagtatgtttgattaacatccta

SEQ ID NO: 134015 - DNA, 569 bp, Cannabis sativa
agaggtaaaaatgatagactttaaaaaagattataaaaataaaagtggacaatataaaaagagtatagagtgcaattttctcattttcctatgaacaaaactaaaatcaagaactaatttgataatcttatggaaaaatgctaaggggtaccttatggtgctaaacactgaatgaggtgatatattattattgatacaaattaatattaaatcccatatattttgatttaacaattaatatagaaaaccgttaccactctgcacttcaccagtatagtattgagtaccataaagtgtaataatgctctaatattttgagattcattctaactgtccaaatttacattctcttctttaccctttgaatcatatcaaatccccactcattactctttcaaaaaaaaaaaaaaaatccccactcattatctaaagtcattctgtttgattgccaattagtttgagaaatttacttgatatactaactttttctatttttttacaaaaatattgtcaggcggtattttttacttttttactgtgttttttataagtttcatactgcaatatac

SEQ ID NO: 134016 - DNA, 955 bp, Cannabis sativa
  modified_base (116)..(117): a, c, t, g, unknown or other
tattttgtgatcattctacatacattttgtaactccataatgtatgttacaatttgacaaaattaatactttgtcacacttaattatttacaacttaattatttaatctaaatatnntattatataaaataatataacacagttaagttatggaaaaaatttgagttaagtagtgtttagtaaattataaattttaaagtgttattaataaaattttaattatatataatgataatgaaattaattataatataattgtcacaaaaatataaaaacttatgatatataaaaaatttgtattttctatacatatatttttttaatataaagtttgaatttataaataattaatttaaacataatttatagtattttcaaataatatttaaaatgaagaaaaatataatataatatgagtattttcttataagatgatatatgatttgttcacatcaaattatataaatattaaattgcttttaaaacaattaaaaaattaaagattcaaatattatttattttaatatagtattaattttttattttttagttatatatataataataaatgaacacatatattttaatatatagatgtatttaatatatactaggttgaagttacgtgcaatgcacgtcattgcacgtatgtctagttattttaaatggttattatattttttacctattaaataaataatattattttttaataattgtaaactttttaatataaaatataaagtaaaaacatgacagtaatttgaaaaaataaataaatcaaataaagtccaaaaaaaatgagaaatttttaatataataattagtaccaaaaggaaggtaatttggaaatatatgattttgaaattataaaaattaaaataaatttaattattttaaagtacttaatttatccacgataaaattaaaaaattaaaaagtttcaattaattat

SEQ ID NO: 134017 - DNA, 1088 bp, Cannabis sativa
  modified_base (178)..(185): a, c, t, g, unknown or other
ataattatgaaattaatcatgtgaaccatgcaatataaaatgcgatttctgatctttattaattagtaaacttgattattttaaatgggttttacttatggcacaaaacccaacaaaacttcctcccctagggaagcaaggtgcgcagagattgatctttgaccgacgaggaccgagnnnnnnnngaaacacccaaaatggtgattcaagaagtgagaccgatcacttaaggaatctagatccaccaaactccaacaattggtgtgatttacccccagtcaaccgaggagtcacaagcggtcaaatcatgcccaacgtaaatctggcggaccaaggatccatcataggcggctagaccctgccctttccaagactagtcggccatggaggagcactggttgggcagggtctggctgcccaagcacaacaaccaggtgtaagcatggctggcctaggccaactcctgtacctgggaatggtcgggcagggtttgtagggcatggctgatcttcaccatacactctcccaggtatgaatagccaacccctagcttttcaaatttgtagcctcctcaaggagggccagtcaatgaagtccccacattaacagatccttctgtgcaagcacattagaccaactcagggacatgatccagggcatagctggctcgaagcctttagacctcaaacttgatcagccgaggggatcaacattctcggcatatataaatgccctacctctgccaaagctcaaaatgctggtatggaagatgtataccgaacgagagaacccactggctcacatcaaatacttcaagatgcaactcaacctccaaaaggtcactagtgatgtccgttgtcgcttattcccagccatactgtcaaagacagccgaatagtggtactttaaactcaccttggcgagattcaactcttggactgagttctcacaagaatcatatacacaattctcgtcctcgagacttatacgatcgcagttgaaagaccttgtcaaagtcaaaaaaagacaaggggaacctctgaaagattatattcagagattaaagattgttggaattattttaccag

SEQ ID NO: 134018 - DNA, 1281 bp, Cannabis sativa
tgattttccattatatcttcctttgtccacataggagctatgaacttggtacaaacttcaaatgacgagaacgttgagaagggtgcatgatgaggaggatcatgttcttcagatctgccttgtctttttttttttttttttgaaatgagatctgccttgtcaactactgctagtttaggtgtattgcgattttcgttacagggttgctgttctcgctgtttaccatggtttctcggtgcaaactctaacctcaaggaaggtactgctacggcttcatcgactaccaaatcatgttcatcattcatattcaaacctacaataggatcattattgtagagggagtatcaaactcctcaaattgaatttatgctgcttcttgctgttgatctacattggtaggaacctcttcattcacaccaatcccaacgtttgtttcagaaacgaaagaccataccacactccgagggagaggattagtaggcggggtaggctccaaattcccaatttttctcaccttagtcacaaataatggcataaaatctgtgtttaatattgttgccctcatctctaagaacgttcttagttggcgctctttcttaataactcctggcggaatcatttatctcttcatgtacaaggaataaatctctaatttcaaatcatacgccaaaggatcaacctccaactcttcatataaaatttgacgcaattgttgtatggttgtgtcagttctaactttcaacgtcaaactgccttcagctttataaacccaattaaaaccctcaacacaccaaacatcatcgtatgatataacaagcaacacaattgatcctgcaatttgaaataacaaaaggttcgttagggaacaattctaaaaatagagaaatttaatataatcgacaacctatcaacatctcatcgatatcccatcgataaaaagtgtcaagatttcgagcagtgagaaaaatcaacaaagtgtcgatattctatcgatataatgtcatgacattgaggcagttgagacactcaattaaaatgtcgatatatcatcgatatcatatcgataaagatttacttcaagagcctataaaaaatatatcgaaaagcattcgagaaagatcatccctgatcttgtaacatgcttcgagagcctttcgagaacttattaatagccaatcgaaataaatacaaaacccaaaatactctgaaaaaagagatcttgcgattttgacaaaaattctacgaacaaccccatagatctaccgaaatatgctatacttt

SEQ ID NO: 134019 - DNA, 864 bp, Cannabis sativa
aattcttgtgttggtcgtcctcaacaaaatgctgttgtagaacgcaaacatcaccatattttaacagttgctcgagccttagcatttcaatcgcaattacctcttatttactggagttacatgatcaaaacagcttcctacctaatcaatcgcacaccttttgtcctcttaaatgacaaaacctcattcgagcttctcaaccacaaggctcccacttatactcatttaagaaactttggttgtctagcttatgcctctcatgttacacatcccaccaaattctcttcaagagctcgagcatgtattttcttaggataccccgacaacatgaaggcttatacccttcttgatcttcaaactaattacatctttcattccagggatgtaatcttttatgagtcaatttatccattagtcaatacatcacagaaaaatacaactcaaattgacaattttttctcaacctcaaatcggcattcccaatcagatgcctccaatgatactgcagtttcatttgcatcacttccatccaacacagaatagctttctcctgttccaaaaattactgaagcaacgaacacatctgatgcaacaacatctgaacctgctgcaacatccaacagcccatctataacaactaccaaatccggtagaacattaaagaaacctggttttttgcaagattacatatgccatattcaacaacaaacaaccagcacatcatatcctattgccaattatatttcctaccatagactttctccaacttttcgagcagccatccatgctgctcacttaattgaacctcgttcttatgcacaagcttgcaaagacaaggtttggaacaaagctatggacactaaa

SEQ ID NO: 134020 - DNA, 709 bp, Cannabis sativa
gatgatgatggtcgtctctagatttattctccaccgtccgatcgactagcgtcttgggagaagatggagaaacgagaggcgagagtaaaggaatcgctacgttccaatcggatacggggctgatctgtaaggaagccggagctcggcgctgaagacggctaggttggcggcgggttccggggacagagctaggtctagatacttctgccatggaaatgattgagtgagtgagttcgtagatcgtaaagaagaagaaaataagatgttgaatggttttgatttgggggctaagggtttgagagagtcatatttatatgataggggtttgagcttggggcgtgtggagtgcacggattcaagtgggccctcaattaaagagggtttgaaaaacgagaatcggacccaatatggatcttagttgtcacacgcgcctcggctgtcggctcccctttccttagagctcctagctggccataggattcttttctttactctcaatagggctgtaaaaaaatttgtaaaccaataatccgttcaaaccgaatttaaaaaatcgataaaaattacaaaccaaaataacccgaaaaaattacaaactgaacatgggcagattgaaaataagtccaacccacccaattaaactgaataactcgacccagtgacggacccagaatttttactttgtggaggcttatttatcataaaaaaa

SEQ ID NO: 134021 - DNA, 543 bp, Cannabis sativa
gcgcaaactcgcgcaatccataaactacagattttaacaaatgaatacccttagaggaggaggtggtttgaatgtctgcagacattctgtagtcttcatatcccacacctataaaacaaagccaaaaagaaaattaagaccaatgatagcctgtattgactcaaagaagagatgatgtaggctagtttcagatcatcatcggtgatcaaaacatagttgaaaaactcactttaaccgtgcaatcactagatgcagtaataacacgagctccatcatgtgtaaagattgcatcatttacataagatccatgacctcggaattcctttaacaacttcccagatttaagaccatgaatcctgcacaagaataccattttattactagatcagaaagaccatgaagggaactgatgaatgtgacaataaataacataaagaatgactgtatacagtgacgaagccagaaatttagttgagtgagggcttgaataaatattaagtcaaaactaataaaaataatgataaatgtatctttcaaattttc

SEQ ID NO: 134022 - DNA, 2289 bp, Cannabis sativa
  modified_base (151)..(158): a, c, t, g, unknown or other
agtgcttctagctttcttaaaagctatcccaaacgcacccttaattattatcgatctcatcaatagaataatctagtttattaatttcattattacttcactatagatatagagttattctctttaataatatagaattatatttacagannnnnnnnttgtagtccattgatataatcaatataagtagtttgccctctaattattagttcataattagagttgatcaaaattactattttacccttccaattatgtcttgacttcttatgtacccttaattcaatgtgaacagttaatctataacttattatagatttgaatctaactattagcactcccagattaacactataagagaactaatattcaatccgttagatttcattattgtataacatgttccaagtcactcatgttattaagctctcaaaacagaagttgtaagaatcatcttctttaagaaattttaacgagtgtttaaaaaaatgaacataaacaagagttcatgtacactcaggattcaggctgatctagtaatgatcatcgttgtgacatgaataactctttcatggtaaacgatacgttaatgaaatatgtttatcacgtatcagtccagtcatgtataatcgaattatacacaacacatttactacatgtctatccacatatgtgatccgaataaaaatcacacacactaaaagtatagtgcatagtaaacagtacttagcattttcatattaaagattctcattactttaatataccaccgacttgttttattcatatcgtataatcttaattatcttgtacatccttacaagattataccttctccatatgaataaagaatttttaaataattattaattatattattataattaatatatcattttttttataatggtatttcatatattctgtaatatattattcattaattatttacttttaagacataaatccttaaaaataatttaaaatatttatatatgtattacaatttgaaataaaattatttaattccttatacaaataaattatatatatatatattattgtgatataattattgggatatttagctaaatgaccttaaaaaagtttttctattggctaactaacctttattttttcaaaatttagctacactaactttctcttttagtgaaacttttatatctcaataatacccttttatgattttatatttatttttaattaaaaatagaaaaatcatatcattaaaaaaaaaacagccctcccccctccatcacattccttttccctcacatggtgcttccatgctcttcctctatttttctaaaaatctctcaaaatcttatgaaatctcttcaaatttgtagaaaattaatttataatacacttacatatagataagatcaacattattgccaaaaaaagtgattacattggtctttaagtcgttaatggagattcatgaagatctttcacgaaagtgtctatttttgaataattttgactcaacttgagattctcaacctttagagtactttgagcatttcagtccaaatattaatgcatactccatcaatgaaaattagattggtatcccattcacaacaaactacatctttgaatctcggaatctttgtaacaatctgcttctcgaacgagtaatagccacatcatttgactaaaatgtctatagtagtcggaaatatcgagaaagtgaccgaatggaaattctttgaataattttaagtgagttgggtcattctttagtatatcattaatgtgcctagtgatttcgtccatcagactttttatacttattttgcactcaaaatgttcattttcctttactataggcagcaatcgagaaatcttttccacctgcaataaattaaacataatctttctactatttgaataacataagaaaaataataataaaataaagtgaacaaattctaaaaatatcggatgtgttttgtctcgtgacactaatgaaggctataattgttcttctccatcaaattcttcttgcttttctccatcggatctacttgttcatctctattagattcagcttgttcttctccatctaattttgcttgttcgtctctatctgattctaatttttcttctccatttgtttctgattatttttcaaaattttccattgactgatttaaataaaaagatgtaacattatatcaatcgagtacaaacataatagtcaagctttacccacaagcggtcgagctcaactcaagacagttgagctttatactaacatta

SEQ ID NO: 134023 - DNA, 1051 bp, Cannabis sativa
gaacttgaaatcttgctttgagcttatcttcttcattatcctggacagatattccatacacaagacaaataataagggtgacatggggtcaccttgtctcaatcccccttttgccttaaagaatccattcattgaacatcaaagaaaaccttggtgttctcacaaataacgatgagcttgacgaagctttctggaaatttgaaggcacttaacatttcctcaatgaagtcccattccagtgtatcatatgctttttgcaggtctagcttgatcatgcaattaagcttcccacttttcctcccatagtgtcttatgagatccggacagatcatcatattatgtccaatgaacctcccttgcacaaagcaactttgattttgagatacaaggaaaggcaagacagatttcaaccttttgcatatcagtttggtagctactttataaagaacattacagcaggcaataggtctataatcagcgactaagttaggacacttacttttaggaataagagttaacacaaccaagtttatctccctaagaagattgcctgagtgcaaaaaggatgttatagcttaacaaacttcagtacttataaggtcccaattgtcttgaaagaaaaagctagagtagccatcggggcgaggagctttatttctaggaattgcaaaaattgcttgcttgacttcatcgaaagaaaatctctgaaaaagcacatctgcttgtgtggtcgaaacaacattcccttgtcttataatggtttgcagcactttccttatattctgcattttgctcccaagtagcatcttataatagtcaagaaacatgaatgaaatgaggtgaggttcatcagttcttaccccattcacatctgaaatagagagaatgcagttttgacttcttctagcccgaatgctattgtgatagaatgctgagtttgtatcccccttcctgagccaagataatttttctttttgttgtagaaaagacaaataggctgcctgtgttgttgcaaaaagttccctcacctcagcctcttgctcttgtaaat

SEQ ID NO: 134024 - DNA, 520 bp, Cannabis sativa
ttttttttttataaatttgagatgcagctgaatattaccgtcaattaaattattactgtattagctttgaagttttacttttacgtatacataggtggtaatatttagttgatgtttaaaatttacaacgaaaaataaatttaaagagattttatcacaaaaaaaaaaaattaaatatacaaaaattaaaatataagaaagtttcgacgccaactagtcaaaataaaattatatatgcttttatttaaaagagagattctccttttcaaataaaataaaatgaaaaaaaaaaagaaaaagaaaaaaagagattctccattccatttcatatcattctcatatatatattctcattctcatatggtgagacaaatgaacaacaccctttcttttcatatcactaattactttgaaaagaatctcataattatataaatccatgctaattaaatatgagaccacaaattataagaatgactttttccccacttatatctcattctcatatatatatatatat

SEQ ID NO: 134025 - DNA, 1449 bp, Cannabis sativa
tatggaatagattgaatatacctagacatattgaatatacctagacatagctaatatacctagacatagcttttgcttatggatagctatacaggataggcttagaacaagagacaggttacacaggtttaagattattgatgaaaatttatgtttgctttgcaagaaccaaaccaaaacttctgaacgtctttttttctcttgtcccttctcttctctttgtctttcctttgtgaaattatggctgggatggaatgttgaaacttcaacacttataagattgataaggtggttggaaagaaaaaaatcagtaagtttaaaaaagctgtgtatacaacttcagttgctgctctcgtgtaccatctgtggaagaaccgaaatgatgtcttgtggaattcaggacaacaaacaccagaacaagtagcaaactcgatcaatgtggctgtgaagaaccgaatatcctgcacttggccaaagaaagtgcagccgacggatggagattggtttttgagattataaaaataattttgtaactaatataggtgtttgaaaagtttacaaagaaaaatgtatagattgatattcaggtcttcatttgaaagtcctaataggttgtaaattgttatttggagtaatgaaattcatgattgattgataaaaaaaaaagacattgtttttgtcgtgttaaatttttcaaatttctcaaaattttataaaatattttaaataattacaatgcacccaactataaaaattagactaaaaaatttttttgaatgccgaaatagattggggtgcatcgcttcctaaaatttttattcaatttttattttattggatttgatattatatttacatgaattaaaataatttaagatgtacaaaaattattaaaatgagtggcaatttgaaaatattaaaaatgtaatcacatttagttttagagtagcaaagagtatttttttttttttttttttcagaatgtaccaattaatcatttttcaaaatacaaggtattgtgtgtattttaacaaaatataagtatcaaattctatttatcgaattttgaagggatttttacactacatactgaaatgtttaaatttttttttattgtgggggggattttttttttcaaaaatactgtgtttttttttttttaaaaaaatattgtatattttttatactggatactgtgttaaatttttattattgtttcacggttgttttttagttattccactgttgttttaattgttttatagttgtttttaaaaaaaataatattttttgtaaaaaattacaagttaaaattgtaaatttttgcccaaaattcaatatttttgtaaaaataccaattttgtagggaaatttacaccctgtactgatatttcccattttatttcttttttactgttacacggcaattattatatttttactgtgtat

SEQ ID NO: 134026 - DNA, 712 bp, Cannabis sativa
tattctttaaaaattattatattagattacatagaactcgatacttaattgcaccaatagcgatattgacatataagaaagtgttaagcaccaatatctttttgcatttctgttttgaaaaatgtatgtatgaatgtgggttggccttttcaaacttcgaacggttctttaattagtttatttggtaggtttaaataagatattaatcattgggataaatgcagatagagggaccatcgttttacgatattaggcaataattccataactttctttagtgaagggcttcagattagctctgttcagcccaattttctaacaagaaataggcctgggaaaaaacaataatgattctacccagaaaaaataaagcttactttatttctattatttatttataatgaagtgcacgagtggctttatttatttaattaacttagatttaatatgatcccttttaaaaactattttcttttttcttgtatgtgcaaaagataaaatactggtcaaaagataagttagtaattattgaactaatattttcattaatttggaagataaatttagaacgaataataattttttagctaattaaaatttctgttccttgaactttgatatgtactaaattatgcctcttgaacttttaagatcgttaaaaatgcctcctgaactattaaaattgttagatttaaggacttttgtcaaattt

SEQ ID NO: 134027 - DNA, 766 bp, Cannabis sativa
cggcccaaagtatttttgtaagtatttttgtaattttttttccttttttgtatttttttgttttttcccaaatacaaaaacttaaagataaaacattattaataatatgattccctttcaaaaaaaaaataataaataaataatatgataaatcttcctcaaatcttacttaaacataacacaaaaatttgtggtacatctaagctaaattttattttatttatttatcttttgtaaaacatcaaagctaaatttaatttcaaagtactgtaaaatactaaaaaaataaataattaatagttttgccccttaaactttcaataatactgattctgcccttaaaatatacgtcttataaaaaattccatgaacttttacatttacactaaactagttagtccttttgttaagttccatctcatcattccactgatgtgtctttgtaaattagctactttactcctaaactttgaaaactatcaaatcgtactctctaaaaataaaaatgagaaagattcaatatttttttcagtaaatcttaaaaaattaatttagatcttaaaaaaaataattttaaataattaagaaaattaaaaagcaaattaaaattttaaaaattatgaagtgatttaaaaaattatttattttttattaaaaaatccatttataaataaaaaatatactaaaaattaatttttgtgaaaactaaattttagggaaacaagtttgagtctaattttttttcttcaaaaatctagatttgttt

SEQ ID NO: 134028 - DNA, 597 bp, Cannabis sativa
attataggagaacattaaaactataaaagtgggtaaaaaaaatgaaatattaaaaagagggtaaaaattaaaatggttaacttaaagtgggtaccccacgcaatttcctcccaatatactattcatgattgtcaatccaatataaaatcactatgggcttttattttaaatggaccgaaagagtgaaattatacacaaacgacaacatttaagtaaatctacgttgtttttacaaaccaatacaaaacgacaataatcagattaaaaaaatacaaaacgacaataattttatattccaacaataatcgggtacctacaactacaaagaattaagaaagtgtctttgccgaaaataaataaataaataaataaaaagtggtacaaacaaatattttttatattttggtggctaattactctaaattaaactgtgtaaccctagatgggaattacactctatactatttttatattatctttttctatttttgccttttttctaaagtttatcatttttatctctttttttaaatattgtactaattttgcctctgtcacttcaagatactctctatgtgactctcttatgtgagggta

SEQ ID NO: 134029 - DNA, 993 bp, Cannabis sativa
  modified_base (666)..(668): a, c, t, g, unknown or other
  modified_base (816)..(839): a, c, t, g, unknown or other
tatgaattaaaatgatgttttgtgttgatttggatggtttcatgatggtttatgtgcttatttgatgattgtttggaaattgtaatatatgttgtaacaatattttttattttgttctcgaaatattttcactagaaagtagacgtataattaatgaatttaggctttacagaactcaatttggattttttcatgaatcaattatgattttttgaatttagataaaaatatttgaaaccgagcaacacacgtgcacgcgcggatgggaatgcttgctcggacaagatgcctttagacaaggcgctgtttgaattttcccctcctgaccaaggtttgccccccatacaggctgcttgcagcctctccctcgcccatttgcagcctcatgaggagtatgcaatgcatactcccctagtgcaatcttgttttgtgatatcttttgattcaaaaatcgtttttcattgaaaaaaaaattaaattttgatagaactttgtgtagaatctaaatttttaattaaaaatctaattatcagaataaaaataatttttattatttttttaattaattaaaattagttttagatgttagtaggcttttttttttttgaaaatttgatttttcataaaaatagacttatggttatttttgaaattttagattatttnnnttattttaattataagatcatatattacatttttttattattaaaatttgaatgatcttattttaatattaaaataattttttttttaaataatcttgttaaaatttcaaaatttgttaccatatcatatttttttttttcaaatttnnnnnnnnnnnnnnnnnnnnnnnnaattaaaattataagatttgataaatgttcgtttttggccaacgacactgagtctatttagtaagcgacaagtagtttataacgattgaaataaaataaagcaatatagacaccagaattttatagaagttcagccccgagcagttcgataata

SEQ ID NO: 134030 - DNA, 716 bp, Cannabis sativa
taattctatattttacattagttttatatttattcattcatttccaatgtaaaactatatatattacattaagaaaatgtaaatatttttttttaaaaaaaaaaacattattatattcgacggtgaggatatatataggaagacttttatttttggcggacattttaagaaattattataaaataatctatttcatatatacaacggtttatgtccagttagttaaaaaatttcacattgttaatgtgtgaataaataaaagaatatataagataaataaattatatattattcttattattaattggttttgagatcccgaattctaataattacatctttaacattttatcatgattttttttaaataatttagggtaccaaaatagattagagagttaaacaatagaaatttcaggaaatttgaggaggcaaaatgtgataagtgtgacttagttgttatcccatcaaaatcaattatattcaaatggtcttttcttgaaatacgtttatatataagaataagatttcatgctcaccacattatataaatgtttttatttatttattttgacttattattaatagactctctatgcagcaatttataatttgtttctccaattattgcgagtcagatgagacaaaattatttctaaaaatttagacaataaaattataacattctcaaacaacacccccaacttattaaaaaa

SEQ ID NO: 134031 - DNA, 1082 bp, Cannabis sativa
  modified_base (220)..(220): a, c, t, g, unknown or other
taaaaaaaaagattgggtacttaagtcatacaaatatggaactttaggtacttatgccgctattttttctttttttttttaaaattcaattctttttcatatatatttttatattatgttataaaataacacgaaaaaaaactatataaaaataataaaaaaaataacattcaaacaacattaaaataacaaaatatcaacaacaaattaataagagtanaacataaaaatacattaaaagactgtattttttataaataaaattataaaagtcataaaaatattttaaaatttcatacaactatatttttgtagttttttattatttttgtgtatttgtgaaagaataaaaaaaaatacagcatacccacccttttattacaacaatttattcgtaatcaacaaaaaaaaagccaaaaaaattacaaaaatggtgttttacagaattctaaatatttatagattataagatttttattatttattctttattacatatgacaaaaaaaataccaattattaattcacaattattgtatttttatattgtttttttgttgggcttatggttttgttatataatttatataatataatatttagattaaataattaagatgacaaaataataacatataataggaggttatatagtttgagcataaatcatagaaaggagttataaaaatccttgaatgatgataataacaaactttataactcctctccagggccggccagagggtggggcggccggggcatacgccccaggccccactattttggaggccctcgaaaaattaaattgatatatatacacacaaaagagtatatatctcttttagttcaacaaatatctagagaaagctgtagcacaagtgggaagcaaggaagcataaatttgtaaagattgttgaggtcctgggttcgattcattgcttagtccaattttggttattttaaatttttttgtatattacataatacatccatataagaacaaatacatagtgaagaattagtttaaatttgtaaggtttattttatttatttatttctttaaaataagaatataatatttt

SEQ ID NO: 134032 - DNA, 502 bp, Cannabis sativa
  modified_base (70)..(73): a, c, t, g, unknown or other
tctcatgttagccgcaactttaatgttgaggctcatagattggctaagcatgcccttaggatagacaatnnnntttcttggatggaagaaattccccctccttctctgtaactttttttaaccgttgttatcttaatctttatcggttaccccaacaaaaaagaaaaaaaaatctttctccaatcaagaaaatttattattaaaagtaaacacacaactcaaaagtttacctataaaatagcctcatatatttaaaaaaatatttccatgaacaacttcctaaaaattctaaaaaaaataaataaataaattttcttttactaactctttagctttatgaccaattatgaaagtgaattttttttctaaaaatacaaccattaaaatttaacttagttagtgtcagattacaaatatcaataacttgggtagtcaaaggtcacactttgacccttgtagaaagataaagcttataaatgatccttttatttatattacaaaa

SEQ ID NO: 134033 - DNA, 1990 bp, Cannabis sativa
ttttaggtattaaaaagtagaaaatgacatttgctttattattttaaaaaagggacattaactatctatagagttagaaatagggtcatttacttacatttctctgttattaaatcaagatcttaataatttgagaatgagatccatcaattaatttgagtattttaaggaaaaaaactgtatatatagatggttaattttttattaaatgaaaaattagttgacgtgtcaaacttaaggtttaacacagtatgacacacaactttttaagaggagattttgattcctttttattaggttatttttttcccccgaactttgacatgtaccaaatcatacctcctgaattttaaagaccattaaaaattcccttaaaactgttgagattgttgaatttaagaacttttgtgtaattttagtaaaaaaaagtctaacatggataaaagtttatggggcatgatttggcacatgtcaaagttcgagaggcataatttggtagatatcaaagtccgatgagcatgatttagttcatggacaatcactgaattatttaaatttaatgaaattggataaaagtcattaaatctaacaatctcaatagttcagggagaattgttaaatgccaaaaaaaaaattaggggcatgatgtggtacatgtcaaagttcaggggctaaacttcttaattaacctttttattatactagttacaacaatacctgctacgtagcgtataattttagtcatgtaatgtatttaatagtaaaataaatctcatttaatataagagtttttacattacatactgaaattttcaatttttttttacttttttacggtggagcgaaatttatttcaaaaatactgtgtaggttttatactgcgtactgtattcagttttcacggttgttttttaattattctactgttgttttaattattctgttttattgttttacggttgttttataaaaagatagtatttttgtaaaaaaaatccgtatgtcagtaaaattataaacttttgcccaaaatttagtattttttgtaaaaacttcattaatatattcaaataaaatataattatcatatggttattagtgtgacgttcacatgataaaaatacattatctattatatggtgatgcatatagcttattttgccaaaaaacttgatccaaccgtattttaaatattgtgccaaaattaatatattacaaaaattatattaaatttagcacataaatagtataatgtaaattttatatcaaaaacctaggtacctttttatgttctgaaaggcctcttcgcactcttctatccactcaaatttcttgttgcctcgcaatacattgaagaatgataaacacttattagttgacttcaaaatgaatcggttgagtgcagccatccttcccgtcaaggcttgtacttccttaggctttgttggtgatggcatgtctatcaatgccttaattttttcggggtttacttcgatacccctcgcgttgactatgaatcccaaaaattttcttgaggaaacttcaaaggaacattttttcgggtttagcttcatgttataattttttaatattttaaagcattccgcaaggtctgtggtatgattcccactttttattgattttactaacatatcatcgacgtaaacctccaacttctacccgatctagtttgcgaacatctcgttcaccaatctctgatatgtttccccagcgttcttcagcccaaacggtattactttatagtagtagagtcccatgttggttacgaagctcgtatgttcttgatctgggacatacatttttatctagtcatatctagaatatgcatccataaatgacataagcttgtgcccaacagttgcatacactaactcgtcgatcctgggtagtgggaaatagttttttgggcacgccttattcagatcataaaaatcaatacaagttctccaagttccgttaggctttggga

SEQ ID NO: 134034 - DNA, 1121 bp, Cannabis sativa
ggaccccaaatatcacaatgtatcaagtcaaatttattgggagaaaaagtagtattattggaaaaaggtaattttctttgtttagctaagggacaaacataacatggcagttttttgtgcagagaatcaaaattacaattcaaagtattgcttagtaaagataatcgattcttagaaggatgtcctagccttgaatgccatatgtcagcaggaaccgtgtacacatatgcatcttcaggtgtagggtccaatatgtagagaccattctttactctacccttgccaatcattttcttggtgagattttcctgaatatgaaagccatcagtttggaaaaaaatagaagcaatactgtcatgaatgaggcagctcacagaaataatattaagcttgaatttaggaacatatagaacatctttaagagttagagaatcattaattttgatatcaccactatgactaacagtaagaacatcattattgggtaatatcagattagttgaacctacaggacatataaattgaaacaactttgcattattgcaaatatgtcttgtagcacccgaatcaactatccaggagtgttgaaaaactgaaatattgctgcaagttaaaaccatacctgagttacctgtagatgaactcggatcagcaggtgtaagactcggttgttggtttgccaaaaggttgagaagttgctgatattgggcagcacttaattggggaagaaatgtgttgttgtcctcagtattggtgttgttttccttgctagtttgcacctgattagcagcttcttccttttgtttattcttgttaaaacctggtggatatccatgtattttgtaacacctttcaatggtatgaccgagtatgttacaatgggtgcaaaaaggcctgtttttctttgaagtatggttcttggttccttgattttcaggtttagaattggctttgttgttttgaaaagcgaaagccatgtttgtaggtgggtcggctgtagcagcagcagtgctatttttctggttttcttcttgagtcacaagatgaaaaacgcgattaacttcgggaaggggatccatgagcagaatactaccacgcacttgagaaaaatggtcagataa

SEQ ID NO: 134035 - DNA, 824 bp, Cannabis sativa
  modified_base (95)..(96): a, c, t, g, unknown or other
tctaaggtttcctaaactttatatgtgtttatttcattgtttttagaattcatattaggatgttaatgaaacatacatgatagtaaatctagatnntggtaaaatatttccaacaaaaacctgctccaatgaagaaggacgtaagtaagatagacataatatggatgattcttacaacttctgttttgggaatctaataatatggatggctgaaaatatgatgtacaattatgaaatcttgactttcctaacaaatcaaatgttgattccatttatgtgttaattatgaaactggaaagttgtgcaccaattcagatgggattttaaattatactcccactagttaattaatagaattaaagaataaagaagtaattagaagggtaaaacagtattttgatcaaaactaattacaaaccaacacatggagggctaataaatagaattgattatatcaatacacactgcagttaaactcaataaatataattctataattactaaaagtacaattctatatttattgtaacgccctaaaaaattaagcacgttacccaaggtgattaagaaatcctaatcccctaaacgggattactagaaggataaacaagggtaatttaaactttaataaaaaatagattgaaaataatacttgtaataaatttaactttacaataaaaaattacatgtttcgggatctcaaaaatattttacaacatattgcaagtcttttctctacccgacctaagcggcaaaatagagttacaaaagttcgtcactggtagaccccaacccgcttggtctagtatggcccgaacatgtac

SEQ ID NO: 134036 - DNA, 771 bp, Cannabis sativa
agaaactaataaaccaaaaccaaagagagaaattatagaaccatgtcaaaagacaagacggacaagagaaactaaaaaactatgtcaaaagacaagactaacgggaaaacttaattagtttcaatacagaaactaaaaaactctaaccccataaaacattaattggaaataatctaaaaacaacaaataaataaaataagcaaataaaaacaaaactaaaaagagtagctttcctttgaacactctaaaaactacaaactattaagcaaacagtttataaaaacaaaatcaaaacttcagttggagaagtcggtcataagaaaaccgcaggaagaaattgcctgcgtctgtgaagaagacgtcaccaacggagatcacggcaccaacggagactagggaaaacgtgcaccaacggagattgctgagtggtcgctgcctccgtctgtgactgggaaacgtgcaccaatagagaggtcacggcatagttgcgattcctaacgaagcttcatgcgccgtcgcctgcgaagcctgagaatcaccgtcatccaaagaggggaagaccgaaaaccaccgtcgtctgtgaagggaagggccgtgcaccaacattgcctgcgatggaccctagagattagggtcgtgcgaagggaagggctgtgctgccgccgtcagggacggacctactcttaacaatgtgggggctatagcccccactaacaaaaatattgcctaaaattaaatgtattttttttaatttgataattataaactaaa

SEQ ID NO: 134037 - DNA, 588 bp, Cannabis sativa
aacaatcaattaaagtcatgacaaccacaaaaatattgataacacgtttgcataagttttatactcttactcttgatttttattgttgacagagctattggacatttaaaatttagtttatgagtatagctaaatagtgatggagagctagcttggactaaataatggagatgaagtagcaggtcataacaagctctattggaggggaagcataggttgttgtccaaatgtatagttattattttgtattataggactaggaatatgaagttcatcaccttaatatactatttttattgttcaatttatgtactgatgaaaatgttattgatatgataataagattatgtaaagatactatttgtatataagtattgtttcaaataataaaattactatttgtgtatatatagaaatattttaatttatgatatttttgctcttattatgtaaaaagaaataataaataaataaaaataaaaaaataatactattttctattttctatttttgctctgattcgcaggacgacggtaccctagaaggatcagggggatccctgccatcaccatctccaccatggtatgt

SEQ ID NO: 134038 - DNA, 856 bp, Cannabis sativa
aattaggaaaataatgactatgtcttatttataaattttactaaagaatgacataattgagaagaaaagagaattcctagtttgtttattaattatgagacattagagggcctaattaataaatatatttaaatggtaatttgtttactaattaattatgaataagttagcatttagataaagttagcatttacgtaattagaatagataaatgacagttttgaagatagaaaagattgttttatttaaggaaacaaaataatgacaaaaaaatcaaacccatgggcccttaaaggggatttcaaccatggacttattttagtgtcattatatctttcttaatcaacccctttagttctataaccctattatctccctttaaatagaataaaatggcttttattctaaagtctcgctagactctctttcgtctgataagttgaatgaaaggcatagctattattattctattgataaaatttgaaattctctttaattttactctcaaattttgtgctcctgggtgttgagagattgcccacaaatatcaaagcaataatcaacatagtgagaaagactatgtaatgtaattgtcatctgaaggagaatccaagttcagatcttgataatactttgctactgacatgaattaagagtaagagatcgagtcttattattattcttccatcactgtaaggatttcttagtctctcatatgtttatttatcatatttaagaattttatatttaggatgttagattataaaattataatcaacatacatgttagtacatgtagatcctggaaaaataattttcaaaaatttgccttagagtcatggtaataatttacttt

SEQ ID NO: 134039 - DNA, 1529 bp, Cannabis sativa
atcatattctccttcataatattccctataatcaaattattttgaacacctcgtaccaaacgccccctaaaatttgaaaccccgagaaaaataataataaaaaattatgtttttatttaattagattttataattaaataattattatttagttttttttagttttaaaattatttaataaaatatttattgatagtggatagttaatcaattgatccgtgttagtttagtcagatatactatagtaggatttgaaagctgctgtaaaaacgtaacatatattatttaatccttcaagaaaaaaataacatatagtagttaatttgtcgaaaaaaacatgtggtacatataagtgtatgaaactgaaaagataagatatttatatcgcaaatatttttaataatgataagagataattgcagtataaatatttaaagtcttatgtttgtaaccggcataagtttaataatttttttagtggtataaatacctaatgttagtaaaagtgtaattttcatccaatattagatttatgcaggttagaaattcaaaactttgagtacttataccgctatttacctcatgaaaaatttaggtgtcgtttagtaatacttttattttttaatttttttatcataaaaataaaaataaaattttgtttatgaaaaacaaaaacgcattctataaccacttttgtttttcaattttaaaaataaaaaacaaaagtgtattatgtaaaatttattttcatatttaatttttgactttatttaagttaggtctaggtccgaagtcgagtccacgtccaggtcaagggccgggaccgggtttggatccagtttgagtctagtcagagttcaaaatattgattaaaaaaactatttaaaaaaatattaaaagtgatttttttattttcaaaattttaattctcaattaaaaaattaaaaagtgaaaaatagttttatagaatataattttaaaaattatttccaattttctaattttgaaaacaaaaaactgattaaaaaaatattatcaagcgccactataatttatttaaatttgtacttagtctttagacgagatgatggtcgcgtgcctacatttttttgtttttttgttttattctaatacgccaaaaatagaattcaaacaatctgttatacgtgtaattttttttattttatacgcacgtgaaatagaatatttgaatacgactttttatattataaaatattcaaaatttctcaaaattttagaaaatgtcttaaataagtataacatacacgactataaaagaaatagataagaaattatcctaaatactaaaacaaataaagatacatcagtacaatacattgtagaaacaccctatactatatttgtgtgaaaatatgcgaaaaaaatagacatgtattaatccattactataatggtaccctatatgaaaaattatatagaggtaggggtgttcatccgatccaatccgtacttttttggtcaaacaacatccaatccgcactaagtgc

SEQ ID NO: 134040 - DNA, 584 bp, Cannabis sativa
  modified_base (528)..(542): a, c, t, g, unknown or other
ttccttagtggccactctccactcaccaggtggaattattacatattaactaccaaacattgcattattattgtgctcagcaccttttataaatagcactataaaattaattagcgatattttttaaatgttgtattttaaattatataagatccgatatttaattaaactaataatagtatgacatagaaaagaatattaggcgccagtaatatcttttaccatttttcttataaaactcatgatgtctaacaccacaataaaatattatcatataattagttagtaattttctataatatttattaaattaaaacaagtaggattgtgatattaaattatactaataacactattataatttacaaaagtattagacaccaatataagtataattatactatacgcatatgtattgtgatatatgaaaaaataggtatatatatgaggagtgttactaacctcttattataaccttgcagttaatttatgggtctgaaaatacatattaaaatatatttttttaannnnnnnnnnnnnnntatagttacaatattatttctgtaaatttttgaatagtttac

SEQ ID NO: 134041 - DNA, 649 bp, Cannabis sativa
gcccgaatctccagcaatgtgtgggcccccaatgatgacttgtaaatgcccatctaatggtggaggcattaataggtcttggttgttatttgttagagcggcctgttgattctggtcggcctggacgtacttttgcatgtgcaggttatttttccttatcagaaattcaatttcccgcttcaggttattgcactcatttgtgtcatggccatagtctccatgaaaacgaaaatttttggacatgtcccttttacttatgtcctttttcatggagtagattttttgtatgggaccatagactaggttgccatgtagattgtctctaggtcttcagttaggacagaaaagacagtaaatttggagacattctctctaggggtttgttcggctttccctacgaactttcccttcttcccatttccttgcctgccattattgttggatcttttatcgctcagagtttagttgctagtatattgcaggctttgagtggttgctcctgttgaggggacctgtggttggcccgacctaggttcgacatccgcccgttgaatggcctcttcaagcttgataaagccatctgctcagtctagaaactctaccatagagcctatatggccccttttcttaatgtctttccacagttctc

SEQ ID NO: 134042 - DNA, 587 bp, Cannabis sativa
taacgtacatacctttgcccggttgccataacgaggccatgagatggcgcattgcatcaaaatctatattacgttcagtcaaaaatcgacccactaaacaccatcgatcgtctatggcaaactccacagtctgatcgacaccgtacgccaacgcatcatcttcctcctcttccgccagaatcggaacagccatgttgttagttccactggaggatgccataaccacccaacacaagacaatcactcaataagacaaaacagaggaaaacctcagacaaaacaaagcatgtcaatagacaagaccgttgtgattagtcacaaatttttttataactaaaagtaaaaaattttgtagtgaaatttacaacactaagatatgaacgactaactcctaacttgtcaatttaattaataagaaaattagagaatgagtaattcggttgtagttattgaagttatatcctacaaatgaatcattaaaaatttattaaaaatgtatatatatattttttttttgacaaagtgattaaaatcactcatgaatttacgacgcccacgtccgccaccggcgctggaacctcctcgaa

SEQ ID NO: 134043 - DNA, 887 bp, Cannabis sativa
ttttttttatggagatcaacgatattttaattggtaaattaacgtagtatgaatatgttacttttttataattatttgtatacaatgttgaaatataactaataagtatctaattgatatgataagcaactaaatagttgcttttattttgaaataacaaattgttctatttaaaattttaggcatctcataaattaatgaaatttagtttattttaaaaactaaagagttgtcatgtactttaaaagttcgcacacatagcaaattgttctatttaaaattttaggcatcttataaatgaatgaatttggtaactttaatttaatgaaaaactgataagtttagatacatgttggtaatatcagttaaaatactgataaaaaaatcatgttttagtaacatgtgaatttggttcgcatattaaattttaggctagctgtaattttttcctccgaactttgacacttgtcaaattgtgcccactgaattatttttgacattaaaaatttcccctaaatttttgagaatgttaaatttgtggtattctgtcttgttccgttcattttaataacggattgctgacgtggctcttattatgtagtccatgtaatttgacacgtgtaattttcattttttttaattttatcttttaggtttattttagggttttcaaacccattttctccaccacccacgagcaaaacatccccacccaccaccaagagatgacgacgaaattcccccacccaccaccagaagaaattccgacgagaagaacttcgcccacccacatcgacgagaagaacttccagagagaaaaaaaaaacccatttgttgctcaaaactaccaacccaccaaaccagttcagattaaattatgaaaaggt

SEQ ID NO: 134044 - DNA, 536 bp, Cannabis sativa
  modified_base (501)..(505): a, c, t, g, unknown or other
ttgcacatattttgtaattaattaaaataatgtatattgtaaaatgccctaaaaaaattgaccatgttgctgttacaaagaaataatgtaatttgtttttataactacacataatattgtttttctattatgtcacaacaacattgttttgatgttgctcttacgaaacaatgtcattttcatgtggaaaaatataagtcaaaacttgtgaaaaatccataaaataaatccgtaaaaaatgttaatgtattaattcattagatttgaactttttaaaattccaattaaccctttttgcaaacttaacaagcaccaaaaatattgtaaatgaaaaaataaatccaacacaaggtatctctcaagttttcaaaaccttaagatttgagaagcttcaacctaagcagttaagaatgaaaatacttctgccaagttttaggcttacaggcccataatgtggctaaatgggcgctgccccaaaacatttcaggtttcgtggaggtnnnnncgataccaaagactatcatttgtaatgaccg

SEQ ID NO: 134045 - DNA, 529 bp, Cannabis sativa
  modified_base (484)..(488): a, c, t, g, unknown or other
cgctagtaagtcttccttctcaacctcatctaccaatttcccttaacctcgttatcctccttctccgttcctaagttcggttctgcctcaataatatcttcctattgcaaagctatctccaccaaattagaatcctttgagtcagctaaatctgattgatcaatcgaattgtcttggattgaaggagcatctactaggttcagcttaatagcgggctttcgtatcactctcttctttttttaccatggaagagaagagttgatgcacacgcctcttgcaattttagctatcccgattgttaaagatagaagagtttataaatctattaattgaaaaacataagccataacccacaagattaaaaataaatattaaattttttaaaatattattttttttaaaagagaaagatgactctaaaaaaataaaaaattactaaagacaaaatagtttaaccaaaacaaatatatatatatatatcttnnnnnattaaaagtgcctatctaacgataattcttggtttaacgat

SEQ ID NO: 134046 - DNA, 703 bp, Cannabis sativa
ccactatagatttggaattgcactctttgatttcctaagttctagataggttctattgcatgaattttggaattagggttctgtggttgtttgaattatttaattttgtattttgatgttatgttgaggttatatgagctgttttaacctaggtttgtggattgttgtggtgtttgagcaaggtttgagttttaagaactcaagctttgctctttaatgatgttttaagtttttgggtcgattgctgtgttttattgcttggtttcagtttattatagtgtaaataggtgttttagaagttattgtgcagtttggggttgaattgaggtgtttgtgttatctgagacaaagcaattgttatttgaccattttgatatgaaagaccttggtgaggcttcatatgtacttgggaattgggatacatgatcctccgagatagaactaaaggtattcttcctttgtcttagaaaacttacattgatcggatcttgaaaaggttcaacatacatgcatgttctcctagaaaggcaccaatattgaaaggagactagttttctaagggccaatgtccacaaaatgataaagagacaaatgaaatgaaagtggtcacttgtgggtagcctgatgtatgctcaagtatgcacacgccctgatattgcttttgttgttggcatgttgcgtagatacttgagtgatcttggac

SEQ ID NO: 134047 - DNA, 1035 bp, Cannabis sativa
ttgagatggtgggatcccatttttgcgtgttgtgccactcgcaccacgggagcctcctcaagtctctagctcatccctcaagtctcaacacttgtttgtggtatggccaatgtctttatggtattagcaatacttggatggatccctcttcgcccgacttgctggtttaggtattcaaaaggccacctgatgttcgtttgccacaattatggtttcttatgtctccacaagttcggagtatattgtgaatatgggttggtaacctttgctcgctttggcattgttctgatctcctccattgtcgccctttctcttattattgtgcccagagttattggtggctagagggtttgcagttgtggcctttggattggtcgaagttgttgttgtagtagcagaagcagattgtgctaagggaagaggtaggttattggctaacctggcttcctcaatgtttatatatttctgggtccttttcataaatttgtcaatagtgggggcacctctcccttagaggctatcccattgtaaggatccatgagttatgcctgcccccaaggccatgtgtctccaactttgatcaacgttcttgaccttggccgcctcgatgttgaacctattaatataggcctttagactctcaccgcgttgctattttatgttggccaaggaagagcatataggttttcgagacctggtggcacaaaattcttttttaatatcacacgacaatttgtcccaagaggtgatcgaatgcttcttaaatttattgaaccatgtttttgctgctcatgtcaaggtcaccggcaataacaagcactttagatcaccacttacttttcttgtcgtcataaatgtgttgacatcactaatgtgggctcccaggtcagtacttccatcatattttgtcatggtaggcatcttgaacccttgggggtatggcaattccaagatgtgtggaggaaaaggctcaggttcctcattagattcgtatcgcctgactctcccttgggcattcaataactgctgaatttg

SEQ ID NO: 134048 - DNA, 799 bp, Cannabis sativa
atatccattgctgaaggtttttttatttggttcaatccttaaggattgattaggtgccaataatttgaagaagatgatggccgtaatttttttttattattattattattcttaaagttgttttcattaatttggtctaactattaattagggtcttattctaatattgttaagtttttactgactatgagttatataagtataactaattagagtgaaagttgaattctttgatatatttcaaaaatcttggtgagtttcaaatacagattctcggttaattgaaattgtatttcaataatatatgagaaacattgggctgccatgcttgatttattgttatcgttacaattcaaaactgacatgaagatgccaattttttttgagaaaatagtcattggatgaaactagtcggctatcaaggatttggttttagagatggaagtggaacataggatcaagattaattctttaattgttcaaaggttaattttcattaaatagccatcagtgtgctattttcataaaatatccatcaatgtggatctatatatatataggcgaatagccacatagagtcaaggtaaggtaagggattcgcctctcttgaaatttaactcggttataagttatttatagctatacttaaataaaaaattttggtcctttagagagattctaatctagattctagtaaaatattattcaattgtattatttagtgtaatgataaaagtatttttaaaagttagggaatcataagttcaaaaatctatactttcatttttttttttttttt

SEQ ID NO: 134049 - DNA, 778 bp, Cannabis sativa
aataataataataataatatctagaagaaattttcaaataattgtcatactagaatataataattactcattttaattgttaatttttatattttcttaaaattatattttatacacattgttctatttttttagttcatatacagttagagagtatgaattaatggagtgaagaaataatacacatcttgatcttcttctctctcaacaagcaagcaagtaagcatagtgcaaaaatttatgtaaaatttgtaaaaataaatgttgaagaaaatattttccaatttgaaattttttacaaatcactcgtttactcaccagcaccaaacaagaaagtcaaatactaaataattcttagaataagaacaaagagcagaaaaaataaagctactcatttttttcttctttttccaaccataaaatcgaacaacttaatttttttctttaaccctaaaaaagaaaaacttatcaaagagtgttagagtaaaataacaccaatgaccctcataatttaataaaattttattattggtgtaaagataaagtagtaatttaaacaaaataagtgagtttctaaaaataacttttaattctttaatactattggttagaatcattattcactattgttaaataaaatatatttatatatttttaaataaaaaattcttgttggtaaccaattataggaagtcaacatattactacatcattctttttttaatacccatcaatggatattacccattaagatgtgttccttatatatatatatata

SEQ ID NO: 134050 - DNA, 1121 bp, Cannabis sativa
agtaccagcaacttcatgataatattgaggctcataatgactcgagatagagcaaatgaaagccttgaaggtaggagacagcctggagtaatcaagaacatgagataagcaatggacagtagtgttaaaattatggtaagaattcaaataagatgacttattagttaagaagcaatgataatcttgaaggtacaagggccttttaatctgtccaataggtctagatgaggaaggaacaggtgctgaaatggaaggagagatgttctcagcatctagtgcagcagtaacatctgttacaacagtaggagaactcgaattctggtgcgtagcatcaacagggtcacaaacctgtgtagcaggtgtattgggtggtggatcaggttttggaacaccaaaaaacagatcctgagatgaacctggagtatcaacaacattagggacagcatggaaaaattttcataatgggcaggcaatccctcattagtaacaaaaggaaaaatgtattcttgaaattaaacatctctaaagcaaaagaaaatgttggtttcaagattcaataatcggtaggctttcattcccatggggtatcctagaaaaatacatgacacgactctaggagaaaacttagaccagttttggcttaaggtagaggcatagtcaagacacccaaaaggtttaagatgattatatgctggtgctttatgatttaaaatttcaaatggagacttgttgcctaaatttggagtaggaattcaattaatgaggtaagtggccatgctaacccactcaccccaataaatcaagggaatataagactgaaataagagagctctagaaacattcaaaaggtgttgatgttttctttccacaacagaattctgttgtggtctttgcacacaagcatgataatgaacaatacccaaggatttaaacaaatccacaaattgaagctctttagcattgtcagacctaaaaccttttattgtagcattgtactgagttggtaccaacttaataaaggcaggtttgacagatttagcttcagatttgtgcttaagtaaatgaatccaagtgtatctagaacaatcatcaactatagtgagaaaatatttgaaaccatc

SEQ ID NO: 134051 - DNA, 923 bp, Cannabis sativa
ttttgaggtccaacaatctcacaagcttatatttcttctctctgccctccatgtctatctctctctattttttctttttcttaagattatatattcattttgttgttctaaaaaggtaggcagtaacttttaattaaaacatcttatatacgctttagtgtgtacaataccagatatctgctattgagtgggagttatgagtaggtattagtttcattcaagataggaacattggaaaacaatcaaaatcttaaaattaaagaggacttgtatgctagtctataagggtaatgctttgaactctttagactgcatcgactcagatttttagatttgcattaatgctagaaagtctacatttgagatggtgagtactctggggtggagcagtagtttttggagaagtgtaaaaagctatcaggagtctctaactctacctgtgagtttgaatatttcagtggccccaaaggttactagagaattattcggacttggaaaagttttatacaaactttgttgttattctagtcatgatactactggtgttacttcatgataacacagatgtaaagtgtaacaccctaatccctagggacgacacatgtgtgcttttaaaacgtagttttgtaatagtagattaactatttaataaaatctgttataataataaaaaatttaccaaagtaaaaccatagtaatgaagaagacgatatttctaaaaatttatttcggggatcccctgttacaaaaattttacaaaagggttatatacaaaagtaagtcagaatacacattaggtacaacccaaaaccactcctgacaactcgaacacacaagtcgaataagtctatatgttcatttaccagaaaagactgtcatctcatggctaccctagtatccccttgcccttacctgcaccacaa

SEQ ID NO: 134052 - DNA, 571 bp, Cannabis sativa
caaggcaaaatcaaattttagaatctatatatatagtttaattaacattaaaataataattctaatgctttgatgtaatagtatatttttaagagattgggaattgatgttagaaattttatgtaaaacacgaaacaaatataacatagtatgaaaatgtgaaataaatggaacatatacacaatataactatatgttcgaagtacttccaataattgattttttgagttttagttccacgagatttttggatccgcaaaagaaaaaataaattagttactgtaggcaatcgagcttccaaactctctctactctcttaaatagatttattgtgttttacataattaataatgacgaccatcaatcataatattttgtccataaataagatattaatttgataaatcaaaccaatcaattataattaattatatattgtgtgaacaaaatattttaatattctcctaagtcaacatttaaataaatatattgtttaagctcaataattatctttgctaaataacaaatatatgaatcatgacgataaatcctcattatttggcgagtatta

SEQ ID NO: 134053 - DNA, 552 bp, Cannabis sativa
tagttataaattcaattagagttagtgagagttagtgaggttgttattccttctcgaaccagtgtatataaacacattgtaatgctctgtttttggttaatgaagtttgttacaacttccattcctttttttctctatcttacttgtctaaaactaaaaaatcctaaacccaaaccaatatatattcatatttgtttttctctctgtcaaccatatatatttatattcagatttgaaagagcaagagagagcaggagagtgagagggagaatcgtgagaaaggaaaaggaattcctatggtgataatattgtagattaaagaagaagaggaggaggaagaagaagtgggtatatgaagaaggggtatgcttgtttcagaaaagaaaagaagaagaaaaagaaaaagaaaaaaacgaaagaaagaaacagggaaaaaattgtaatttagtttattttttaaaattttaaataatatttatctataacctatataaaagtgagaatagctttttgggctttcactaattgaattacacaattagccttcactat

SEQ ID NO: 134054 - DNA, 629 bp, Cannabis sativa
tcgcaggttggaggatgaggccaaagacaagaagaccagggaggaggaacttgaggcagaggtcggaggacttaagaaggaggttgagagccaaaagtctaaggtggagaagcttgagagagacgtggataccttagagacagccggtctcgaggtttcttatgacttttggaaggccaatgccaaagggaattttgactacctcggcacttccaaagacatgtatcttaattactgcatggctcaggcggtcaataagaaccctgaggcaactacatccacttctcctaccgatcagaacattgatgctccttctgcccagaccgatgatcctccggttccctcagacctaattgatccttacaaagagcttgggactcccgttgtttgattcccttctctttattattttttatgtatgttcggccagttggccttcttttgagacaaaatgactggccaagcggtctttaaacttggaatatatctttcatttcttgaacaactgactgaccaggtagcttttaatcccgagtttaactgctttgttatccttaatgaatttcattccttgttatgatcattgtgcaactgtgttcgttttttttttttgtgcttgttatttgttt

SEQ ID NO: 134055 - DNA, 770 bp, Cannabis sativa
aaaaaaaaaaaaaaaacaagtatgaatgttagagttgcctgtttagggacgaggatgaatttttgtccccgaatgttaaacgggatggggacgacactccccgtcccgatggagacccgtttaatttattaattattttttgttaatattttatattttatatatgcatttatatttttttagtgtattaatattatttttacaatttttgaaattatattttttataataattattatattgaatagtaaatgtgtaatattttatcttttatgtaatttaataattttatacttttaaagttttaaaataaattttatttttataatagaagattccccgccttgttcctgtcccattaaggaattttctgtaccgtccccaatgaggaattagtgggaatgaagcgggaatgggaattaaaatctttccttatatatctctgtttttatttatattttacaggaggtgctcaagtccaccagaaaccagttagagcgtgagcttgcccttgaagatgtcgctagtgtgaaagatttgcctgcatacaacctcttgaaaatatgatcttttgcctcttatcttttggcaatacatcttagtatactttcatcattgtaatttttacaataaatgaaaagaaaaaaaaagaattaatgcaatattattgtaactctctccctctcacacattatatatagggaaatttacgtttaagtatcaaatgtttttaattttgtatacttaaatatcacttttttttttttttt

SEQ ID NO: 134056 - DNA, 1230 bp, Cannabis sativa
agtttttggccggccaggccttggaacatattttttaattcgtccaactgtgcttacacagatgggtgaactagttcagcctcttagctgacctgtgtcacatcaagatatcttagagttgggccctggatgtagataccgagctaagcgggtggttgaacatattgttcgtccagacttctccttctattcaaatcgtcctaagatcatgggctgtacccaatctattgaatgctgagacactaggttgcctcaatgattgattggtttggccggtttgttggccatcagtttggatggacttattaggtataactccacctaaggaattgtcggataaggtctggccgcctaccacttggcccacaggtggaacctctgaccagggattggacggctgaccgttatgagtttgggcggtatgcccagcaagaatttcttctgtgtcgcccagtgggatactggacgtagcagctggttgctgattaacaacttgataggctttttgtattagtacggtggcctgtcttgttcggtcatcgatgtctgcctactgagccttcaatgtttccatttccatatccctccattcaatgaactgacacctctactctccgaacgcaaggttcattgcagcacaaagctcttcctgatcatgatgcaaggtattagtatggccttgcataagcccaagagcattgcggaggttctgagtctcagtatcatctccaattatcgtctgagcattggttgtggatgggattccagtgctgggagtgctctggttaccaaacttgtgttcccagtctcttgtacactgggtgtgatcccagccagaggggatgtcacaccttggctcacagtaggtggctgcgcatttggctgttcagaattggttcctggtgggacccttgtatttctaggagtttgcaaggcaagatctgtcaatagtgagtcaccctggtcaatcacgcctctgcgagtttccaccattctatgtgtctgctaaaacttaaagtaaagagaaaacttggattttttctctcaatgaaagcatcaaaaatgttgacctcacttttagccaacgacaaggttttaaagaggtttggccccttttagtctgttaatagcctactccccttggtttgtattgacttgagaacaaagaatacaatgtttcttctcttaaagctcttacaatgaaatctttgagtattttctcttagatct

SEQ ID NO: 134057 - DNA, 797 bp, Cannabis sativa
tagtgaagccatattaatcgttcatgcgagcacaaccacgtcgccgtaaccataggatcggagccatgtggttgcgcagctgctcggattgttgctgccggcgaacagctactactaccaggggttgaggacaactcggctaagaacacggcggggatccttacggttttggacaaccgctactaggggttgatgtcgtcagccatggagacaaatggtgggggagacgatcgagttgtggtggttatggcgagtaatgtgggagtttacccaattgtttcggtcaataaattccacaataatagggatttttccatgctgcctcacgtgggtattaataaatcccatattaatatgggttctcacttgccagctcacgtggacattaataattcccataatactagggattttcacatgatgcctcacgtgggtattaataaatctcatattaatatgggttctcacttgccagctcaagtggatattaataaaccccataataatagggattctcactttccaactgtcacaagcaatatcctggtggtaattgacacaaaatgtagaagaactcaattaggcctgtctgatggactggttattatggaagaggaaatgaatgatggtataaataatataaataatgatattattgaggggacaaaaaatgatttttaggtgggctctagtttccaggtccaccaagaattatgagcctacttagttggaattgccatgggcttgggaacccataggctttacaattccttaaggatttagtaatccacaagaga

SEQ ID NO: 134058 - DNA, 812 bp, Cannabis sativa
  modified_base (556)..(556): a, c, t, g, unknown or other
aaactattttgagatgtaaaaaatgaaaaagtgtcttattattttttaaagaaaagtccttaactacctagcaacaagactagcaaaaagtgaagggatcaaggatttattcatgagcactctcaataattttcttattcaattttttaaaatattttattaaactttttctctattatttaaatattatatctttacatatattttatttttaaaaaaagaaatattaaaattttatatgaataataagaaacatgtaaatgtatatataaaatacggaattaatcaaacatatagataatatagctataggatcgaaataccttcagccattgattttttgagctttaatccctcatgagttttggatctgcaaaaaaagaaaaatgaaactgattagtgttgggtaatcgagcttccaagctctttctattatctttagattgatttactacttttacagaatgcgtagtgagctcagtgaccaagattctatatttatataggtgagaccttctataaaagtgtctgccacaattaattgtcagaatatttngacaattaattcaagaaattaaatgaaaaataaaatatttggtaaatggtaatcttaccatatgtagaatataaaccaattaattgtgtccagactcaaagaatataaaatattcatttatcttaaattaatttattgattttattcttaaaataaaaaatattctaatattctctcacttggttaatatttaaatttactacttaacccaatgattattctctctctctctctgtctgtctctctctctctctct

SEQ ID NO: 134059 - DNA, 831 bp, Cannabis sativa
atttaaaatagtgttcgaatatgtcattgttggtaaaataattagtaattatatagaaaaataataattttttgcagttaatatttaaaataaaattttttgattattatataaagtaattatacttaattctcataaaataaaattataactatttaattacctttaattatatagttccattataattatataatcaaacaaatataacaaattgtataattgcctttaatcacttaaatccagtttctccatggttttttttattaaacacccctataataagattaaaaaaattcaaatatatacctataagttttataaatatatgtaatacaccccttaaaagatcgttatcgttatagtatatcttatatctattttggcattaataaaaattaatttatattttttttcatgatcgcgtatgttgtaattatttaaaacaatttgttttaaaaaaaaattaacaattttcaataccgaaaattagatttaaacaattatttttttatgtgtaaaagaaaaaatagttatccgtccaatataatatataaattttattttcggcattataaattaattggaattttttaaaaatctaataatgattctaaaaaactataacgtacacgattatgaaaatgaatttgataaaaatttctttctatacggcgaaacaaataggggtctacttagagcctacttatcttagaggcccaaataaaaataatatctttaaaaatagagattatttcacaaaaacataacaacaacaaaaaaaattatagaaatacggttttacggaatttttacaatttttttgatttt

SEQ ID NO: 134060 - DNA, 881 bp, Cannabis sativa
  modified_base (828)..(837): a, c, t, g, unknown or other
aaaaatatgagaaatgctaaaggaaaccagtggtgcctagcaacctcttatgtgtcagtatcgctattcgtccaactaagtatcgggtcccacataatttaatataatagattttagggagtatcgctagccaatcgcaacgtgacatgtcgagaaggtgctagacaccactggtgcttaatagcaatcctcaaaaaatatatatatctccaaaataaattcgttcacaatttattgacttcccattttataatttctacctccgtcactggctcattactcgaaagtggatcataaatagttcgaatagaggtttgcaaaggatcacacttgggctaagatggaccatacctacatctagggttcaccgagataatgagcttgaaagaaaaaaaaaatcttttataaatacaaacaattttttagtgattttttaaaaatattacctattcttttaaagacaaatagtgtcataagtacttaaagttttaatttttaagcgacttaaactcaataatattttagtggcataagtaccaaatgagagtaaaataatattttttttttttaattttattagtgcagactctgttaatatcttaaacaagacacatataaggcccatattctaaattattagatctggacagaaatatgtagtgtgacagccagtagttccgtgatccgtaaaggaaaataccaggtaagctgtgcaatctcacatcgccttggaaatgtcaagtgggatgattctgagactgtgtaggtttgggactgcacagttgaagaggacttaaatagattgattggtactacttatatcaacannnnnnnnnntgtttttcagtagcccatcacgaaagaactccacggttaagcat

SEQ ID NO: 134061 - DNA, 791 bp, Cannabis sativa
taaattaagaaaattatttttatttttttttggaaaattagcaatgtttttcattactctaatagactttttacaacctattcagcaacttttataaaacaaggtctggttttttttttctccttctacttgattacaatggttacaaatcactaaaccatgttgtatcctctattgaaacctttctaggccatattctttgtattctagttttacaaatatttttagtcatctgtacaatggtctttggatcttgttttgtctgtagccacagccttgcgttccttgctctctaaatatggtataataatgctgcataggcagcagtaagaacctatcttcggaaggcagatgtgggatcttctctataactcgcacaagatcatttaagttggttgctggagtcttccatcccagccaactcttgacctggtttagacattcattagagaaagggcattggaaaaacagatgctcacaagtttctgcattccccaagcagagcaaacaagagggattagttgcaatttgaaatctgagcaaacggtctctggtcttcaacctattttgaatagcaagccagaaaacaaaattatgtttgggagtatttaaccgattccaaacttccttactccaattgaccctagaaaccgtgggacacaaccacttgtagccatcagctactttatatttcatttgagtgaaggtgatatgatcaactaaattcagcaacataccttttagagctacaatctttctccaataccaacttccagtttgaggtatctcaa

SEQ ID NO: 134062 - DNA, 515 bp, Cannabis sativa
aaaaaaaaaaaaaaaactaaagttaactagcttggctccaaacggaattcaaaactagtatatcctatctaggtacagagacttgatcattatcaaagaaaaataaattagattatattaaattgcaacagtcgagatgagtgtgagtatggccccatgtaatttttatttttaattaaatacataattatataaatttaaatatttatgtcagaatacatccaaactcctacatttgctcgcttgcctcatccttatccatccaacacatgtgacgcaatctggtcccaaaatttatccatttctctattattattattattattattactattattattatcattattattattattattagaacattggtattaaacactagtggtgtctaacacttttgtcacatattacattgcgattggttagcgatattttctaaaagctattatattaagggtaaatagtgacataagtactcaaagttttatgtttataagcggcataaacccaat

SEQ ID NO: 134063 - DNA, 978 bp, Cannabis sativa
taataccacaatattagcaattcataacccatttgggaatcaaatttgtgacccaaaattgtgagaaaacatggataaaaaaccctaattcctttccaaattcgaaacataaagtttagtgttaaaaacataaagttaaggtggttttaccgtcaatatcccctataatactaacactccaattttctttataccaccaatttaaaattctatattaatcgtataaatattaattttttttacaacttaccgaatcccttaacaaaaataattaataatatgatgattgatttaaaaatatattaataaataaaataattattattaataaaaaattagataatgtaacttttttaaaaaaaaaacggaggaattccattaaaaggtatcaagtcaaaaaatctggatacaaaagataagcaaatttaaacagctaaatcagtgggcaagcctcgccaccacatccaagcctcatctaaatctaaagctcgttttgctaaagaatgagcaacatggttctttgactgattacaatgcgacagtgatatgctattgaaagaatgtctaatatgattaatatcattaagaacaataccaaactcattgagacaagtcctgctatattgacagcaagaactacatgctgacaatcagagaaagctgtaatcaccgtataccccatctgcaagcagcaagaaagcccatggagtagagctttggcttcggcaacgtgaggttccaacgatcagtacaaaaagtcttacttatagtcacaacaaaacttgtggctaaaagtaaaatagttgtgactaattataaaacattattcctatattgtgactaaaaagtctgtggctaaaagtattagtcacaaaaattacaaattgttgtgactaaatatatgtgtttttcacagtacttgttgtgactaaaactaataaattagtgacaacttgtgtctaaatattatgttttagt

SEQ ID NO: 134064 - DNA, 541 bp, Cannabis sativa
  modified_base (43)..(53): a, c, t, g, unknown or other
ttttgtcatttaacaaaacacatggtccaatctgtaacttttnnnnnnnnnnnggtccaaaatggtatttacccatgaaaaaatcatgtcattgttaatatgccaaacttggaaattttgaagtgaatgaatatttttgatgaaattagagaatgtctttagtgtatgtaatctatatgagaaatgctagtcggtactattagtgtctagcacctttttacatgttaatatcgttattggtctaacatataatttaatgtaataacttttaagaaatattgctagtcaatcacaaaacgacatgtctagaaggtcctaggcaccactagtgcctaatagcaatgcttaaaatatatagagtatgaatatgagtccttatttacaaagatacataaataattatgacacttgggatagggcctcaaggggtatccaatttgtgtgaataggtgaggcacacattttacccatgacacacgtgtgcgccgactgagttagatggtgtagtgtgacactttattttttacaggaaatgtaacac

SEQ ID NO: 134065 - DNA, 815 bp, Cannabis sativa
gtgactgaaatgtgtaactaactaactgtaacagaaggaataataactaactaaaccataacgaactctaacaccccccctcaagttatactttgagagttaacttgtctctgaacttggcaaaaggaagttgaggaaatggtttagtcaatatatcagttgtttggtgatcagttgagatgtgccgaatgtcaagtgtgtgatcaagaactttgtctctgataaagtgaagatccacttctatgtgcttggttcgttgatgaaaaataggattcgaggcaagagaggtggcacctaagttgtcacaccaaagtacggggcaggagtgaagttgaattcggagttcattaaaaagagactgaatccatacaagttcggtagtggcaagagcaatggctcgatactccgattcagtacttgagcgtgccaccactgtttgttttcgggaactccacattataaggttgccaccaaggtaaacacaatagccagaggtggatcttcggtcgtctatagaacttgcccaatcagcgtctgtataggcagtgagttgaagagtggcagctggtctgaagtgaaggccatagtctatggtgcctaccaaatatcgaagaagccgtttcgaagcaagccagtgatcgtttgtgggattcttgagatattgggacaatttatcaactgcaaaggagatatctggccgtgtgagagtcagatattgaagggcaccaataacacttcgataaagggttgggttgtccattggagtgccttgggtggcacttaacttcgtgtttggacacatgggagtaggggtt

SEQ ID NO: 134066 - DNA, 1961 bp, Cannabis sativa
ttattggcatgagtccaagcatcaacattagtatttgttttctcttcagaaagcgcacatacaacaacatgtatatcaaggagtgagaagactctttcttgccatcttttgaaaaattgaagatatatctccattaatggtagcggtgacagagggagtactaccaatgggaagagaacctgaggtattatcaactgcagcagcagtagtagcattgggatccataaatccttaagattgttagaaaatatcaaatacaacaataaaatgataacatttgaggcgggcaaacaagacactgtccttaaggatttacaaagtaatcccccaggattcaacaggtcttctgattacaataaaagaattaggaaaacaaaaatagcaaaataataataaataacccagcagttctcttaaagttatcatatatatatatatatgtgtgtgtatataggagctagcaatgtatgtatattatgttcttcctataatgatacagatatatatatagaaggaagagtacgtacactaacgttactattaacgttagtggagaaaaaagtagatttttgcaagttcttaggaagcacatttcaaatatatatatagggacacgattttgtcccgttataatatttgtggatatacaattcgtgattacattgtagccgttagattaaaaagttacatgatcaaagggctgagattaacatagaagtatttaggataaaaattattggtaatcgtttgcttttaaattaaaatattattaaatttcaaaaagtaaaaagtgattgatgtattgtcaaattctttcatcaatcatcatttctctttctttttttctttttgtttcaaatgtatataataataataataataataaaaataataataataatttagaagccaagcaacaaatgccaacttggcaatgaaaatatttatgagactatctccaatggatagtgtatttttagattaaatttagcctaatttttgtatttgtgctccaatgcacaaagtgcaaattagctataaaagttaataatatcctttttttttgaatgaagttaataatatctttaatacttaaatacacaaaaaattaactttatttatattattttaataacttataaatataaaaatattttttattaatgaatagtattaatgagtggcaaataggtaattaaaaaatgtgacatttattgtgggctaaaatttggcacatgctatcttttgtgccaaatttggcacacattttacatcaccattggagttaatttttagcaaaatattctaaaaaaatagcaatacactacatttatagttcttcattggagatgctctaatgttggggaggcttatcttgtgaagttcaatttttgttaatctattcaaagattaagttcatgatcaaaatatttgttcacattgattcgttgacaaactagcagtctaagagcatccccaatggagatattataaaggatgcttaatgacatggatacatttttagtattttttaattgatgcttaccattagaataaaaaataatgccacatcatagcatcctttatatcttctctttcttatttttttttattttatcataaagtaaaaaaaaaattatttatttaatatatattaaataatattataatattattttactaatttttagagatgcttataattggattatttttaaacaaaaagtgtcaaaaatgacatggaagaaagataaaataaaatgtatgagcctatatgtttggtattaggcttagatgtatatagaaagctcatttattcatgaatatataaatggactagatagctaaaataaaatatcaccctgatagtttcatttaggcctaattagtattgagcttattcaattaataacaattatttaatgaaaggtaaatttctctcttttgggccttgtttgaga

SEQ ID NO: 134067 - DNA, 777 bp, Cannabis sativa
ttctacctactcaacattggagtacaaaagagctagtacccacgacctttttggcgtggtctcccatcattcttcaacggtggcctctactatgcaaggcaggtagcagtagccacttgatatctagaaggaaaattgtgtactgtaagcttgtagatacaatttatgtaagttgaacaacagcaaagacaaattaatgaataagaaacaatatttatgttcaatttattgtgtctaaaccacatgctaataagattaacttctcaaagttattctttttttcagttccacatgcgtataatgggcaacaccccaagaaaaatcccaaggaaggtttgtgaaacttagtgaattacaagtgacaaagagaccataagtctgcgtgttcacttaggggcacccacaccgtacaatgcatcaaactagcacagagaacttatgcatagaaatttgaacacttagaatgagctactaaacttgcttctaagtcaagtgtaggcatacttcaacttgacataaaaaaaagtaaatatggatacttacatgttaaggccaaaagaagatagacacgattaaagactgcatggtcagtcacacaatccatgataaaaaagcaacagggccaaacaatagtagtgttcaaaaatagtgggcctataggtcaaagatacaaacatgaaggccctgaggctacaggccatacacatcatgaaaatattgtgtatattttacaaccataatgtagaatactaataatgaaaatattgtctatatgtg

SEQ ID NO: 134068 - DNA, 667 bp, Cannabis sativa
aataaactgtttaaatattattttttatattataaattattcaaaatttctcaaaattttataagttgtcttaaatagctataacgtacatgaaatcaaaaaaaattagtacatcccttttaaggtcccttttaaggggtgctagaattaccctatattatatataacagtactacaagacaatatatttgaaacttcattatttatgcacttcaattatactttataacattagttaaaaaattgcaatctctaattgcatcattatataatatataccgaaatttataattaaaatcagggacttacccacttggaagtctttggaagcttaaatcgggtcagcatcttattcggattaggtccgattatattcggattgggaccgatccaatccatttacactctttacaactctctctctctctccttctttttcttcttgttgttactgttacgatttctccatggccaagagatgtcaataactccaacatccccacacatttttttgtatggtattatatttattttattttatttattaagaattaattttgattaaatattaacaaaaagtagttaaaaaaaattatttgtgactaaacatataatatttagacacaaattatcactaatttaattttagtcaaaataagtattgtga

SEQ ID NO: 134069 - DNA, 1052 bp, Cannabis sativa
tattgaaagaacaactaattggggaatcaagattttttggcccaataagctagctagtttccaccataaagctcttgtaaatacataattgattggaagtactgaactgtagtataatgacatattagcacgtggcatttaaatattggtaggtcggtggttaagtgatatccaattacatctatgtatcaaagttgcatagcttttctattgtaatctttctggcccctccccatcttattatatggttttaatcatcaagtacaagggggagtttgtgtttttatctttaagaggagaacaaacaagtatttaaaagtgggggacaaagtggagacacaacacttggatcctaagtggatttcataaaatcacatggtgtaatcctattttcccccaaaaatggcgggagttttagcactatccacttcatttaggccacctaaacatatctaacccccttttctcacaatctcacaaatggaaaatttacaaatttataattaattatattatatgtacataaaaacttatttataatttattatacattttttcctttaacataatttatcgtacattttatgaaaaatatattcttaattttatataataaaaacacgacacatcaattagtgagaataaatttattaaagtagagaagctctggattattctttattttgcaattttttttctttctataatatgagtttacagagaaactgtttgtacttttcattactcttcatcttcttcttttattttttttttcctttcattgtaaatttataatagcaagcctatttctttactctctcctcttcaatttttatttagatttaaaatgcgaaaatggtcgagatgtgaaaattcaggtagtggcttgatggcaacgacacatgacttgaaaggatgagatctgggcaggctgatgcagacgactgtaatgtctctgcttcaagcctccattgggcccttatacccacaaaatgatggctcttatacacgagtacgtaactttggcagcttcatggaatggtgaccaatcc

SEQ ID NO: 134070 - DNA, 644 bp, Cannabis sativa
  modified_base (558)..(566): a, c, t, g, unknown or other
cacaaatccaattacattgtggctttccaaacgcaccctaagacaaatatgatattgaatggagaaattcgaaaaggaagtttccttttctataaaaagaaatttttcacttactactcacgattttgtaatctgtaggtacaaaacatgaaatttttagaaagattgaagatttcttttaagaaagtttcctatgggctatggatgtgtttactctgtgtataacctgtctaatatgagtatattatctataaatactcatattggtcgttggattttctatctctttcatctctttatattttcattcttattttataagaaagagtgtttttattgtgtagaggacagggtgttcgtcacttcctctgagtttatatattgtgtattgtcttgagtctgtaattagatctaaggaagttcaagctttccgaggaaagtttttcaagtgttgccttaagaggaagcaaaaaccctttaagcagataaaagaaagtttgaacacttgatttactaacaagtgttggaatatcatttaccaggatctagatttactannnnnnnnntttttaacatcctaaatatgaatctttaaaatgatgaaaataaacacataaaatgtatgagaaaccttacattggttg

SEQ ID NO: 134071 - DNA, 928 bp, Cannabis sativa
cctgctggtggctagccgaccacatgatggatagcgggggttgttactgagcttgagatctcgagccagctccccatgccattggtcattgggatctggctttcttgcttttaaacctcgaagcaaggtctgttctcgctcttgcaagggaagatttgtcctagtccctgagaggctaggttgattagcttgtcgataggccctctctgatctatcaactagtcctccttgaagtggatcgttgacgagatcctggcctcttaaataagttctctagttgaactaccttatcaaattgatggcctctctgttgcgatgatctaactctgtctggcaagatcaaaggatgtattcttaatcatccatctatcttgagttgcatgcgactctactgagctaatgcatcgctatcaggagcttgtgtttcttcaagaaatttgtgtctatactgagtgaatgaatcacaattagcagtgtgttgttctttaattaggccagcttggcagatggcctctctaagtctagctaactcaagatcttctcccaaatccacatggggcttgctaattcctggtcttgtctttcctgcatagtactagggacgaaacccagttgttgttcctggggggtgccccgcaaggattcttctttcagttgaaggtgcctatagagggtcctcccttggaggtaggggccgattgctcaggttcatcaggatgtttatgccatcctggccaactgtagttgtcagatttgtggtgcctgctatggtggcaggattgaccacatctattgtgttcatgggaattccatttgtgactgggacatggacatcaagatctgcagtctgtgggtcttgaggaggagccaaaaatgcagatggtgaaacattagttcttgtcgtgttaaccatggcgtttgatcagat

SEQ ID NO: 134072 - DNA, 1073 bp, Cannabis sativa
tggtaaaatatattccaacagatagatcattggccacgtgaaagaagttcagaggagcacgtatgcagggggtcagagggttcttttgcatgaagccatgggtgtgcggtagggctagagggctaatatattgagtacttcgtgaagagattatgtgcaagagtgcacttggtgctgcattgggtgcagttggcttgcgagccttgtccaggagggatgcgtcaaatttatcttacgataagagtgtcttgctcaattgctatcaagaggatggtgcgccatgtagttggcgtgtgaagtttttgaagggacatttctaaagggacttggctttagtagaagcgtgtctgtaggtgccgttgggtacaattagtttacgaacctcacccaaggggtgcaccatacttagtccttgttaaaaggagtatgcattggataattgacaagtgagctactatcagaggatgtattagcttcagcgtcagtgttgcaagggctacttggttaactagagggacgttgtgattgactcgaaggagttcatgttgggggaactattcaagtgcagaggcactactccatgggtggttctaaatagtgacaatgacacaggttctctgatcaagtccaagaatgggtgagggagattgtcacaaagagggtggttctacggagatagaagaacaagtgcaaacttaggattcggatgaagcttggagtaagcttaggagtctagatcaagaagatttgcctgcggtccgtcgatgagggcatcaacatgatgaagtgggggagaatgtaacgtgtgttccaagataacagttacaagctaggtgatgcccagaagttagccaagtggtcgtcaagtggtggcgcatgttgttgtgcatgcttctggcatattgatgcgtagtttgtacgacagtgacattttcgtaaatatcttcaaaattgtccagattgggacgaaacttagtatttgttaagcaaaaatttcacatttagaatattaaaaataaatgcaaaacacaattttacctatgccaaaattatagcataagagtttattaatt

SEQ ID NO: 134073 - DNA, 531 bp, Cannabis sativa
  modified_base (501)..(505): a, c, t, g, unknown or other
tatatgtcactctctatccatgtgggacaatgtccacaatacattatacttttaccggcataaatttgtgctggtaaaaccttttccccataccgaaaatccaggcgaaaattttcccacctacttttcttggcgcatatttacgtctagaaaaccccatctaccccgctaaagattttttgcatgcaggaattcttctgctaatttatgcgccaaaagatagttacatttaacttttttatcgatgcatttcgtgaactgcgtcgataaaggtgtcttttgccagcataaatttacgccgataaaatttttagctaaatgcttttgtgcttcgttgctccttctcttgccggtatctttgaccagtgcatttggcctaatatgctggtaaaagttgtgattcttgtagtgatgtgagctgtccaatatgagtatagtgtctataaatactcatattagtagctaagtgcatgtttgacatcataactaaaaaactgtttnnnnnttttaaaaacagaaaattgtttttaa

SEQ ID NO: 134074 - DNA, 975 bp, Cannabis sativa
  modified_base (506)..(520): a, c, t, g, unknown or other
acaaacaataaatcaaaattcttgaaataaaaggtcaaacgatagacaatgaaatgactgagtgacactaaaacgattaaacgacaataaagaaggaaacaacaatttaagaaacgtaatggattaaatgaagtggaaaacgacgataagaagaaaggatagtaagccattggttcataatttactacaaaaggtcaataattataatttcacaatatagggattataccttattttaaagactttttctttttttaaaaacgaattttagacgtttaaatgtgttaaatagtaattatatattattttttaaattttatatttgagatagaaaaaaaatattatttaacaattaatcgtctgaaaaatattattttaaaggtgcatcttatttttcggtagcccatctcgaaagaactctacagttaagcgtgattggcctggagcaatttcaggatgggtgacctcccgagaaattttaccaggaagcgtgcgagtgaggacannnnnnnnnnnnnnnactcgtgttggtctgtagggtcaatcatcaatccaggaagcagtcagagtggcgtactcgtgtataagagccatttattccattggtgtaaggacccaatggagtcttgaagcgaggacatcacactaatagaagttctagaaatatactttaggtattaaatccgtcaaaagttaaaattaaatatttatctacaatcagaaattaaacttaactatttatgtcgtaaattattctatttattatttgtaatatccaatcaatttcaattagaaaatgtaattaatagcttccaattgtctctaatagtttatgtgatgttcttttaaataatttgaattaatgagattgtatttttatttgaaaaaaaatagcttccaattacctttaattatatgatgattaaatacttaagtttaacttccagttagagataaatacataagtttaatttt

SEQ ID NO: 134075 - DNA, 1079 bp, Cannabis sativa
tttattagttgccgaaaatctcggtcaacagttaataaataaggtttttttagcaaatatttacaacaaaactttctaataatttaaaaatattatatgtatgaccctaatttaatatttcttagtaaaatgacctatttttttttttaaataatttttatataacataaaataaaatggcctattttaaaaaattttttttaaaaaaaaaaaagtctatttttactcacctataaactagtaaaaactaaaataatttttgaatccatatttcactctctaatattttgttctccccaaagggtacgtgcaaggcaaactaaaattagtattgtaatcttgatggtactagtttgacatcttgataaaatgtaaaactatagtgtgataataacaccctacaattttacttccatatcttatttctctgactctcctagtacatactatcacttttgtttgatcacacctatgtagcatagtaaaaactggaggagttgactagacagattttattagtgggctatggaatagagaatgctgtctttgagatgagttaagtcatggtttgctttgttgggattaaccaagggtatggtttatttattctcataaactttaagataatatgaattcttgagtaatgccataaacatctcaggaacttcaaataggactatttttttatgattattttaatataaataatttttgtatttttggaaaagaaacaattattcaacaaatttattttgaaggatgaaatttataatagagacttttatataaaatatatatattaattgctatataaaggttttattaaatattttaaactaaaaaatatttggggatttgtttgaagtattaattattataattaatttaattttaaaaataaagctaacaatatgttatagcaggtcataaaatataatcatcataattatcttttttaatgtaaccattaaataattactcatatatatttaatataaatttttcagaataattatcttttttaccccctgtacttatgacactatactattatgccccttaatctattcagcttgtta

SEQ ID NO: 134076 - DNA, 581 bp, Cannabis sativa
gtgcatcatgtgttatggagagctcgcttaggtattttgctcacattcacgcaactttgggggaaatgtgtgaatgtaccgttgatgtgtcaagcgtgtcatggaagagctgagtctattattcatattatggttaaatgtccatttgtctcactttgatggcagcggtttgattctttggttctaggaacactgtatccaattttttttaatgttatgactgttttctcgaaagcgaaagctaattaggtggtaatgatttattggacttttggcatgcttgtaatgagttagtttggcaagaaaaattttttgttgctaatgaagttgtttcatttgctatttaggagttgagcatcggtcggtttggtctgttttttttatataaaaatccaaaatttggtttttggtctgaattggtgcaattcaaaaatcgaccgaccaatccagaatctaccttaaaactgaccattttgaacatcagtttggtcggttcaaaccgcccaaaccgaacttcttttttttctttaaaatatgatccaatttattctataaacacattattttatattttacaacta

SEQ ID NO: 134077 - DNA, 848 bp, Cannabis sativa
gtaggtacagatcgggggttgtgttgtcagactttattgcgtgtggcagttccaatacgcctcctcccatgcgacattaaatgcgagatgactgtttagaggaaacttgacaccaccaggagatgctttgatgccatcttgctctccgggagcatgtgagaccttacatgccttttccgggaggcatgtccaggatgatcctttgctcaaagaagacttcgctgatttatttaaatgctaacctttcctatccacgtgtcgtcatccggttgggccacatattttgggcaaaatcaggggcaacagtaatattttctttattaaaattattttgacatcatatttattttaccttatataatttatcaaaagttataattaaaatgcttaaattgaacaaattactattgtttattaaaatataacataaagtagttataaggttagggaataagcttcgagattttaggagccgggttgggattaggatccaagttggggtttggatcttcgagtttgagttggggtctgagttcgtgtcgtgtccaaagttagggtctgagcttgagtacgaattcaagatacgaggtataggagctcaatgtgatcatatgaggcctgttcaaatttatagtagttataacttacatatcaatattaagtataatattatcttaatataatattacacaatataatataattcaacacaatattacataatatacatacaatacaacatagtataacattaaaagggatggaacctaacatacatattttatccgcgcgcatggtgtgaagagaatataagaatatttttatttaaggaaatatatttctattta

SEQ ID NO: 134078 - DNA, 2775 bp, Cannabis sativa
  modified_base (692)..(696): a, c, t, g, unknown or other
aaaaaaaaatgcaaaagcataacaaactaacacataaaagtcaaaaggcactaagcctttgcaaacatattaaaaaaacataaacatggaaaaagatggaaaaaaaaatgctagagatctaatttggtggatatccaaaacggtccatgtatgccctccattgtgcaatttcctcttgagcatcagcaaattagtgctccatgtcactcctcattaggggtgtacatcggtcggtttggtcatgctatagtatatttttaccaaccaatataattgttgggttgcaaaaatctaattgtaaaccgtctaatgaaaaaataaaaaaagtgtaacccgcccaataatttttttcagtttggtcgggttaacacgtttaaaccgatctttattttttatttttttattattgttaatttttggtgttcaaataatagatttgaaaaaaaataaatgtatagtataggcctttcaagattaaaatggttacagttgaaattaatgttaaaaaataaatataaattgaataaatattaaagtattaaacaatttttttcaaaaattagaataaaaaaatatactcatatgtaaattttaacttcaatattcaaatacaatgaaaatgatcaactataaattctaaatgtcaaattaaacactataatatatgaactttaaatgtaaaatagtttaannnnnaaacgtaatttatatattatgttaacgcagacttttgttaactatatttaagcctaaattgcgatggatttgcaccagaaataaaagcagtgaagaaaaaataagaacaacagggttttttacgtggttttgtagttaaaattctgcatagtctacgagtcaatcttattagatttctgatacagttctagggcttttttctctaataattttttcgtcccttttttagtgtaacctgctcctatttataattacataggagggcagttaattacaaatttgactaatttacaacaataatcccctgaaattttggaatttgattacatcccacataaaataaatgcagttattatttgaaaattacacagctatgattggtccacttttactgggtcaattcaaacgtgtattaattatgttgtaaagcgtatcgttctgggacgtcttgctgtgaacatagcaacaataaccctggtagcgagctagagcttttcccatgtctttccaaggttgataatgtaaacctcgttgtttctacgcctaaagacataatgctccatctgacaatcgcagttcttggacaaggtgaacttacatcatttgaatgttagcttctatctgagagagctgactcgacggagctgtagatttcattgaaagatgttaggagctgattagtgaaggtaccacaagtgtgctttcctatagcgagatggatgcctcgctattagttgtttagattcactcgactgctatactgagtttgtataatgtgtattatacactaaatgccttaacactcaccgtctcgtctatgtctctccatgtgtagcgaggttgatgcctcgccttgcactactgatgtcgtatggtttctcgtcaatgcgtgagttaatagtctatatatccttgtctcgcttatgactttacatttagcgagttatagatatactctaccgatttagtatttaatgagttattccattttaacatctaaaaatataactaatattatatttgttggttcgtattctcgcaagttgacacgtgtccttctctgaagtgccaaccgaatttcaggtataacaattgccccttagaaagctcttttttaataaaaagtgttttttaatgattacagagggtatatttgtcataatcctttttgaaaatacgcatgtctttgattttgggagttttatggttccaatacacatcaatagcattaatggactgtcttttccacttctattttcatccattagatcttccatgttatgatctcatggttgaaaaatatagagtataaaacggtaagaatcaaactttctaccattttcatcttctccaaaaaatttaagctttcaagaaatcccactcaagctttctgtacccgtgcatgccatccctatctttgacattcttcctacgaatttacttagacttgcttttcgaatccttgtgttgttaggctatttttagcataagttacgggtcaatttcataagctttttctcagttaatgtttccttttggaatggttttatgcttggttttccttgtttcaggttcccgatgcattacagttcgaattttatcaattggtgaaaagacgggacattctggagaaaaatttgctaaagctacaaatttggctccagtagtcgcgacccttttctatggtcgcgactaggaggttttggcagaatgggtgttttttccaatttgcatatggtcgcgactagggctttatatagtcgcgaccagggacaaaacacgggacttttgaccagttttgaattttctccattcaaaggtagcaaccctaattcctatataagggactcaacttttatgacgaatattatcagaaattagccctgaaaagtgaataaaggaggagaggaacctattgtgacgatccggagcaaaatcgccaactagttccttcttaactcttgaatttccgttaatttctgttctagatttaattatggatgttaatattgtttttatgaactaaattcccaattggggaagatgatgaatgttattaaagtttttgcttagttaatg

SEQ ID NO: 134079 - DNA, 732 bp, Cannabis sativa
tagccattgtcaccttaatcttaaccgaaatcacaacaaccactaacgatcttaacctaaacacaagtcacaacagccaccttaacttaaaatcgagcttcgaatggctcatcgggatcctgagatgacttaattggagtcgtggagcttcggctccgccgaggtccaccacgaagagagagaagagacgaaagagaggatttgggagaggcacggagatggttcgaacccttggtcgacgatggtggctcattggagttgtaccgagaacagcgaggaagagagagggagacatgtcgagaaatagagagagtcagggtaggagtttttggtcttggggttctctgggtattggggaggtcaacaatatcgatgatggtggctcatagaagctgaggttagagccgcgtgcggttgagagagagagagagattagggtttacgaataaaaaaaagaagaaagatgaaaaaaaaaaagaaaagaaaaaaaataaaatataattttttttataattactttttaatttttttaaattttttgttaataattaatactacatggaccattaaaaaattattagaaattttaccattaaaaattaaatttaagagattaagtgtaatttaagagatagagaggtaaagcttatatatgatttctcttacatttatgtttatatttcgtgtctcatgcctttgtatatataataacttattctagtccatgtaagg

SEQ ID NO: 134080 - DNA, 731 bp, Cannabis sativa
cacgacacgattcatattttttatgacacgattcagtttttttttatatagcagggtatgatacggtttatattttttatggttcggtacgacacaatctatattttaaaaagcaagaaaaatatagaccgaactaatacgacacataattacaatgtgatctaatattaaattgcataagaatatgatgagatcttaaatgatgttgaacataatttgtttaacttcccatctttctcgaagagatgaaaagaattattcggcaaatgaatatatgattgaatttttctttgatttcctagaactttcgtaggagagtatttatatataaatataatatatctattctatataaaatgtggctatgtaaccgaaattatagggtaagtttttctaaaaacagaattgttggtattgtgaacattgtccacatggaataaatggtagagaagtgagctatatatatataagaacatgggctactctactcattgccaattagttttgagatggaaccccatgattctcaacagttggtttatgagaaattatatggtgacttttttttaaaaaataaaaaaaataacaaattattagatgttaccacgtaaagggtcaaatataattaatcaacttaaagtgttgcaattaataataaatttgttaatattgtttattttcttattaaaaattttcacattttgatatttagaattagttaaattttaaat

SEQ ID NO: 134081 - DNA, 1759 bp, Cannabis sativa
aagtatttggcaaaataaaaaaaaaaatagctttttcaaaaatttaaactaaaattatagcttttagctaaagttggcccacaccaacttttaaattttagcttttaagggaagctgaaatttgagtttaatgaattttttagttgactcatttaccctcattcaaattaaaaaattatcattttattatttagggttttttctcattcgtaaaaatcaaccaaaggcagaaatatcgtagcagtctctccgtcaccttccatcgcatgagtcttctccgtcaccgatcacccacgccaccgttccctaacaccgtcatcaatagttcatgcacaatcaaggtttatctcttcttcttttgaatccatgaaaatgtttttataattttctttttttttttccacttatgttatggcatgagttcttttatttatttatttatttatttatttatttgcaaaagagagagattatttgtagtcaaagtaatcacattatcttgactgaaattgtttgtagcagccattttttagccaacttaattaacaagtggtttttgaaacaaataaaaaaaaaacctgagtaagcttgtgagcccttaacctctcagcccaatcatcatctcaatccaataccattactatattttctcctcttactcaatctcaaatgatgataccaccaccaaaccccaaaagccaacaacaaagaagctgcaacaccaaaaaccccagcagctatgattatagtaagactcttcttgctcaacccaccacacgtgtggtcaaacctaacccatattacaattacaattacaaaaattatctactgcattacaattaggctggtagaagaaagatgagatttcaaaactgaaaatatgaaaaattaaaaattagggtttggaaattgaggttacacttttttttttctcaaaattggtgaggaaaagagaatcgggctactattttaaaagttaatttatgaaaaaagataataataatttgtttaatatttttttagttaaatttattaattttttaaaatatatattatttgttttagtgacatttgaaagtgtaattgattttaatatttggtgacatttttataaatgttattattcacatattttagtgatatttttcaaatattattaaaattaaatatttataataattagtagttagtgatttttaattaaatgtcactaaaaatatatgaataatgatatttttaaagaaatgctactaaataaaatgttattttttcttattaaagtaacatttttaatgaaatgtcactaaagtactataattattacattttttgacaaacaataataaaaatgtcactaatcttaaattttggtgtagtgcacttctctaaaggctcactacaaagcccactattcccactaaaattatcctcaaaaaaagacataggaatagtacccgtgagttgattattggccacagaaaacttcttaagcttacccaaagtagcaatttcataaggtatagtaccataaagttgatttaccaaaataacaagcaattttgtgttggatgatgatgatgcttttatcatagttattatgtgtatttgtgttggattagtctttagctttataactcattattatgctttttattattttgataaaatttattattttaatttaattagatggagaaagaaaaaaatatttgtactaaaagtgatgtagcagtaccacgaggtaaagcaatatggaatt

SEQ ID NO: 134082 - DNA, 838 bp, Cannabis sativa
  modified_base (392)..(416): a, c, t, g, unknown or other
  modified_base (467)..(474): a, c, t, g, unknown or other
ctttcggtgtaaaattatgactttatttttttttttcttctaaagatgttattttatgagaaaaaattaaaaacatgagaaaaccaagtaagggtaatcaagtaccaacttaaggagggtaactagttaccttatatgtttttttttttttctatattttctttttaacttttttctaaaaaatttccttaaaataattttttttttgaaaaaaaattatattttttcaaactcatcaaaccttaaaacccataaaaatgaaaattacctcaagtaaaagaaaaattaataatggtataaaaaacataaaagttaaaaggtattatttcacaaatacacaaaacaacaaaaaaaaattacaaaatacagtttcatgaaattttaaatatttnnnnnnnnnnnnnnnnnnnnnnnnnagaaaatacagtctttttatattgtactgttgttaattttttgttatatgnnnnnnnntttttgttgttattttgatgttatatttttcaagttaattttgtgtaattttcttgttattttcgtgttgtttctataaaaaatcgtaaaaatatataaaaaaaacatttaaacataaaaatataattttattttaaaaaaatggtatattatgtaattattccaaattacaattctctaatatcaaattttgaacttgcccatgtaatgtaaacttggttagcccgtgagtattgggggcccaaaagtttaataattatgggaaatttacaaaaatactgaaatgtgggtttacttttacaaaaatactgtcacacggaaattttttcaaaaatactgtgtttttataaaacaccagtaaaac

SEQ ID NO: 134083 - DNA, 1675 bp, Cannabis sativa
atttaattgagagaaattgattcagatctatttaatttttaaatgtttttttagtaagtccaccaattcgcttctaaaaggtaaacattatgaattcacacccataaatagaagtataacattaagttagataggatcaaactaattataatagatacaaagaaaaagaaagtggggaaaataaaattgaactataaaattaattaaaataaggcactaagtttattttttttttttttgatcaaaggagaaggattctcattaatcaacaagtaagtttcaaacaaagccccacaataaaacagaggctcgggcagcagccaaaaaatcaagttaacagcctactcattagcctttggctattggagtcaatcctcctttgtctatagctatacaatctatactttacaattctttttattctccttgactatatgactaatcgtgtaagagctattatcatgtgtacatttgtttctatttagccaaatatggtagacaactgcaataagcagcaagacactgagtttaccaaaatataataataaaaacttaatttgattgtaaaaaaaagcaaacaaaaaaatgtgtcatttaacaacaaagaatttgtttagacaatgacttgtagaaaataaattatattaaagcattaaaaatagaaatcactatttttttgcaaaattgttatcttgtattactcaattggttttaataagccttgaatgtcattcaatcaagtagatattccaaagcaactgtgttaagcattccttaggtatataacaaaaaaataaactaatattaagaaactataaaaatggttaaaactaagaagttgtactttttttttaataaagaagttgtacttttgttctagaataactagaaaaaaatatatatgaagtacaaaagaatgatgcttgttgaatgttgagtctttagtgatcacgttgtcttgtgtcctttagtttatttaatggctcaaatagagaaataagatagcggcttaaggttgtcttcccatttcttttactgcgtaacacctttaatgtttcacacaacgactcattttcatttttcgaaaataattgagataaaagattgaaggttggaatatcatcgtcgctctcaattattgtttttccacatttgtttgcctctacaacgtctttataatcttcatcattaacatgatccatgcttctagatccctcgtttgcttcattgtcttgttgtccttctttcatttgatgaatttacattagaatcctacaaatgaaaataagatacacatcattattatttgataggtaaaattataaaacatagcgtaatgaaatatggccattttgtaaatattatacatacttgcaaaatataagaaaatttgataaaagaatattcaaattgaattagattcaaaaaatttacctgtagaatctctgcaatattaagatcacaatcttgatcgctaaaaataatattactagatttcaattcatttgtgcactcttgaaaattcctttgggcaaaagttttttttactttcatttaaaatgacaagatcttcaccgctttccttagcattctctttttctccacaagttctctgctttgcaccaccattctccgctaaccataatacaagtttctcaatatttttgaaacttgt

SEQ ID NO: 134084 - DNA, 2523 bp, Cannabis sativa
  modified_base (50)..(57): a, c, t, g, unknown or other
tgctgcctctgctcccgtacttcaggaaggtggcaaaatttctttcgccnnnnnnnnacccaatttactcccaagggcattaagcatttgcctaccctgtttgtcctctacaccgtctagaagtggggcatgccttctccgcatgaggtcagttggttttttgacttgaagtctacccccaaacaaggcaggtcagggtacttctatatctctcagcctgacttcaagtggttgacagacaccgtggacaaggccgtgaccaaaattggaaattttattaacgagtattacatggtggaaggcatgagcaccacttatactcagtttcagcaaatccctatatattaccgtcgactcctcacgctagctcttagggacagagctcaaaggattgttcagctgtcggatgatgctcggaatatcactttattgacctcggaggccaattttatggagtacgggcttcatccaacatattttgttcctcagcctgtgaaggagaggaagaggaagtccagtgctggccgggctaagggagctgatcaggagaatgaactcattcaactaaagcatgaggctaagttgaagggaggagtcgtggccgaacaacatgcttaagaatatttcgagctgaaggaagagcaggaaagaccgctcaaaaggaagaagaaactttcgaccgggcacaggcccattgaacatacaattcagatcagggatctcagcctacctgctcggccatccactcctgtagtaggaaaggggaaagtcatcctggaggagcaagaaaactcgtcggatgacgatgccccatcaggtcttgctcgggaagatgcttctgccaaagtgcaggatattccatcttacttttaaatttcttaattattatgctttcatatttctcatgctttttctaaccatgttactttcgctttatacagacatgtcttagaaaatgctcgaagctctgaagaagagagtgggaggaagctcgggcttatctcctccggctaagaagtccaaagacggtgagacaaccccgtccagagagaaggcaccagctaaaatggtaattgacctctccgaggagcaaatcgttgcagaccttcctgtcccaaaaatggctaagtccaaggaatctcgaggaggtagctcggacaggccagagcagttgaagggcggatccgaactgatcaaggcccctgccccacctctggtattgcacccagagaccaagagacgtaaagaaatgctcacccactatgtgactcggtcggtccctgaggggaacgagcagctggctggggcagacaatgagctttctttggagctggcgatgggaggagttctgaaggagtatacgagggcagacagtttccttttttccttcttcacttagttcagtttttagtattgtttctctgtgcaaaccggtttgaagatggcttatgcttattcccgagctaagtcggctgcctctaagaatgccgccattttcaacaatatgctggcggaagtggacttggccaggaaggatgccgatgaagccagggttcagcttggggctatccgaataaaactgtaagaggtcaataagaagcttcttgcttttgagaagaaggtggccgagatgaccaaagatctacatgcctccgatcaacttgaagccgacattgcctccttgttcaaggaagtggccagccttcaagaggaaaaggaggtcatatgggttgtctcccttaggttggaagaagagaagaagaccaaggacgaggagcttagtgctgaggttgagaagtataagtcagaggtcgggcatcagagattcgaagtggagaggctttgttggaaagtgaatgctctagagacagctggtctcgagattttctatgacatctggaaggctaatccccaggcaaactttgattacttgggtgattccaaagacatgtttctggagtactaagctgctcaggcagcctacggggaatccgaggcgaccacttccacctctaaccaaaatgttgaagcgccccctgcccaggcaaatgatcctgtagctgacccggttgacccgtaccaagagcctgggactccagccgtttgactgctctctttttctatcataaggccttttttaagacaaagtgaccgaccaagcggtctttaaacttggaatttattttttatttttcagacaactagctgaccgggcagcctttaatcctgggtttgcatgcttttgttatcattaatgaatttcattctctgtttataatcatcgtgcaattgtgtttgttttatttttaccaaatgctttgtataggtataggtgccacccaagtgaccaagcagacttatgactcttggtcacttttatattttttgcaagtgtgtttttttttgtctgtccgaggttttaggcttgaccaaaccttttgtacgcacttgatggtaaataaaaaacatgctagcaaattcgactcaatttgaattttaaaatgaacatctttattcatttat

SEQ ID NO: 134085 - DNA, 1695 bp, Cannabis sativa
aaaaaaaaaaaaaaacacaacaaaaagagagaccaataggtaaaaccattaaatcaaacactaaaatgatcataagaatccccatacataatttcagaaccaaattgtacatatatcaatgttattgttagtattagtaaaagcaaataacattaatttaccaaatttaatggcaatgagcaggatcaaagattatatgccaacaaatattttaatttcagtattacaaagtaataataaaacagagctagattcagaaaatgtaaatagaaaaattactttttctcctagctttacaagcttcaactcaactacttgagcaataatattggcattaggaacaacattcctattactggacctttgcaaagaataaggtatgtgctaccacagcaataaatcaatctttatagtagcccatatcattgcaacagtagaaattccattaatctcttcattcaatatttggaagaaaaaaattacaaagaaaatctaactatgagcaatataaactctctctaacatatgaatctcttttctcagaaaaatctacaatcttaactttcggtttgcattcaaataacactagatggagcctctataaattcaaaataaaaaacttactatacatttttttttttaaataaatgtacaactaaaattattatggaaaaaaaaactaacatgtgaatttggaggagttggtctcgattggttgtgtgccttggtggagctagaggagcagtggttgtgggctgaacaagaacaaaaacagagaaataaaattaagatctcaaatattgtaataaacaatcatagaaatgattatccaaaacactgaaatgtataagattttttttgacatatcttaaagatattacatacataacataaaataaataacacatttaataaaaacaaattataatctcattttctactaaatatatcatgtatttttttaataaaaattacacaaattttatattcttaaaagtattatgacgaaaaaataacatatttactatctgtttgagggtttcggtcaacaaataaataagatacaacataagataataactctaatatatacataagcaagaatagaatcattcttaaaaagcttcatacaccactcaagtatatgaacacaaaaagcttcatagaaagatgatgacgatgataataatatgacacattcacaaaatatcacttcagaccaaaacaagaaacatagaaagaagtggattgaaatcatattaatatggatggaaacttcacatttatgatattaacaatagctttacctccctagaaaaaacaaataaatgtataaaattgaaccacaataagtcacaattatgaccacaccagcagagggaaaaaataatcaattcctgcttgacaatactcaaacaataacactcatacacatcatccctcacataaaatttacgaaaaataaaagtatttcaaaaccccatactgtaaaacataaccaattataataaattttaaaacccaacttgataatataagaagaaaaacaaatcaatgagcacctattacccacttcctgtctttgtgtatctaagatcgttttttttttttgaataatggttaaatttcattaaactaaatcatccaaaaccaaggatgcaaaaacaaaaggtaaagagtctctactaaaagtac

SEQ ID NO: 134086 - DNA, 774 bp, Cannabis sativa
  modified_base (494)..(509): a, c, t, g, unknown or other
atgtcaattaaaattttggaatggaaaattttttgttggatttactaaaaaaatttggaatgataaaatttttgttagactcgctaacaaaaatataactacaaagtagcagaaaaataacaaaatattaacttaattgtaacaagtaaaataatatcaactcgtctatatatctttctattacgattttttttactcatctttgacaatttgatttatctttttgtattattacattattttttttcatagactttgttgtaacaaattaaaaaaaaaatttgagaattggaaaaaaaaaaaacaaaaagataaaaaagagaaatatagagagaagagaaaaaaaaaataaaaaggtcaacaatgacttcaaagaaaagtcagtttaaactgaataaaaaaaaatgtaaagaacataattttttttttgaagctttaataagtgaaaaaataataaaaaaaaaaaattaagtaaagaaagtataaatgtaaannnnnnnnnnnnnnnnataaatgtaaagtttagaaaaaaaaattagtattttgtaaaaattccccagtaataaatacctctttttacactatattaaaaatacgtttatatacaaaatatttaatgtcaaatttattttttttttacgaaaaatatttttttttaattttcaactgatggaacaattgcaactaatataatgtaaaaatgagaaatttttgtaattatattaaaaaattaagcatataaaaactcaaattttcctaataatactcattcat

SEQ ID NO: 134087 - DNA, 779 bp, Cannabis sativa
gtgttgttgtagaactttatttcagacaaagtataaatcaatctcgatatgctttatgcgagcataaagtataggattttcagcaagaaaaacagtgctttggttgtcacaccaaacaaaaagaactactacttgaggaatgtgaaactcatgaatgagagattgaacccatgttattttagcaacaacatttgcaagactacaaaattctgcttcagacgatgatctgttaatagtgacctgcttatgtgattttcaagcaacaagatttctaacaaaataaatgccatagccaaagattgaacacctaccatctagatcagatgctcaatctacatcgcaaaacacatcaagggaaaagtttgaaactagtcgaagtagaagaccatgatttaaggtgcctgcaatgtatctcaagattcgttttactacagtctggtgtgtatgcaaagggttttgcataaattgatacactttattaacacaaaaagtaagtttaggtttagttatggtggcatattgcagaccaccaacaatagacctatacaaagtggcatctttgacagactcactaccataagtagaaagtttgagaccattattcatgagagtattttgggtgttcacattctttatatcagcctttattagcagatcttgaaaatatttggtttgtgtaagtaaaataccatctacagttctggtaacctgaattagggctgtacaaaaaaaattgtaaaccgcccaaaccgaataacccgcccaaaccgaaccgaaaa

SEQ ID NO: 134088 - DNA, 507 bp, Cannabis sativa
  modified_base (47)..(50): a, c, t, g, unknown or other
cgttttagaagttcatatttaagatgttaataacatacttgttagtnnnnctagatcctggtaaaatattctaacaagactagctccctctcaagagttggtcggctacccctagccagtcctatggctggccagccttgggacagcaccatggccgaccagcctggccactagaggggcctggccagccaagaagtgcattgtaggctttgttggacaactctgcacgtggacaacagatatgggctgcaaatggggccctaaaagcccaagagaatgactgaataatatatagaattaaaggtactttggtcttttgtaaatagctaacaaattatacgaatgctaagggatttaaattgtaaacctagggttttagaccttctatataatgtctttaacctttgactggaaacctaagttgcctccaagctagaaacctacttctaaactctaagtgtctgataaactctctctctctctctctctgtctctctctctgtctct

SEQ ID NO: 134089 - DNA, 1063 bp, Cannabis sativa
aaaattattgggctagttatatattttttttattttttctttgaacggattagaattagatatttgtaatccaacatttatattaagttgataaaaaactcactaaaccaactattaatggagtctaattaattgagttaaacacttattagattggttttatagattatgaagagtcatttttaacaagacaaatgatgttaattcctgatttagatacgtaccttaactccgatgggtagagaggccagcgattgaaccactcaacgactcggtcgtccgtgggatcagtggaaacaggtaccaccgtgggctcctgtactgccacgtcaaacacctccttccagtccctgacgttcttggtgttttctgcatcaaagtaacccaaaacactcgtctcgttcctcctcaccttcctcttctcctccacatcctgaccaaaaaacttcctcgctgccgactccagtttctgtcgacactccagtggtaccccgtgattgatcacctgaaagaatccccactcgctacacgcgccaccgatctctctcgcgagtttctcggaggtgcttattgctggtgaaaggtcaatgagtggtatgccctccgcttcgattaccaccagcctaggcctgtgctcgggatcttggatgaaagctggatcaacctctcccatggctgcgtctacgaaattagtaattgtgagctgaatttaagtcttcgcaattattgatgaatgatgacacagttcaatctagctatttataaactagttaattacccttcgcacgtgtatgattaattgtaggttaatattttcaaactaggttaggtgatcggttgttgtaataatttatttaatataaaatagtttaactatgattatttaaatttgaaatatttaataatattagtggaaataagtatggcatatagttgtattaattttatgaatgtatgttatgatataaatgttggaaatttataggtgcttcaatagaaagactaaagtcaaaatacaactcaaaataaaaagtacaagaacaataatattgataaaataatg

SEQ ID NO: 134090 - DNA, 609 bp, Cannabis sativa
  modified_base (552)..(552): a, c, t, g, unknown or other
aaaaaaaaaaaaaaaaactctacttatcaaataaaaaaaaaaaacgccaaaaactctcccaaaaatattaaaataaataaaagatggctttatattacaaaaaagtcaaattctagaaaatatatatattaaaaagtcaaaagtgattacgaagtgtcaaagtctttacaattttttcttttagctaaatatttcaagaagttcctagttatcttctatgtattaagcaattgttttttacaccattacacacctcgacacattgttagattttagtataaattacatttttggaattcaatggctgtgaatgatttattaagaaatgaagggtaggaaaagtgttcaaactagttaccggatattttatgtgcgattttttttttttttatccttttttgttctgtattgttttgtgttcattttttttttatcaaaactcatttgtttcttcttctttaacatttcatcttttttcttttcttacctttttttgttctatttttattttggttaattagcaatttttcttctcgaactttgacatatacnaaatcatgtcccttgaatttttttagccgttaaaaattctccttgaactattgagat

SEQ ID NO: 134091 - DNA, 966 bp, Cannabis sativa
atcaaagtctaaagatttgattagcaaaacttaacacaaaggaaatgcaattcaagacagtaaacaaactgaattcaatacagtagaatgaaatcaaagcattgtcattaagacactcctcattaaccaagtgtaacaagattgagattacaagtgttggtggttgaatcaataagatgaagagataggtacattactaatacacacacacaagaaactggttttggaagaaccagtatcaaaaattaccctttccctcttctctctctctctctgatttacaaatttgtaaattgaaccacacaatgtagagtaaggggagactatttatagacaccaactaccataactgttttaactgaaagttagttaaaacaattaggtaagtaccaaaacagtaagtgtccacctaagacttagtttttaggccataatacaacatatatattcatattttttcttaattctgtattttgtccactttcaaaattatttaatttaagtttttaatttaatgtaatcaataaaaaacaaattttctataaatttatatatgtatatatatttcttgtttttacttttaaaaattagtgtaaagtctaaatattgtcatgtgttctatataattatatataaatatagtaaattattgactttaatattttaattagaagtatttattctttatgtatttttgtttgtttatataagtatatatatttcttctcttttctttcagtttgtcttgagagatattatagtgtaatataatctttttatcatttaatatttttaacgattactttatatcctgatatatatatttatatatataaatatatatgtggaatgtattcctatttatgattattgtagtcactaatgagattttctcattttaatatttcaaaattttttattatttataatctgttataaatattattaattatgtggatgtccaaa

SEQ ID NO: 134092 - DNA, 515 bp, Cannabis sativa
ttatatcaaagggagaaaagcgagagagagagggaacaggtcataagagagctattattgaaaatgagaagaaatggaaataatagagatgtgatcatgtgagagaggtcccataagtttatgtgttatgtgtatagatatatatacataatagatattctttgtaaaaaggttctaaaaaaacatgatgattgaaagggaaaggcccatacaacaacaattaaaatagggtgagatctctgttccacgtggtgctgtgttgcccttgattgattcattttataataagtttacacaagaaaggacccaattcaaaaggcgcctgccttccctgccctatatatatatggttgtatatgtaacgttgaatgctattacagtcaaaacttggctttcttatctacagtacaattattctaaatcataagctctttctcatgaccagtacaataatttttagtttcattcttcagtggtaaatcgtaattgtttagtgggaaatttacatggtatac

SEQ ID NO: 134093 - DNA, 500 bp, Cannabis sativa
  modified_base (55)..(56): a, c, t, g, unknown or other
aacattaaatgttatttcttatctatattaatatgtaaatctgattatattgaanngagttttatttagggcatcaaaacccaacaacatgtctgatgctaaaccttctctcactcccataacaagtggcctaagattatcgacctatggtagcatactatttgaagaccgtcaactttacgtatcatttgttgttgccttgaaatatttagtcatcaataaacatggcatattatttattgctaaaaagaacatgttagttcatggctaatccctcctaagcacattggcatgccgtcaagcgcatcttaaggtgtctaattggcataattgattatggtttcccaatccattggtcttttctaaatgaaatttatgtcttctatgatgcaaattgggccacttacccagatgattgatggtttacttcaggatataccattttcttttgctcaaatttcattgtctggtgtaatgggctcaccttttcaggcagcgga

SEQ ID NO: 134094 - DNA, 607 bp, Cannabis sativa
tccccatttagacggggaatccccgccccattaagggcgggtccctgcgggccccattcccgtgggggaaatatgcatccctatgcacgactttactaggatggaaatttcccatataaggaaggagtagggatttgaaacggaaggggtttgatttttcatccttaaatattaatggtaatatatataagaaattattaattagtatctcaaatcagaataattaatagaaaaaaatataaatcggtttaaaatataaaataatcgaaaataatatttattttgatatatttattttttttttatttttatttaataaaaatataattaatatgaagtaagttaaaggaaagaaaaatatattctttatgaaaatagggcgagaacatttacttttattttctctttaatttgcgtagggcatactaatttctttaattctaaaatttagtaaacaaattaataagaatcaatcacatacaattgattctaaaatcaagagtgtaaatccatgttgtgtgagttaagtcatgttaagttttcttttgttaaacggtcagctaataacgttgctcatgtgtttgctagagcggctttattatatcct

SEQ ID NO: 134095 - DNA, 531 bp, Cannabis sativa
ttattgtgactaaatgtgtttttagccacaatacttgttgtgactactaaaactaaattagtgacaacttgtgtctaaatactatgtttagtcacaagtaaaaaagaatattgtgactaaaaagttatcactaaaagtggtatttttttgtggccacacaaaggatgagatgcgaaagggagtatgaccacgcttcttgcatgatctgttgacgagagggtatgagtagaggcgacacctcaccttgtagctcctaacatctcaacaaagggtatacaacaaccaccacttctgcaactcgggactacttgacacgtaccagacaaaggtacaaattaagcgcaagaccaccttctgcacctgcaactcgtagcaccagggcatcagtttatcccttgagaaccacaagtgtatctcaggataagtacctcatgttagataaattaacaattaacccaagatctatttgtatataacatagaacacaatagtagtatatgataattgagtatgtgtacctgattgatccat

SEQ ID NO: 134096 - DNA, 1930 bp, Cannabis sativa
gtcttctcagatatataaatctcaattacatgtaaattgtctacgctcgtgataaatcaaacatgtaaaagacattaaacataaaaatcctataagctatccggaccatatacgtacttatcaaaatttggttatattttattatagcataattgacactcacttctcagattttgtatcaaaatcataaacatttaattggtgatcaggcaatttaaagtaaataagtatgaataaaatagaatacatagaaattggaagaaaattaaatcaccttagaaccataaatcaatgtcaaacaatatccatataaatcctaataaaatgtttagctactcatgttcatcgtagcaaattcacacatattaattcagaataaaagaagaaaatagagaggaaaagaatgttgaaaaccccgttgaaaaagcctttgcgattgatttttctctatatttttcatactcctgaattgcttgctaaaaaacatcgaagtccactcattttatagccaaaaaaagattaaaaagataataaagctgagaaaaatatcatctgtttgaaaattgaaggggcgggccacaacatgttgatcctatgtcgtggaccgtgtatgcaaaaatccacgtctcagtaatgctcagacaagggtctaggcatgggatttccatgcctaggcatgacccccttttttatgggcactgagcattctatgaacttatgcctaggcataaggatccaatgcctcgggacacccatgccttggtccaatacgacctttctgccaatttcttaagcctttcatgccatggcatgggtttgtcatattaaggcgctcctccaaattttaattccttcgcctcaaaaaatccaatcgcaccataatttttggattttttctcgaactaatttccaggtgctcttgccccgagaattgatatatttttttttttcatatttcttcaatattttctatttttcttctattttaaacctgtaaaataaaagataccaaaaagcgtaaaattgctccaaaaaagagtaaaacttaattaaaaaaacacactaaaattaacctaaaaatagtactaataaaaacctaacatgtatgctacgtattcgtgccaagccacctacgtagcaaaaaggcaatatgatgtatcattgtgggatacgacaaccaacacaaagggtggagatattgcgaccctacaactacaaagtgttatacatcaaggaatatggtctttgatgaggtatcatcatggtggtcattacaaaaggaagcattaccaaatattaaagaaataaaagacagtttgcagtagaaaatgggggagcaattgttgagttaccttcaactctagaaacggattaagaggaacaaaatgaagacaacgaagacacaactcgcagtccctgggaaataggggtgcatcaaagaacatgacatgatgatagccaaccagaactctggagatcaagaagagcgcgaaagccaactctgaaatacgctaatgctgttgtagctgaagaagaaaagttcagagaaccagagtcataagagtcatactaaaactccaagtggctaggagctatgaaagaaaaaataagtgcgctagcgaaaaatcagcttgggagttggtgccaaagccgaagggagtgaaatcaatttcgtgcaaatggatctacaaggtaaaaactcgtcctgacgactcaattgatagattaaaggcttggttggttgctcgaggattctctcaacattatgggctagattacgacgagaaatttagcccagtcgctaagattacaatagtgcgggttctattagtacttgtagctagtaaagactggaggctatggcagatggatgtgaagaatgcctttctacatggagaattggattgagagatatacatggtgcaaccaa

SEQ ID NO: 134097 - DNA, 1009 bp, Cannabis sativa
ttctcagccagggggctcattcctttccgtttctttgaagcgtggtcttaggagccttcgtgtaaattggaaatcgctaaagcttggtgttgttcaagtaatgaggcttctaagtcgttaattcaaaatgtgagcaataccaggaaggccttgcaagtgtggaagaaaagaacttaaggagttaatgaagtggatatcaattctatggaaaaaagaattcaatggattcaacaacaacccatttccgatgctttaaaggaagaagaatccaagcttcgtctcttattttgctcttttggtccaaacgggaaagtatgtggagacaaaaatcaagggaaacttggctagcaggcgattataataccaagtatttccacacagcagtaaacattagaagaagaagaaatagtatttgggcgattaaagataatgatggcaggatttggaaggacaggaggagtatttcaaaggttttttattcctactttttggatttatattcctcttcgcagcattcatttgatgatctttttgaggaacttcaaggaaagactattagtactcaagcgaatgaggaattgactaggatcccctctgatgaggaaatcaagaaggttgtttttagtcttcatcctctttaggctccgggacccgatggcttctcaggttgcttttacagaaagtattgggacatagttggttcgtgtctttgctcgatggttagggaagccttccgcactggagtaattgatagcagacttaacagaactttcatctgtttaattccaaaagttgagttccctttaagcgtggatcagtttcggccaattagtctttgtaacttctcctataaggtaattgcaaagctcttggttaacaggctaagtcctcttatggaggatcttattactccatttcaatcggcatttgtcccgggtcgttggattgctgaatcttctatcctaactcaagagttaattcacaaaattcaacacaaaaggggtagagg

SEQ ID NO: 134098 - DNA, 617 bp, Cannabis sativa
ggagccatagtctgtgtaacaagaagaaatagagtcgatatagtgtttaatattacacattgatttatcatgtaccttgtcgttgcaggccctccaaatcgtatctaccacaatcgaagcatataggaacaacttatcagtatcaactcctctgcattttagatattcaacgtaattgtatactcatttttcaatataagtatacatgaataatcaaattttccattcctaagttaaaaaaaaacaaaaaaaccttaataatggaaaaaaaaataataataaaggtgagaagtaaaataaaacgaagaggtggaatatatcgtgatatattgagagagaagctaagccgaaagattggttcttttctttgaggactcaaccaacttcttaataaagccttccattactacatacatatatttccttctatttttttatttttaaaaaaataaataaataaaatccttaaattgtaaaataaaataaaaataaaataacacttgacctctatagactgccaaagcgatcagtagtagtacctagcttctgcaacattcatcatcactctcttgaaaactcaaacaaaaaaaaaaaaaaagtgaaagtagaaaaaaaaa

SEQ ID NO: 134099 - DNA, 654 bp, Cannabis sativa
aaataagttttaatgaattttaaaataaaaaataaaaatttatgatgtgaactaataaaagggtgatacatggatacttacttggaagaaaacagagaagtatctacgaaagttccagaaatgtgatagaaaatatttttaccaccaaaaatacgacttaggtatttatctgctacttgggataaaacttatgtatttttgccgcaaattactcaatttaaaaatgaaaacttctaactaaatataaagttaattcttctaaataacaaataaatggtaagaataattaaaataatttaaataagtacgtaaaataaataatttcatttaacaaaagattactacataaatgagtattatatgcattaatattaaaatgagtatcatagcatagttgagcttcaatatcatttagttgggacatttaattctatacataatatttgaaagattggtttattaagtttggcactcgtagctgttgcctttgtggtcaagatgatgagtttcataaccatctcctcattgagtgacaaattttttacagtggctaaatgttaataccagattttgtacagggaaagaaatatatacaagtagattaaaagaagcaagttgaacgagtttcaaaaaaggttgatttataatatttgg

SEQ ID NO: 134100 - DNA, 1682 bp, Cannabis sativa
  modified_base (1613)..(1620): a, c, t, g, unknown or other
ggccgagatatcgaacaaaaacaaataaaatatacctaccaggtccgatcgaaggattaaaaagggaaattttgcatggtttaggtttatagcccagagtttcaaaacttcatcttaaaggttaatcttcactaaaccccaaatgggcaactgaaaccgaatatcgtgaaattaaagtcagaatgtgattacagctaagtcatatggttacgcacaatcaaaatctcataaacctaaacctagattttgtacggtttttctagaacaagttcaagaactatcaaattttttatagtggaaacccagaaagtcacatatttaaatgttaaagaggaaaaagatgaagaacttactcattattcaaagcttcggggctgtttggatgacactgatcggcactttttggaaattcctcgaaggatttgagagaaaaaggtgttcttgctctgagatcgtgaagaaagagaatactaaaagtggtttattaggactttctgtcctattcataagcaaattagtgaggaagtttaatcgttttgaaatttaaatgcctcgatttccccccaaaagtaaacgttgagtatctgaagagcaactatcaaaagtgtgcaaatctttggaagattttgagatacgaatcaatcaacatttatgagccgaatattgaagagacctttggtcagaatcacatcgaatcactaacagtcgcattgaacacgtgccacccgttcaagcacaaattcaaactgagtgaagtccacgtgcgacttcagaagtcctgtgtagacttggggcaaatattatcccattttttacactatgactatgtactaatgacacgtgtctatcgttctttacacttggctggaggaatgttttgaacacactccaagcaacacatttgcacgcacaaagtctggttgaccgagcagagcaagggtagatgacccaagtaaagagtgaatctgagtcgtgtatcaagacttaattacttcagagttgacatcgtgaagctcaagcacaaaggcaatccctacaatcatgggatcgtatcagagagatacgcaagctgtctcaatctctcattttatgtatctaaatatgtaatatatgttcttaccaattatagatattttaagcaaaagggaaacctttcctcatgcatttagccctataaatagtgatctaacttcattgtaaaagggatcgaaatgattgctttagagagagatctaagaaaaaatactcagagatatcattgtgagagctttgagagaggaaacaatgtgttctttgttctcaagtcaatacaatttaaggggagtaggctattaccgaactaaagcggccgaacatctttaaaaccttgtgttctttattgtttactgatttttgctctgtcttacttacatttcttatcacttattaattgactcactgtcgttggctaaaaacgaggtcaacatataattaattaccaaataaaatttccatttattttatttattaattagacttaacaaagtctttaaattaacaaataaatcctaaaatctctttttttatttttacaattaagcccctgctaagtgaaaattcataaataagacatnnnnnnnntttagaattataattgattacttaaaaccaattaactgagtctgcaaacagtattatctcaa

SEQ ID NO: 134101 - DNA, 1135 bp, Cannabis sativa
  modified_base (639)..(656): a, c, t, g, unknown or other
aatagttcagaaggtatttttaacagccttaaaaattcaaggggcataatttaatacatgttaaaactcatgagacaaaaatcctaattatatttattaaaatccaaataatattaaacttgaccccaaagtaacatgagaggtcaggtcaggtctaagtactactaatataccaaaagtatacatatgaaggagagtagataagttgcctttgattataggtccctttacaggctttgtccacatgcatactaacttaaaagagatggaacgaaagacaagtgtccattatagtgcatgacattaatcagaaattgtagttgtgagaagtggagaacctacatagtcacaagaaattgtatgatcttttagcaaaaaaattaaaaaaaattgtatgatcaatttttataaagccaatattaactataaaaaaaatacgtgacctttagacacaattgtcactttcttactgttttccaccattcaatgtgaaatctcaaattggaatactattgtgttttgtatatgaatttgtgggctaaagcacacacaaacaaaacgagctctctctaatggtagtacatggaagaagaatagtctattctctctctctctctcttcttcttcttattattattnnnnnnnnnnnnnnnnnnattattattattattattatccaccgaatgtgatttttcatggtcagttgttgacaaaatgaaagaaaaaaaaattaagagagaaaagggaaaaaagaacaaaacttagattgtttggtaaaggaaaaaagatgtaagataagaaaaatgaaaacaagtatattggtggtcctactaacaaaatatatcatttttttttcgcaaagtaacaaaatttatctcctaaaataataaaataaatgaataataataataataaataatgtggatttttatttattcattatatcctcttattatcttacttgtatgaaaatttcctaatagcctgataatttcgagatatttttgagtgaaaatgatatgaaatatggaatttcataagaaagttacaaaaatatgatatttataagtttgccattcttctatggcatttttttttacatttaaaattttttatagtatttgatatgccatat

SEQ ID NO: 134102 - DNA, 1792 bp, Cannabis sativa
caacaaaattattttccccaaaaccataagacatcaaaataaaaatacatatcaaacatgagcaatcattgtcaacagaatttcattcaatccacacttactaatattaaagcaaaaagattaatataaactaaacaaatcgataaaaataagaaaaattaatataaactaaaaaaattgataaaaataagaaaaattaatataaactaaaaaaaaaaagataaaaataagtaaataaacaactaaacaactaaggaataaaattggatacacacgatagttaatctccccccacacttattataggcattgtcctcaaggctcaatcaaataaaatcaatgcaaaatgaaaagaaaagggtaagaaaaactcccataagtttgctttatttaacgtcattagctcgactgcatgttgtgctcatgtgatcttcatgttgggtcttctaacaaagacttatccttatgtacctatcaatggaatctaacacattgaatttgagtgtttcaccatcaaatccattataagtatccatgcttttgtatccaacttcttacttgcagtgagtaagaaggatctcccaaatagagttgatgtaggattaggatcaccctcatttttttcaaatatatttttgttttcaaatatttctaataattttttttttcaatttgttcagatttttttttctaaattttatctaaaatcttttttttttctagatttttttctaaatatctaaatcttttttttttcctctaaatatctatcttttattttgatttcttttcagattttttctaatatctatcttttttctactaatataatttttctaatttttctaactcttttttttttttaaaaaaaaactaaaaactaaatctaacttgtttttgaaagcaaactaaaactaataacttacaatttttttcgtggcttgatttggtcacatcattcttccacatacactgggtcaacaagatggattactgcagcttgtaatttaaccgttgactcataatatgattttaacttctgaccattcactttgaaaacctttcccgtagttggactgacaacctccactgcaccatgaggaaaaactttggtgactacaaatggtcctatccaccgagacttcaaatttcctgaaaagagtttgagtcgagaatgatacatcaaaactttctaaccttctacaaaattctttcgatgaatgttcttgtcatgaaaggcctcagtcttcttttgtagattctcgagctttcataggcttcattgcgaatctcctccaattcatgcaattcaagcattctttgttggccagccaccaccatgtccatgttacattttttttaccgcccaccaagccttgtgttctagttcgatcggtaggtgacatggttttccataaaccaaccgatatggtgacataccaataggtgtcttgtaagtagtccggtaggcccataaagcatcatctagctttgtactccagtcttttcaggttggattcacagtcttctcaagaataagtttaacttctcggttagagacttctgcttgtccattggcttgagggtgataaggtacatctaccttgttagtgacactgtaacgacgaaaaagtgcttcaatgcttttgttgcagaagtgtgtgcccctatcactaatgatagcttttggtgtaccaaaacgaacaaggatgttggagcaaatgaaatccaccaccattttttaattgtcagttctggctgctgtggcttctacccatttagacacataatc

SEQ ID NO: 134103 - DNA, 913 bp, Cannabis sativa
  modified_base (856)..(861): a, c, t, g, unknown or other
atatatatatagtggtattggttgatccctcttagtaattctcttttaaaaaatatatatttatacattaaggacgtgtataaaaaataatgaaagaatattaaaaataaaaatatgtttttagtcataactttggatatatgagtcccatttcgttttttaaatacatttttgtgaaatcatacttctattattttgggtcaaaattttatcataaattataaatttaaagtgtgttttggaacacttttttaatgagtttttatttttttagttaaaaaaataaaaatgtttttttaaaaaaaaaaaaaaacatattttataaatttgtttccactatttaatttttaaaatgagaataaaagattttcaaaattttgaaaaaaaaaatacaatttcaaaagagaaaaacttaacaatttttttctctttcttaattatagtcaatttatattttctttcatcaatattttggactctaacccttactccaaactcgaaacctggacctgaaccccgaaatcaaccctcgattcccatcttagacccagacccaaccttgaactaaattagaccttggacccgacctcagacccaaagcttggacccggaccagccttgaccccggacggtcggacccttggacccccaccctactggagcacgaacccctacctcgactctagacccgaaccccagactcaaaatccaacactaactcgaccccaaactcgaacctcaaactcagatcccagccctgaacttggagcctgaccccacgctcagcttcggaccccaaacctcgacctcgaactcaaatcctaacccgaaccttaaactgttgggttttatgccnnnnnnaaaactctatttcaatgtaattcattttattcaacatcaataaagaaacaga

SEQ ID NO: 134104 - DNA, 794 bp, Cannabis sativa
  modified_base (605)..(612): a, c, t, g, unknown or other
tattacatttatgtcttgacccaaatcaagatcattagggttgttgccaccgaatgtttcagagattaaattagtgacttttttgaaggaaatggacttgaaattgccatcttcatgaatggttatctctttcaaacctaatctaacgctcagtatgcatgaatgtttacacatgtaatcaaacacatattcacctaaagtaacaaatcaaaacttagaaattctagagccacgaaaaataaaaaccaacccagttcttccccaaattacctcttctctgtttcgaccccggagcaagcttctattaggcgaatccaagttctcaatgcctttaatctcaaatcgtaaatactcaaccaaaaaaacaatgatttttgaagtggatgagatggggtgtagaagctggtttcgaagagaacaaaatggctcgagtgggcgtggtttcgaagaggatggaggagccgcctatttcgccaaagaaaattcgaagatatgattgagggttaggttgtgaacacagcatgcatctgattaggtttatgggatattacatgttcttgcgtcggtactattacattttgcgtcgtttttaaaacctcgctaannnnnnnntcgagtgttaataacagacgcaaaatgaaaagcagttttttaaaatttttgtattactctcgtcggtttattttttatcgtcatttaataaaagatgcaaataacatattattagcgtcatttttaaagagacgggtctaattatttgggtactattcacgtcggtcaacgctatgaatagt

SEQ ID NO: 134105 - DNA, 832 bp, Cannabis sativa
tcagtaagacaattctaataattttcttgcataggtcagatggctatttttgcaatagttaattaacaatggtgtcttattcaacatgtgtacagattactataaaataaagtggtccattacaaaaattagtttacacaattggattataaatctttatccttctaatatgtattaaaatatgttgttcctcttttcaaaaaataaaaaataaaaaagtaacaatagtgtcttattcaacatgtacagattactacaaaatagatgttttttggaaaggaaattagcaaaatcaaataataatgcatttattcacttttcctttttcaagtgagtatatattatacattgcatgtgaatgtgatcactttgtcaatatttataaagtgatcaaacagaaaccatttatacatatttttatttttttaaaaattatgaataattatataaagctcatggtgtgatcattttattctcattgatctatccaaattttttaatactaaaaaaaaaaaatcaaatcggtcatggtcatggtcatttagtactatggctagctacctttccttaggaatgtgctctttgaattttcaacttctagagaatattatatataatatagggacacgattttgttctgttatattgtacttttacggattgtaatccgtgatgtacggcaactgtaggatgggatagttaatttgatttaagggctggagttaatctaaaggtatttaggattaaaaaaaatagcaaccgattaagtttttgaattttaaatttattaaatttgaaaaagtgaaaactgacatccatcaatcacatcaac

SEQ ID NO: 134106 - DNA, 696 bp, Cannabis sativa
  modified_base (657)..(670): a, c, t, g, unknown or other
aaaaaatagtagcaatggtggtccgatggtggtgcaatggtcacctgatgctactttttttatttacaaaaacataaaaaaaataaaataaaaaaatgggtagcatcgggccaccatcggacctccatcgaacccgattgctttttgtgtattttttatttttgtttcgatgtgatgtaaatggggaaggtaatttggaaataacattaaaattggcctagattacaaatattagtaattataagtttaaggaaaaaattttaaagttatgtaagcataattatgtaagcatataattataagtcaaatttcctttgtatgtatacgaattattctaactacatcaataagatgacatcaaagagaactcatggtgacagtaactactcactactaaaaaaggctatttttgtaaattttaagtgagtaagaaatttgtgtcagttttaattgacgtaataacaattaatgataacttgtatctaaatattatatttctaattaaaccattaaataaatattaaattttacactaaattttataattattattaaataatacatttggtaatcttcaaaaacactaggagaaattaaaggattctctggcaagataaaaattattgatagaaatacctgttggaaatattttaccannnnnnnnnnnnnntaccatgtatgtttcattaacatcct

SEQ ID NO: 134107 - DNA, 1348 bp, Cannabis sativa
accagccacggtcacaatcttctccagttggtgagcgcaaatcaaagtggagcagagctcatccgcctcctatccattatcacgggaagtgtagttctcctgggcaacagggcccttcatgacttcctccagggtggccaaagtggccgcccccttttggaagatttcgttccggaagcaggagcagacattttttttttgaaaaaataagaaaatccagcagttaggccccaagccaaaccctaatgtgaaaaaaaggaatgggggtcccctaatcgctggaaagaggcctcctccggatgtttgccaaaaatggaaacccgaaggacattccttagcaaacatcgggtgcaaaaatcccaaaggtagcgaaagcagaggaaaagaaaataaaaagaaaacgcagaaggtagaagcaaaaatcgccctatgccctaaaagcaatatctcgataaaagggagtcaactctaaatagcaataaaggaaaatagcaaagacacgaataagggagattctacgcattacacaacaaattcaatcaaagttatttctcggaatttcagcgctcaaccaagaaattctaatcctaccatgcaaacaaacagtaaacaagcacaaagtgtccaaaaaacttacatgaaggttgagagctggaggtcggcgttgatcgtcggtataacgaggactgacaatggcgaaggaagagtagcaagaaatctatggtgtctgaaattttttctctctgtaagggctttgagaaaatatggcaaactagcgaaagtaaccaaatgaaaggagaaggctggcttttatcgggcagaatgggtgtgaagcaactgtgaccaagcatcatcgtacggtgagaattgcaaccgattcgcattctgcagatctaacggttggggtaagcgcttatcggggaggctggaaacgcttgagtatttgactgacacccattaaatgcgccagatcattaatggatgggaagcgaatcgttgcctgcaaaaagcaataaactataatgatgattgtcataaatgcatcccacgcgcccgaagcacgtgcaaggtagtcaataagacagtcagaggcacctaagcaagcctcgtttacttcccaccaaacgagacttgggggtaaatgttgcccaaaatatgcggaccaatgcgactgcgacacgtggatctgaaaaatatgattctgggataaattaactaagtttttttggatcaagagtatcaacaagaaaatacctcccggagaagatatgagggctccacgtactcccagaggatagagctatggcaaagcacctccaggagataccagaccccatttgaacagtca

SEQ ID NO: 134108 - DNA, 1060 bp, Cannabis sativa
ttgtcggtttggtttagtcgggttgttcgggttgggcggtttacgaaaatttctgtacagccctatctgataccatgtgagatcttttagccattgaaaaaagaatgaagaagaacaaaacagagagaaaaagaagaagaaaaaggaaagagaacaaagatcaacaaaggtgatgaagatcaaagatgaatctcattcattacaactacacaacaatagtttatatatgttatgaagtgagaagatagagttagttacaacagttagttagtaacaaccaatagcagagaattaactaactctaacagaattaaccaccgtcatttattttgtaaaattacaatgacgaggaatgacttgagaggaggaagaagaaaggttgcgattttgattatgtatgatgaggcatatatgagattgtcatatggtttgatggtgatttagggttgtgatttagattgcgactagagcatgattgaaagattacaatatgtgtttatggtaatttaggattgtaatttgggttaaagtatcaattacaaaatcaatttcagagattaataaaaatttcacatagtggtcttgcaatttagattgcaactagggcatgactgagattacgatatgatttgatggtagtttaaggttgtgatttggattgcgatattagctgtcacttcaatttcgttttagaaatcaatagaaactttacgtggtggccattgaacaatcacaaagagaagagagaatgactcataggaagaagataaaagggggtgaggttacaatataatttgttaataatttagagttgcgatatgtgttacaagttcaatttcaattttggaaggaaccaagtcagaggaagaagaagaaaaaaaaaacaaagatgtaagaaaaaaattaccgtaaaaatgaattagaaaatataaatttaaagtaaaatataaaagataaaaggctaagggttgagatgcaaaatgatcaaaaatttgaaaactaagttagtaaatgtccactttttaaaaaaattaagaaaatggccaaatctaataaatta

SEQ ID NO: 134109 - DNA, 1417 bp, Cannabis sativa
  modified_base (1170)..(1177): a, c, t, g, unknown or other
tttattccaaaacactgcttaatatttgtaaaggataacctagggtttcctactaaatcatgtagtataaatacactaaaataaaacttatattttagctctaaaatatacaccaaattgtatagctcgttgcaatcttcaaaatggtatatagaacatccaaaacggacgccggagtaaaaagttatgataaaaatatgattctcaattttcttgaaatttccagaaatggtaaactggttgggaaatggttaaccgtttcccgacgaaccaattaactcgttgcaccaaatggttgactagttcttagtagtaggggtcgtaaatcttaatttttacactcatcgaaacctatcaaatcattccaaacttcatagggcacatatataccataaatacaacaatccttacataacaaaaattaaaatcaagcccttaaacgggaaacgccattaacgttcagacttaagctttaaaaagttttaaactcaatttctaactcaaaatcacctcaaatccaacaagtaaatatcgaaactagtcccatagctacccaagaaaaattctatgatgttaaaatctttataactactctaaatcacaaagtcactacataaaaccaattgtattcaacttaaaataaaaccaattcttactttgagctttctctcttcaatgatttattatcccactactaccggagcttgaattactaggtttcgggttaaaaatcaaagaaaatagattaaagaagaggaggatttcatcgcaccgaaggagttggtttcgttcattcttctatttacgttttaaacataatatatgtataaaaaaattaacacataaattttatatataataataataaaaaatcataataatattaatattataaataaaaaatttattaataataattattttatcatttcttaatcactaagaaatctttaacccttgggtatttggtcaacctcgagtaccccaaaatactctgacatttctaatatcaacttatctcaataatctcttcaatattactaactaaaaccgttgtgatatttttagcctctaatcgagtctcttgggtcgccgaacctaaaaatatttttatttcacaaataatttacattatatccacatattctaaataaatctctgtaattaatnnnnnnnncttatttatccacttatagccaaatttataatttatgctaaattaggttagcaagatcgtaatcctaatcattactacctaattaattcataatatatgataaatcataattattcataattaagttttcaggatattacatccctgctgtagcctgtcatgtgcctaaaggagctctctgctccccatcacacaccacacacgctcgagggagctccttatgctctctctctctctctc

SEQ ID NO: 134110 - DNA, 659 bp, Cannabis sativa
ccaccaaaatatgaggttggatggttttttgcaagtaaattgatagttgagggggttttgccgcaaattactctttaaaattttttaaatattttatacaatataatatatgaatcaagttattaaatcaaaaatagaatgtgagacttaataccacttatatatacttgtaattttttaaaaagaatatgtaatacttggcatttaggtgaggtttttagtctaatttttttctatgatcgtgtaccttgtaatgatttaagaccagattaaataatttataatgctaaaaataaagttcaaatattactacacgtataagaaaaatagtcataaataaaataaaatatttgaatcttatttttgtactataaactatttcaaattgtttaaaaatttatgcgtgatcctaaataactataatatataggatcatgaaaaaatagaataaaaaactcttataaatactgaaatagataaaaaatttaccaaaatacccttttaaagagtgtatcatagagttacccttaaattttttagtacaagtaaaactacaatataagtatacagtgacgaagctagaaatttagttgagtgagggcttgaataaatattaagtcaaaactaataaaaataatgataaatgtatctttcaaatt

SEQ ID NO: 134111 - DNA, 791 bp, Cannabis sativa
tttacaacctcatgaagttgaagccattggaataaaagaggctttgagttggattaaagataacgaatggtctagtgtgatagtggagttggattgtcttagagttgtattggatctacaaggcaataaaaatatggcctctccttatggtcatataattctagattgtaaggctttgttagcctcttttgatgatgtctcttttaactttgttaagcggtctgctaataaggttgcgcactctctagcgcgatcttctcttatggagctgaccgtacttttagtagtcttgaattacctactgtaattgcttcctttgttttggaagatttataataatgaaatctcatttttattcaaaaaaaatcaactaaaacataatcaaaaaataattagcaataacattattaacaattcacacataattattggagattaaaataggagtgaacaaagtattaaaaccagaaacgattaaagcaacaagattataaaagcaacaccaagatatttagttcaagtccaatagattaatatgatatatggctctactccaattctaaaacaccaccaaattttttttattgattgagcaagaacaatgtagaatacagtcgaggtcaattctctgttggatcctctcaaagtattttctctcacactcttacccaaagatctttttcaactacaaaatattcttcatattgtaatatcaagattaaaatagtatttaatttttttttttgggatattaatggtgcgaggataattatctcatttatttgtgttgt

SEQ ID NO: 134112 - DNA, 832 bp, Cannabis sativa
agagagagagagagagagttagggtttcatacttagagcttaagagctttaggtgagcatagagacttagaactttagaattaggctaattctctttacatagtagagcttacatgtatattaaccactaatattccttaaaaataggtagataaagctatatatacataataaaataataaactttaattgactaaattattcctcaaaagtagggaagttgctgatatttttctctatttttgtgggttgttggctcaattcgctgcttaacttgttgtccatggatgaaggttgcgcaccaaaggcctgccaagcaaaaactggtcggccatgcacctgtaaggtgcaggctggccagccatacaatgcatgcatattggggtctgactagccatgctcctactagggtctggtcggtcatgttcctgccagggtctggcaagtcatgttctgaccagctttggcaagtgttggctagccgttgtataacttttccttgtagaggtcaagcttacttagttgaacgaacccctcctttgtctgaaagttacctttagtcggccaacttgtgcccaaaccctggccggccatataagctcttcttggttggcctatatactccctttaaccgaccatacattattttccagcttctttacggcttgcttaactcctcttgcttgttgcttgatgattctgcgatgccttgtaaagagactttgttctactattggcaaggttgtattctacatgtaatgaccgcattttagaatatggattagtaaaggcaattagcgttaattaatgatatttctgtaaatatttatga

SEQ ID NO: 134113 - DNA, 626 bp, Cannabis sativa
aaacaacaaaataaaacaattaaaccaacagtagaacaactaaaaaataaccatagaacaaccgtaaaaacttaacatagtacacagtatgaaactaacacactatatttgaaaaaaaaaattcgccccacagtaaaaaagtaaaaaaattagaaatttctatatgtggtgtaaaaactcctaaaaaatgataataaaaaaatatattttaagtatgtacaagaaatttaaatttgaaatgtaatgtgaaaaagaaaataatttatgatatatagtcacatctaatataagataaaagattataaaaataagtgagctgaaatttaaattgtaatatttaaaaaaaaaataaaagttcttattttgtagccacttttaatataagagagatatatttaaggggaatttttaattatatacttaattataaagtaattaacaaatataccatcaataatttaaatgatgtaataaacggtaactgtaccgcatatataaacaaatatatgcttggatcattcaagtgacacatttatttattttttttcatcattttctcttttatgtatggtgattattttttttttttttgtttttttttttattattttcttttgcatctatat

SEQ ID NO: 134114 - DNA, 671 bp, Cannabis sativa
tatatatatataaatatatctcttatgacagatctagaaactttaagctactataccattaccaatatatatgtacagaatatgtatatatacaagaaaaaattcacatgcatgcatgcatgagttattaacgtaaatctacgtacgtacgtgtattttaaaacacaaatccacgtgtaaggtatatcgtatgcgtataagtaatataatacgtattatatatttatatatattagattgatgttacgtgtaatgcgcgtataataagttttttttaattaaataatattaaatgtaatatttaattttttttaattaaataatgtactttctttaattattaaaataaaatttgagattttaatttttaagatttttattaactattacggtaacattagtgtatatatgcttgcaaggcacatttttttttacttgagatttttttacatatattttgattgataatttaaaatatttacaattgaaattttcttatatagaatatctacaatattttaagtattcaaattaaaaatatatcttatataaaatattctatatatttttttgatgaataatatctgtatattttttatctacataatttttatttttaaatatataataatattataaaattaataaataatattctgttaagtaataga

SEQ ID NO: 134115 - DNA, 663 bp, Cannabis sativa
aaatgtaaaaataaaaaaaattcctatataatattatttatttttaaaattttaaattataataaagaattaagcatagatacatgcatctgtatgtaacttagtatataaaataagttggcattaattgtttgattagaaaaattacctaaactctctgccttctatatgaagttggtatattaggaaaaaaaaaaagataagataagtatatttggaatatatatattattctacttttaaagaggaaaaacctcataattatgtgaaaaagagaaagagagggttgagaatgagaaactggcgggccggataatgggtatcctaattaagaggaaattatacttactttgggattttaaaaattcttatgataaatatgacacatttaagtttggctaatttatatggtatatttttgtttttaagtttttttatggtatttaatatgccatatatatgtaattaggttttcaaatctcatatttaatatttttatttgtttaggaagttttatttgttattgatgccggaaaagtcaccggagtttgctgtcggcactggaaaagtcaccggaaagtgttcggtgccgaaaaagtcgccggagttgctacccggaaaattcgtcggaattggcattgtcgctgaaaaaatcaccaagaa

SEQ ID NO: 134116 - DNA, 1274 bp, Cannabis sativa
ggccggtgtcatgtacggtgcccgccacgactcgactgcaaagccattgcccctacccccgagcacgatgtcatcacatgtggacatgtgtggatcgtggagggtaagggcttggtaagcatagtcaatatccaagacccggtaggatccggaacttatgtggtacataagtacgtcattcatgcaaaataagagatctcggtaacccgggtgcccgcatccatttttgagtgaaaacgggtaatctattgttatgttaccacaatatgatctacatgaatttgattggttgttatcacctgaaattagtggaacacatagtaatattggtgagagtatgatcaaaataagaaaattgatcatggatttgtgtgtgagagagagatgggaaatttggtgtttggttgggaaggaaaatttggttgtgtaatgagaaaggggagatagaaaaagtgttgtgttgggaggtagtagtgctgatattgataccttgcttatggtagtttgagtgagaaaaatatagattttttttttttttttttaaattaaaggtgatgatttgggagtgactttattcacatgtaatgttgaagaatatgagattgaattgaattgaataaggggtttctttctctttttttgtaggtgggggaattattttgttgttaaagatgactgagagtggcttttttttgaaatacttgttactttaatctttttgaaaaaaaaaaaaaaagcagagttgataagaaaattgcatgcaatgatatttttcagatactaatgatcattaagtggggttttttttcaataaaataaaataaataagtaacacaaaacataagtagctatagctagatcctaaatgatgctgacacatcagtaaccgataaagcttcttgcataaagaaattggaaggctttttttttttaaaaaaaaaaaaagaaattggatgaaattggtgtatattatttggagcaaataaccatttaataaatataattatttgactcacatgataaattaacatgtacaactttccgatacttatttaaaaaaaaaatgtacaactttcccattttagggagctcgatatatgatacccaaaactataaatttagatattttcaaacaaataatattaataagtatttttataaaaatattgaattttaattaaaagtttactatcacataattttttttataaaaatactgtatttttataaaacaaccataaaacaataaaatagaacaattaaaacaacagtag

SEQ ID NO: 134117 - DNA, 607 bp, Cannabis sativa
tataaaatttaaataattatttgccaaattattttttaattttatttctaatttctaatttctaatttttttaactaattattttgaaaataactatttttgtattataaagttttaatttaatttttgttttactacattattttaactaaaatttcgacagtacaacgactataatacgacaatcccaaaaattttaaaacttgcaaataacgagaaaataatacaaaacaaacacatgcattatcattcaaattaccatccattcgactacagtacatatttagtcacataacctatttcactatggatgaatatttaagatattcaaactcctctataacaaacataagcatatcaattaatgacatttatactaccatataaataaaaaaaattaataaatactaacctccaaacgcaaaatagaaaaaaaaaattagcggacagtaaaaagagtggcagtgagcaacggtgccaaaatcacaactagaggtgatctcaccaggcactaattaaaaattacaaatacatatatgtattaattacacataaataatattgcatctacatatatacacactattatatatatactagtaaaaag

SEQ ID NO: 134118 - DNA, 721 bp, Cannabis sativa
  modified_base (687)..(687): a, c, t, g, unknown or other
ggcctcctatagtatacaccaggcgtccacctcctccacctcccgtttcatgtcccgcacctgcatcttcatcatcagatccagaacacagattatcttcccattgcactacgtaaaggtaaatgccaatgtactttcctatttcatcttctgtttcttataatcatatatcctcttcttcttgatcttttcttgcttctcttgattttatcactattcctaaaactgttcatgaagcaatgtctcatcctggttggcttgctataatgatagaagaaatgaatgctttagttgcaaatggtacttgggtcttggttaatttaccttcaggaaaattggtcatagggtgcaaatgggtgtttactagttaaattcaattaagattgaacaattgctcgcttaaaggcccgtctttgtaatgctctaataataggaacgcctcgcacaacgaccaatcatacactaatcctactaaaccggaaactactagagccaagagtggaaatttaaacttttaaaaaatacagattaaaaataataacttgtaattaataaactttacaaaacatcaaaaagttcacactttttttcgagattatgtaaaaaacttttgtaaaatattacaagttattagtactgttgagttttgtgctctaaataaaattcatttcaatataattagatttnctaattaataaagatcataaatcgattttatgtt

SEQ ID NO: 134119 - DNA, 666 bp, Cannabis sativa
tagctattatgggatatggattgagtaaatagaactttggttcaattgggagtttgcactgactcgaagagtgcatttcagagatttgtcctatctcgaagaagactattatctaacagaaagaacttataatatgaaaagaacccatttttcatatccaacaaagtaaaaatcacccaataaaatttcgagtaaaaaaaagcaatcatcatataagtaaacgaaaatgaaagaaaaatacctgttaatagcatagcaacgaatttgcactccagatcaatatgactaagcaagatagtaaagtcaccatgagactctggagacgagaaagactctctttattgattgttattttctttgaaaagaatcgaataatatggttaagtataggtcggtggaaacagacctaactaattaataactaattacaagtaatataaaactaattacacagtctaatagctccccttaagatggcgtgtgtataaattgacgacacccatcttggatacaatatcagaaaaaacaaaaggaaacaaggccttggtaaatatatcagttaaattgttctgagaagagacatgtagaagcttgaggattccttgatggactttttcacggacgaaatggcaatctatctccacatgcttggtgcgctcatgaaag

SEQ ID NO: 134120 - DNA, 777 bp, Cannabis sativa
tttttttttttaacttctaacgattaattcaactgcatttcaattcgtattttcatgggtctttcttatatgcttgaattagaaatggagtttcttcctctctttcaataatttggtttcattacttttaaacttaaaactattgcaaatgttaccctttatcagatttgttctttttttattatttgttaattcaaaatcatgtctttccttttgtttatggtctatgtattcttaaaatctggcttcataatttacaaaatttcacgtgttcttgattaggtttttatattaactatttggaattttgcattatacaataaatcttaactagaggctcaaaaattttggttggccacactaaataactgtaatgttatccactttgctaatgcattaaagtctctgatttacaagtcaaatcagattcaaattatgagagagaaaattaatattttccttttgttcttaaaaacaatccaatcctaattcacttgaaaagccttttcttgatcctttgatatcatcaatacagtttgaatctctttaagtatttctaatgtactgactattatttgcttacaattttagatatagatatatatataaactgaaattgtttgagtgcgtcccgattgtttgagtgttgatcaaataccttaatttatttttacaaattttcattcatgaattttctgactaaatgatgaaatattcaactcataagtttggtctttaggccgatttatcgttttgttgttgattttgttattgggt

SEQ ID NO: 134121 - DNA, 3114 bp, Cannabis sativa
  modified_base (2039)..(2046): a, c, t, g, unknown or other
atagaacactttggaatcaagaaaaaaatatctcctctactttgctactttattttcagactttcattttcttagaaaagtaattgttatcccaatttttgcactctgatatggcatcacatgctggtgacacgtggaaatgattcctcatatctacccaaaggagatgttccgagccgagcaccgtgtatacctgtacggacgaggtcctctcagctgagcagtagataatccaaatagcataccaacacttagcaatttcagcatttgcatcgtgaagcacaagagcaattcctataaatctgggatcgtatcacagagatatggcaagctgtccaaatcccataatttgtgtattctatatatgtaatatgtactactaccaattatagacattgtaagaaaaagggaaaccttccgtcaagcatatagccctataaatagtgatccattctcactgaaaaggaggtcgaaagaattacttaagagagatctaagagagcattctcaaagatttcattgtaagagctttaaaagaggaatcactatattccttgttcttaagtcaacacaaatcaaggggagtaggctattaccgaactgctcagggccgaacctctttaaaaactgtgtgttctttatttatcttttcatattatctaaattatttcacttatcgcttacaatcaagactcactgtcattggctaaaagcgaggtcaacattttagtgctttcattgagatgaaggatcataaattttctcttaacttcaaattttatcataaacacaatggtggtacaaactcgtagaggcgtggttgatcaagcagatccactggaagtggatcccacactgcagagtccagggaatgcaatggtcccatcagccacgaatcctgaacaaccaatcacgcaaccaccaaccgtgagtcatggtgtgacgtctcctttgaatggaattgcacccggtgtgcaagagaccggaaatatcagttcagcagccaatcggggtattcccagtactggggttccgccagcaacaaatgtccgaacgaccgttgcagacgatactgagatccagaacctccgtgatgctcttggactcatgcaaggccatactaatactttgcatcatgatcaggaagagctctgtgctgcagtgaaccttgcgtttgaagagaaaaggcacctgttcaccgaatggagggataaagaggtagaaacgttgagggctcagcaagcagccatcgacaaccaaacaagacaggctaccatactgatacgaagagcctaccaagttactaaccagcaacccgcgttcagcatctcgctgggtggcttagacgaagatctagttggaaacacttcccaaactctgaacggtcagccgtccaatccccggtcacaggctccacctgtgggccaagcggtaggtggccagaccttattaagaaattcttcaggaggggttatacctaataaatccacccaaactagcagttctggccaagtgctcgaccaaaacaactagtcactgggacaacttggtgcatctgtatttaatagactgggaacaactcatgatctcagagatgatttgaacagaaggagagggttagacgaatagtatgttttgccagccactcagcccgggacccgtgctcaaaatccagctcaaagagatcctgacatgaccttggtcagctaagaggccgaacaagttcatccatccgtgcaagcatagttggatgaactgaaaaacatgttccaaggtctggctggtcagaagaacaatgatctcgagtttgatcgagcacgtggatccccttttactccagagatcaatgttctagagttgcctcacaaattcaagatgcatcgaccaaaccaagaacatacaagtttccaaacaaaaatgggtctgtactattataaagtcatgccatttggtctcaagaatgctggagctacataccaaagataggtaaataaaatgttcaaagaccaaatcagacgaaatatggaagtgtacgtggnnnnnnnnctcgtcaaatccaggaaggctggagggcatatagatgacctagacgaatgcttcaaagtcctaaggaaatgcaacatgaaactcaatcccttaaactgctcttttggagtcagctcatgtaagtttctgggatttatcgtcaatgctcgaggaattaaatccaatccagagaaaattttatccctcctggatatgaaatcgccaacaaaaaccaaggaagttaaaagtctaactggtcagattgccacactcagtagatttatttcaaagtcaatagacaagtgtgttccgttctttaacatcctgcgaggaattaaggacaggtgcttgatcgagttgactgcccctagtccgattagtgctagaagacccaacaatatattgtaagttgagggaaggtcgacgaccaagaagtcttgcatatagtagcagttaaaggtgccttgcctacggttaatgcgagctcgattatgccaaggctggcgaagatatcttcggtaaatccgcaaagattcaccatacaaggccttaacttggccttttcgagccccattttcttcagagtctccttataaatgatatttaccgagcttccattatctattaacactctcttaatcctcttattggcgagttgaatggttatgaccagtggatcgacctgaaggtatctcacgttcttctcgtcttcctttgtgaatgtaatggggggttcctcggttttcacctttttggaaggttctggggcaaagaccgactgcttgttctttatttccttcacttcacatatctcttctgagcgttattgctttcccctgcaatatgcgaccctcctgaaataactaggatgtcctctccttccataagaagaggttgtaacccatggttgtttgggttatcaggctgacgaggctggttgtatccctagccctatcttctcacatactgcctaaaatggcctcgagcgatgagactctctatctcatctttcaactgctgacattcgtcggtcgtattcccaatatctttatgaaatttacaatatttgttaggatctcttttgctcct

SEQ ID NO: 134122 - DNA, 703 bp, Cannabis sativa
atatatgatttttcacttcaatttattagatgataatcatgctaaaaaaaaaaatttgaccgatgcaggatgagcactttggcattgttcctctagaggcaatggcagcacagaaacccgtcattgcttgcaacagtggcggccctgttgagacagttaaacatggcgcgacaggttatctttgcgagccaacaccgcacgagttttcattggctatggcgaaacttattcaggacacgcagttggctgagaaaatgggcttagaagcacgccaacatgttaccgaatccttctctaggacgatattcggtcggcgtttgaatcgatatcttgttgatgttgctagatgtaagagagactaatgattttgtcacacaatggttaaactaaaacttagtgttaaacctcattacatagttttgttttcttaccagaattatgagaaatataaatgatgattttcttggtgtttacttctaacttggtatataattctacttgttagaaatttgaagagttaagacaaaaaaaaaatatatatatatatatatatatatatgaaatttataattgtaaatagtgttgttcagtcaatttaatttgtattattttgtttaaagtgtatctgattcgggaacttttattaccttttaaaaactcataatcagatctcggtaactaaatatttacaacttgacaattt

SEQ ID NO: 134123 - DNA, 3831 bp, Cannabis sativa
  modified_base (63)..(66): a, c, t, g, unknown or other
  modified_base (2137)..(2137): a, c, t, g, unknown or other
taattttccatcgttttagaagtttatatttaggttgttcaatcaacatacttgtgagtagannnnagttcctggtaaaataacttccaacatcaactgggggagctagggaaacaatcaggatatgactcagatgaggaactcgagccataccatccagatatcatgaatactccttttccctagggatttaagaaccctcacatcttgtcatatgatgggaccaccgatttggtatcgtatttgaataacttcaacactataacgggagctagcaatgttacaaacaatttatgttgtattttgtttccgacctcattagttggagcagcgagcagctagttcaataaatttactcattattccattagttcttgggaacagctatcgaaggacttcaaaaagtagttccaggccacaagggataggcgacacgaagcgttctcactcgcctagagagattcttaaggcgtacttaagtcgttttagcacggctgctgcaagagtaagaaatttggatgatagtacacaacttactgcccttaaggcgaggatcactactgatctctccaccgctgggggaaaattgttagacgacctacaaggtcgtccagtgaagaacttcaccgagttgaacgagagggctcaggtgtttttttaaaaggaagaagctcaaatagagatgaactttttaaaaacttgctcgggaggcaaacccagcactatttcaacaaatgttgtctcgactaaagttgataactcaggttccttaggctcaaagaggaaagaagactttaaggggtcgtctaaagacatgaagaaataaaaaaagcacgacaagtacgtgccaatttatactacttataccaagcttaatgaaactcaggaaaatatttacctcgtgcatgagcaaaaggttgccttcagtaaacttgagcccatgaggcacgcgaggcataaaagaaatctgattaggtactacaagtacaataaagacattgagcacacaacagacgagtttcgtcagttgaaagatgagatagaaagtctcatcccgcgaggccacttcaagcaatatgtgaagagaaagggcaatggacataaccagcccaatctgcccaacaacccaagcaactagggattacaacctcctcctattgaaggagaggatatcttggttatctcggggggctacatattacaggagagggcaacaatgcccaaaagaggtatgtgaaggaaataaagaatgagcagtcagtatttgctccagaacatgaggttccctcacgttaatccattggtgattactatccaactcgccaataaaaggataaagagggtactaatagataatgggagttcagtgaacatcctttatagggaaacactaaagaagatggggctcgaaaaggccaaactgaggccttgcatggtaaatctatgcggattcactggcgacagtatcgctagtcaaggtataatcgagctcacaatgaccttgggtgaggtccctctacctgccataatcatgcaagacttcctagttgttgacctgccatcggcttacaatatattactgggtcgtccagcattaatcggactaagggcagttagttcgatcaagcatttatccctaaagtgtcaaacaccaaagggtgtgggagtggtgcaaggcaatcagatgctagctcacgattgctatctcatagagctacaacacagaaaattcagtcaccagataatggcagtattaaaagaggaaagtgaaaagaaggatgaagatcttgatccccggattcaagatgaaagaaagttattgcaaccaattgaagaattggaagaagttgttctcgacccaggatatcccacaaagtatgtttacattaggaagaacctagacgagcagtgaaatagcagcaaataagtttcttaagggcaaaccaggatcagttcgcctggagccatagagatatgatagggattgaccctaatattatctgccatcatttaaatgtcgatccaaactacccaacaaaggggtagaaaaggaaaccctttgattctgagagacaaggggtactcaaacaggaagtggataagttgttggtcaatgactttatacgcgaggtgtttnatccctcgtggatagccaatcctattcgaaatggagaacttgtattgacttctctaatctaaataaggtgtgcccaaaagattgttttccactacccgggattgaccagttggtagaggcaactgctgggcacgagcttttgtcatttgtggatgcatattctggatataaccaaataaaaatacatgtcccagattaggaacatacgagctttgtaaccaacatgggactttactgttacaaactcatgccgtttgggctgaagaatgctggggaaacatatcaatgattggtcaatgagatgtttgcgaatcatatcggacgaaacatggaggtttacgtcgatgatatgttaataaaataagtgaaaagcaggagtcataccatggaccttgcagaatgctttgaaatattaaagaagtataatatgaagcttaacccaaaaaaatgttcctatggagtttcctcaggaaaatttctaggatttatagtcaacgcgaggggcattgaagcaaatcctgagaaaatcaaggctttgatatatatgccatcaccaacaaagcctaaggaattccaagccctaacaggaaggatggctgcaattaatagattcattttgaagtcgactagtcagtgtttgctatttttcaatgtattgcgaggcaacaagaaattcgagtggatagaagaatgcgaggaggccttttagaacattaaaaggcatttggtgatgcctccagttttagcgaaatcagtaactggagaaacgttactcctctatatggcaatctcggaagacgcaattagtgtagctatagtgcgagaagagggaaagcaccagcaacctatttactatgtcagtaaaaggttactggggacagagtcaagatatccgcctcttgaaaacttgctttatgccttatccacgcatctctcaagttacggccttacttccaagcacacccaataaaatttttaattgatcaacccttgagacaagttttatcaaaaccagatgcttctggaagattgataaaatggtcaattaagctagggcagtttcacataacttatcactctcgaacatccatcaagggcaaagctttggcaaacttcttaatagaaggaataactccagaggaaaatctacttgctcaccgagacgcggacatttggaagttattcgtagatggtgcatttaatgagcagggctcaggtgcaggggtaatattaatttcgccagaaggctttaagtttcattatgctttgagattttaatttgatgcatcaacaacgaggccaaatatgaagccttgatcgctggcttgaagatagccgaggcattgaaggtcaagaatctcatatgtcatagtgattcctaactgattgtaaatcagattctgggggaataccaggctaagggcctaaaaatggataagtacttagagaaggttggaaagaacttggaaaatttcaattactttaaaattgagcaaatcccaagagaacaaaactctaatgctaatgccttagcaaaactggcctcgcggagtgatttagatgaattaaaatttgttccggtagaggtgctaaacgagccaagtatatgtgaaaaagaagatgtcgatatgatagatagctcacctacttggatgactcctataatcaactatgtgttgggttttattccctaa

SEQ ID NO: 134124 - DNA, 640 bp, Cannabis sativa
  modified_base (37)..(62): a, c, t, g, unknown or other
ttttagaaagtttatatttaggatgttaataaacatnnnnnnnnnnnnnnnnnnnnnnnnnntaaaataatttccaacacaatatctcatacacttaactgtcgatttagcctaagaagaagttagatttgggagactaattgagacttgagagaggaagaactagtgttgtttagtttgtggctgctagggttggaagagaagagataacattcttatatatacttacagttaatattttacttgggccgtatgaatcaacaaaagggccttatatgattaatctaaagctcaaatacaattattttctcttattctaaaattgaaacgtgtgtgagataccatttttaatattaaatattataatactattagtattaaaaagtatatatttgattaattattttaaatatattttttaaaatataaaaaaacgtgtcaaatgtttcaaattcgtgttaagcgagtcgtgtcgtgtttgacccgttttttttttcgtgccagtttgacccgtttttttttcgtgccagtcgtgtcgactcgttttcaacccacacctatttttctcaagcctaacccgtaaaaactcgtgtcgtgttcgtgtcgtgtagccgtgtcaaaacccgttttgccaccccta

SEQ ID NO: 134125 - DNA, 505 bp, Cannabis sativa
atattgggtgaaaccattaatcatattcatagctatcgtttaattatttaatagtttttttattgaaaaatattataattttaaagggtgcgtttggtaatatttttttgattagtttttttatttttaaaattaaaaaagtaaaaatattttctaaaatcatgttttataagactgtttttacttttaaattttttaattaagaatttaaatttaaaaacaaaagtattatcaaattccacctatataatacattaatttgcttgtgcgcataagaggttatatctttcaacacgggtaaataagtattatattgttattagttttaattagaatatattaacggtaaaattactaaaatattattattagtaacacttaatactacacaaattttttctttaaaacacaacaatatttgtgactaaaagtaaaaaagttctgactaattataaatcataattcatatgttgccattaagaagttcgcggctaaaggtattagt

SEQ ID NO: 134126 - DNA, 643 bp, Cannabis sativa
aggattggagaaagcagggctatgatcagtatcagaaagaaaaatttgggaaggtggccatcggcggatcatagcatcttgttgctcttgctttatgactcggtcctgcaatgtcttaatgtacactcgtctcacgctatccgagcacggcccttccacgaatgtagcatcttggaaagccctcaacggtgctggccttagcaccattttcgccaatgtcgagtcctaatagtaatattaaccaatataatcattttcccaagatttaaagtgtggggataacctctattttcatatgtaatatataagggtggcaaaacaggtttcgacacggaatacgaacacgatacgaatttttcggattagggtcgagaaaattagacgcgggtcgaaaacgagttgacgcgacttgacacgaaataaaaacgggtcaaacacaatacgagccgcttaacatgaatgtgatacgtttaacacgatttttttaaaataaaaaatttataataataatataattatacaaaaatatatatttagtgattcaatgttaagttgaaaaattttaaatttaatttaattaaaaatatttaaatttctttaatttttattatatatataacaaactatatctattctatataaa

SEQ ID NO: 134127 - DNA, 665 bp, Cannabis sativa
tggattggatcggatgatgatttttcaaatccaattactaattggattggatcggatgaggaaaaaaaggttagattggatcggatgtccacccctacttaacattacctaaagagatttcagaaatataacttagatattattatcgttaaaaattaaacttagatatttatttacaattgggagttaaatttatttatttatgctgcaaattactcaataaaatattatatttttgaatgatataaaaaattttagcacttttaaaaaatgtgagatgctcaaatttattatgtcttattagtgtgtggaagggtctattttattttatatctcttctatattttttttacactctcaattttaaaaatactccaattgtataacacattcaaaaatattataattataatctttttttttagaaaatattataattataatcttacactacttatatagatagcatcaatgtcatgtacctattaatggtatatcatctttgtgttttaccaaataagcaatctacatataagcaaacatcattcaaaatttaactatttgggatactcttattggattttaatatatatatatagataaatgagattatttcacaaatacaaaaaaaaaaaaaaaaaaattccttaaaaaaaaaaaaaaaa

SEQ ID NO: 134128 - DNA, 511 bp, Cannabis sativa
agctaaaacaaaattgaaaaatttgctaagtctttaactgaattatgtggtcaatttgaattacgcttggccatttgagttaattctcaattaaaataatttatagtatttaaaataaaattcaaaatactagttctacacctataataatattactaatttatgttgtacttgatcgttaattatcaagtcaaataattacctgatagtctagtctaaattattaaatttttattttttaattaaaaaataaatttaaatatactaataaaaaaacatataaataatacttatacttataaaattttaaaaatataatttaaatattattactatacaaaattaaattttaaatatttatatatataaaaatagctcatatgatatgaccataaaaatttgactaattagtaatttctttccctgaactttagtaaatcgtgccccctcaacttttttggccgttaaaaaattcccctcgaactattgaaattgttaaatttaaagactt

SEQ ID NO: 134129 - DNA, 884 bp, Cannabis sativa
aaattaaaacatataagataaagtaggtatacaatgttattttttcttatttaaggcaataagatttcgataccttacaacgtcatttcttaagaatatattatattgagggccaacccaaggcaattaagattacaaaaatactgttgtatgaaattctaaatatttgaatgattttatttacaaaaatacggtcttttaatatatttttatattgtactcttgttaattttttgttgttgttttgatgctatttggatgtttttctgcgttatttttatgtagttttcttgtttttttttttgatagaacactgtaaaaatgtaaaaaaaataaaattatttaaaatataaaaattttacaaaaaataatgttttatgtaattatcgcttctttatatataggttaaaatttaaaatatggtatttaggaatttttttttattaaaatataaattatagcatttataaagaattaatttttttttaaaaaaaataattaaaattttaagtaaatagtgaaaatataaaataatatgttaaaaaaaataaatttgagcatttgttgccttgggcgagggcgcaaggctcgttacattttacaatttttttttcttcaattttacagtttttttatgttattaattacaattttacaatgtgttataaaaacaatgtgaaaataaccaaaaaagaaaaaacaataatgaaaatagtaataatgataaacaacaacaaaataaacaacattaaaatattagtctgtatttttgtaaaagaaaaacttctaaaccgtaaaagatgtttaagattttgtacagctatattattgtaatattattgacttttttttgttaaatatgaaataatcccttaattttatta

SEQ ID NO: 134130 - DNA, 650 bp, Cannabis sativa
agagagagagagagatagagatgagagttcagctatggatctttctattttcaaaatacatatcgatcatatcacaataggtatcactcaggtcaaacatttaatgatctatatatggcgttatatctaacctaataaaataaagataaaataataatttatttaagcataaattcaaataataaccatcctaactgaattagacgtatctttgtttatttaaatatttaataataaatatcttatcctataaaatatttaatttattatgaattatttttatgataaaataatcaaaacaactcccatgacagttatatatcacctacatgcttatgacaatacagccataggtgtatgccatatactttaatgcccgaattaatttcttaattttgtcttaaataagatttattatttattttccaataatctgttgatgcagtttttcgtcaattaatctaaaaagatcgtaaaaagtaagaggattgttgataaccgacaaacttttcctagtgacgtggacatcatgttcgacacatggcatgaaggatgacgtcacagagttaagttgacctgagtacgtcatagcagtcgacctaggaggggaccctacccctacgcccaggttgactttgggatctctggga

SEQ ID NO: 134131 - DNA, 654 bp, Cannabis sativa
aaaatttgccattcacaaatactgacataaaggaaaaagaaacagaaaaattgttaattatatatattgagtcatttatagaaaaatgctatagaaagtttgtgtgtacgcacatgctttgtgaggctcatttactgcaacacaaaaatcttggagagggcttgggtcagcagcagacgctatgaagcttgccaaagcaaaggcagtgagtgtgagaagaaaatgaacagctttcatgattaaaatacgttgtatatgaacttatagtgttatagatcacttttaaatttttttctatgttttgttttgattgaggatgattttttttcactactaacacatctatttataaaagaatttgagcacctatcttacaactacaagagaataggcggagacttggttttctcttcatcatttaataaattatatagaagatgacttggtaaatttaatacaatgactgtgtagttgttaatataataatatacaaattaataaggacatagtccataattcaacaactctagcataggtaattattttcctgaagaatgaggcttttaaatttggaatggtccattctaatatattttattaagggaaatttacacagtttaatgtgttttcccattttctttcttttatactgtt

SEQ ID NO: 134132 - DNA, 1056 bp, Cannabis sativa
ttttttttttttttttttctacagcaacatcaactatacaatctatgtatcattgtcactcattataagccgtgaaaccaattggcatcctctacagtaactgttttcggccacactgcagcaactcgttggagcacttcacttctcattcctataatcatcttttctgcattcggtttcttcttttcccaaacactaagattgcgatttttccacagggtatacactaaacaggcaagagcagcagctagtaagtttttcctaaacttgctgatctttgatcttccaatccacctggttagagtggacaaagtatcagctgaaaccttccatgacaaccactgttttattccctgtaagcaggcagcagataacctacattggaaaaacaagtggtctgcactttcattctgtgtagaacagaattcacaatgctcatcaatattcattcccattctcctcaatgtatctttagtgcgaagccttccctgaattgctaaccataagataaatgagtgttttggggtatttaatctaccccacacttgctgagaccactgcaccttgtcctgatcaggacagagaaaagaataaccagtttttacctggtaattttgttgctgagtacaattctgatggccagctatgtctcggaagtgatccttcagattcacaagtctcctccagtaccaactactctgaggaggagccttgtaactccaccattcatgttccttgaggtatacactattgatccatttcagccataaactgtcatgtttctgagctattgcccaaatgtacttccccatggcagcttggttccattcatgaattttcctaaagccaagtcctcctgcatttatagattgacacattgtttcccaagcaatcaaacctggtccagatgtacaagcttggcctttccaaatgaaggctttacaaatagattccaatttcctaatcaatttcctcattagatttactagtattaaagatagagatgatattcgagctggtggttatatcttctttaataagaggcctgtcattatg

SEQ ID NO: 134133 - DNA, 670 bp, Cannabis sativa
tattatacaccaaaccaaagagagcataattaagagccaaccattttcacagtttcagggggcggtaataatatcctatgtactgtacaattcttgtacggtacgtttgctgacgtgtcatgtttaggtgggacacacttccacgtaatactctttatttaccaattctacccctaacctttaatattattaagtgcttttccactattccatataattataatagtctctttatttctctcacataagtcccaacaaacaaacaaacaacctagagacactatacataccattctcactcctcatcttcatgcaatctgacatcatttttcacccacaacaaaaaaaaaataatatcataataattaatttattatttttggggtaacatttgaatttaatggttaacactatactttaattatttgagtcaactttatataaatggaaacttctatagttcagttaattaatgattatattatcaaatccttaccaaaaaaaaaatacatgttaaccaaatatgagaaaataacagtttattagcaaataatttttatacaacattattataatgtatctagaatttttattttgtggaggcttatttattattataaaatatttatatttatatttatattataattttattgtgattaaaaaatta

SEQ ID NO: 134134 - DNA, 683 bp, Cannabis sativa
aacaaatccaatctgtagttagccgttataatataaaattaaaaactaatgaaatatcaaaactacattaaaaatctttagtgcagagctaaagttttgtagtttgctctttacaagagcattttagtccgatgtaattgttttaagattatttgtaatttttaaaaaattttgaataatttcctatattaaaaataaaatttaaatattttagggacttatttatttttacacttaaaaatattttttttgcatttttacggaattttacatggaaactcttattgcaaccagtgctgcaacttaaattccaacaaaaaatcgtacagaaatccctattgcaattagcgctgtaaccactttaaaaactcaaaccgtaaatttgaaaaaaaaaaagttaaaaaaaatagtatatgaggtaattctttaatattttattacatatataattattttttttttttttttgcatgtgtggtaattaataaaaatttaaattttatttttgaaattgaaaattcataattttatgataatttattaatctcctgaataattataaagtatatgatcataaaaaaaaataaataaataaaaaactaaaaaaaaaatacaatatctataaaaaatactccttttttttttttgagaattttcaatgttattaaaactgacaatcgttt

SEQ ID NO: 134135 - DNA, 724 bp, Cannabis sativa
  modified_base (147)..(153): a, c, t, g, unknown or other
agaaaagatgagagaattttgctatagtttttctacactaaaaattacacaccaacaatagaaatgagctcctatttatagagtctcaaaatgaactaaaatgcaaaatactaatagttttgggttacaaaagaaataataataatnnnnnnnataataataataataatgatattgtttaacacgttatcattattattatatattattaacttgttgattgttgatgatttgatatagcagtgaaatgttttgtggttatgtgggttggattgatttttcatgcaggtttgaagcatggctttggcgtggtggagttggacagcagcagaagcccacgtgggctgaagagaaaggagagaaggagaaaaaggatctgccataaccaatgggtcgctgccacgtcgtcgcctgttgaagaggaaaaggaaacgctgattgggctgctggagggagaaatgcttgggcctgagctgctctttttttttttgggcttctttccaattcttttctttctttctttctttttcagcaaaatgccacaataatttttagttcctataaaataacaacaaattaaattcaaattaaatattttcaataaacaaatatatttcattgattctataaaaatattaatttaaacttaatttattttaaactttaagacaaataattgtgcatttttcaccattaatcaatagttatgaagtctaaatctgca

SEQ ID NO: 134136 - DNA, 777 bp, Cannabis sativa
  modified_base (714)..(716): a, c, t, g, unknown or other
ttttggaaaagtgatcatatattttcaatgtagaaaagtattagtttagggaaaaaattatctcctaatgcatgcatagaaattcaaatttccctaataaaattacaaaaacaaatatttataactcaaaaaaccatagctcatccatcccaattgccttcccctctctctttgtttctctctctcttgatctaggtggaagtccagcaaacgaccaggcgcacgattgaatctcggcgacagtgatagaatatgatcacaaaatcatgattcccattcctagttcacactttctctgcggcacctctctctctttctctttgtttctcattctcggtgtaggcgaacggctatgcagacggttgaatctcggtcacgatggttggatatggccacgaaatcatgatcaccaccccacaaacccctccccccaaatatatctctctctatatacatatctctatctctatcaattactcttatttttctctcgttatctaagaagaagaaggaggaggaggaggagaagaagaagaagaagaagaagaattaggggttctgatggttctagagaagaagacaaagaaagaaaaaaagggaaagaaaaaaaaatgaaaaaagctttttaatttttttaattttattttcatttttttaccttatcttttaaataaggctaattagtaatttttccccccgaactttaacatgtannnaatcatgccccctaaacttttttggccgttaaaaattctacctgaactattgaaattgtta

SEQ ID NO: 134137 - DNA, 546 bp, Cannabis sativa
atatcactcaatataagtataataaatatatatacaaataaagattataaaagttaaacaataccgcgtgaagcgcggcttagttacctagtttgagataaatcagagcctctcattcacaacaccattcaaatattttaacgacactttcttcatattttacatgtatgtagtaaccgtcttttactacatgtaatagaaaagaaatagtaaatgattaataaaggaaataaaatatcaatgtttgttaaagaaaaaaatgaaaaaacccaaaataaattattacaaaaaaagttaaattattagcatacaaaaataaattaataaaatgaaacaaaattttatggagaaacaaatagggttcactcaaataattatcatatatattttatctaagaaaaaaaaagcaaacaacaatgattatagtgaagaaagataattgaaaaatcctcacacaaaataaaaatctaatatatatatatgggcatactcttaatgggtattacctatgaatagatattttattattagccattagatcaaatc

SEQ ID NO: 134138 - DNA, 725 bp, Cannabis sativa
aaaaataataataaataaaagaaaaaaaaatggcatttacaacctcacgaatgaaacctttcacccaatttattcatttgtactaactatgtatataaatgatcaatctaattataattgagtgatctcataaaatgacttactcgttgaattagagtgattaattttattttgtatggttaattttaattttataaaaccagtataattaattttgatttgataagattagtatagttaatttttgtttgttacacttgtataactaattttagttttataaagtcaataagattagttttaattttataagtacagtatgattagttttaattttgtaaattaattaaaatttgatattgatcaattttttttatcatttattttgcaggtattttattgttacgctccgatagtttgccttactttacaaaaataccattttaaatacataatttaaaaagataaaaaaaaaaatccttaaaatacaacaatgggttttaaaaattaaaaaatgcaatagagaaggatccttcatttgtaaaataaaatacgataagtaaatgattttaaataatacattttcattgtgtttagatttatcaactgcttaaaataaaataggcaccactggcgttctaaatcgttttcccgtctgtagccactcacaatatacgtaccagaactgaccctgctcactgtacatacttccctgtctaatacct

SEQ ID NO: 134139 - DNA, 671 bp, Cannabis sativa
ccaacactttgagtactctttctgaaatgaggcaacctctgtaactccgaaaattcagattcaacccttgctaaagccatcaggggattgacaggaacattattgatgtagaaaacatttcgttgatgccatatgacagataaaacacaccccaagtagttaagaaaatcatctctgctttcacctgaatgggagtttgtaaaagaaaacaccagattttctatcaaactttgaatggagtcaccttggatctcccctatcctaattgatttacttccaccaacccaaatggatcttgagaagctacacctactgaacagatgcataggatcttcgacttcactatcacacaaatcacacgctttatctgacagaaaatgtaatctgctctttgtagggatagcatcactcataaaccgccaaagcaaaactgaaatcttgggatgaatatcaactccccatatccacttccagacttctttaatcgggtcaaacctccaagattgatccactttgtaggctgccttaacagaaaactgcccatttggagaatctttttaaaaaatctgatcgtgaaagggagaagggatcctcggtatagagagaatacgatgtcccaacccatctccaaacacttgtaaaaccaattcttcattccattcattacctga

SEQ ID NO: 134140 - DNA, 1241 bp, Cannabis sativa
tcactgtttctctatgtaaggtctctttgtactctgttgtaggtcatgcttttgggaagactattgcaaggttttacatggacgattcttgaaggaatggagagcatagatttgagtactgaagaaagctcgatgtttaaggctaaaccgtacgttgtatgcccatgcaacacctcacttgaatcattctctttatttgttataataatcatcaatgttattgggttatatgttattttagcttcttcttgtataagtattaatgatctcttgttgttttttagttcttcttctttatttttatttcacttgcttttgctgtttttccttgtatgctgctatatatgtagctaatttaagtcatttgaatcattcatttaattaattttaattacaaaaatgatttttaaggaaaaatttcataattagaataagactaaattaataacgacattctttctcaatggtactattctcatccactagcataaaatttagttcttgagatgggagaaaatcaagggtgagcttataaaaacttaagagaaaaataactaatatcaaaggacgcttaatttaataaaaatttatgtatggttagcttttaaaacaaaacattccatcaccatcatcatcatcatgtataaacaaaatagagagaccacaattaattacaaaatcaagttttaaatgtattatctcaaattttgtccatctgacgtgacatgtccatgtaagctaagacagagtacatgtggaacacagccttgccaatagcaagacaaagtctccttacaaggtatgacaaaactatcaagcagcaatcgaaatgagtgaagcgagccatcaaggagttgtaccaacatgtctggttggccaagagaagcgtaaaggtcggccaaggtgagcttgtatggccggcccgcccaaaaggtgactttcagactaaatgagctttcgttcgatcaaggtaacctgccatttacaagaaaaaggtgtacaaagctggcctctactcgccgaagactggcctccacatctaaaggctgacctcctcttggtaaagatgacagggacatgacctgttggatcctggcaggcacatgacttgccaggtcctagcaggagcatggctggccggacctcaaccttcagaccttgcatggccggccataacttatcctgtaggtgtatggctggccagcttctccctggcaggacaatgatgcacaaccttcacc

SEQ ID NO: 134141 - DNA, 671 bp, Cannabis sativa
cccgatatattacaaaatttatgatattattgtaggttcgatacggatccgataggtggttcgatatgtgtccgatagtttgttcaactttcatgattttttgaatggctcgattggaccaatatatggtccaatgggccatcgatagtggatcgatagttagtctgattgtttatgcatttcttcatttttggtatgtccgatatgggtccgatggaggtccgatttatgtccgatgctttgctacaaaattgctaactttcaatttcttgtttttttacagagacctccacagctaataattccactctcagagcattacataggtcgtgtcacttggcgcggcagaagttattacaacttgaagattaaggccaaatttgagaaatttagattatgggatagggtgaaggaattctctttcaaatagttcttcgagagagaaccattataatttttggggtatttatccatcaattaatgttgcacaagatccaatctgacaaactagatgaggtacacttttacttggcaaagaagagatgcagattcggtagggtggagttttgtttggtgaccgggttaaacttgttgcccatacctactaaagaagaaattaaagagaaagaaagtttagaccggttgaatatggagtatttcaacggtaatcc

SEQ ID NO: 134142 - DNA, 877 bp, Cannabis sativa
acaacgacaaggggaacctctaaaagactatattcagagatttatggctgacgctaccaaaatcaaaggccttactaaagaaggcaggtatacggccacactgggggacatactcccactaagcaacttctggaaggatatcaggaggatatccactaacaacatgaaggagttcctcgatagagcagacgactttgccaaattagaagaagacggctttgtcaacttctaggcgggacatgtcaatagcaggcagtcacggagcaccgaacagcctcttgacccactaggcacgcaggtaggaaacaataatactgcccaaacctctagtggtaaaaatactagaaacaagcacaacaccaacaactttgggaggaacagtagcgaaaaggggaagtttaacacttctcccacgccatagaagaacaaggaggagaagtatacttacttcactctcctaacaaagaagcctaaggccatttttatggccacttaggggacagtcccataccaaatgccctttctaatcagaagggatatgggcaagagggacatggaaaagttctgtagataccacaacgacttcggctttgacactaatgagtgtcaaaatctgaagagggagattgagtacctgataaggcgtaacaatccccacctgcattgttatgtgcaaaacgaccaggacatccaatgccagcacccatagcaggacatctgggtgtcataataggcggcccccacattacttcagaaagctagggagtgctatgctcagacactcctacacgagcccaaaggtatgatcctattcctagctgtagaagattggagctctaatgtaacaccctaactagcctaggcgtgttaacgtgat

SEQ ID NO: 134143 - DNA, 820 bp, Cannabis sativa
tatatatataaatttctaacatttggtatcagaacgaattatatatctctaccttaatttattttgagattcgtttattcatatatatatacgtatttgttctttatttatgatataaattatatatatttttatatatatactttcatattatataatcccaaatataaatatacatttatacttaatttatttttatatatacatatatatagttatattcatcacgttgatatttatataatatatatatttatatgtatgtatatatacatataatttcgtctatatatatttatatataattttctttaatgatatgatttaattatttaacattaattagagtaatctaacttatatatttctcatattttcatacggtaaaattatattgtaggcgtgtatatatatgtaagaattatcattgtcggaaccgtggaaaaaaaattctagtttcaaaatttgatataaattttcataaatagcttcatcaggttcatgtagtgctatataataaattcaagcatgataacatattttcactgaatttttttttgaagtccacgttcggacccgaattttttattgaaattaaagtctacattttacgtgttttcgatgcttgaaattaatacgaatctcatttagattattttggaatcggtttcataaattttggacgtcagaaaatagtttgatggccgagtttgggtcgggtccgaagggtccacgtgtagaaaaacgggtcttcttgagccggctggaggtaggagacgactccaaactgttggatattattttacgaggatcttagatc

SEQ ID NO: 134144 - DNA, 719 bp, Cannabis sativa
  modified_base (34)..(35): a, c, t, g, unknown or other
tgtaaggtttctaaaactttatatgtgtttattnnattgttttagaaattcatattacgatgttaatgaaacatacttgttagtaaatctagatatccgtaaaagaattctaacaactggcgtcagagccatggtaatgatttactttcatgaaatatgaattaaacgatgtttgtgttgctttggatggtttcacgttagtttatgtgcttatttgattaatgtatgtgttttactaaattttcccatgaaaattattttattttatttctaaaaatattttatttggattccaggagaaaaattaagcaattttagtttttacggaactcgattccgataaaaattgaaaaagatatgaatttttaagaatcgggttgaatgggtgtcgagttgctgatcgtatgcgggcgcatggcttcagacaaggtgatccgcgcggatcagacagccttttgtctaaattccccgatcacccccctcgctcagacacgagcgtgtcacgaccaggctgcagctcgcgtacgatgatgctgcatctaccgagaattctcggcgcagcaccctgcatcctttcactcccgcgcgcggaatgggctgcttgcagcctatttcgtgggcagctgggagatttgccccaaaaatctgattttcatgggattttttcccaaagtacggatttttcaattttcaaaccctaatatctaattaaaatatta

SEQ ID NO: 134145 - DNA, 546 bp, Cannabis sativa
ttagacaaaaatccttaaatctaacaatcacaatagttcagggggaatttttaactgccaaaaaagtttgggggcatgatttggtatatgtcaaagttcggggaatcttttaaaaaatgagagaaatttgatatttagcggactttgtataaaatcgagaattttttgtttttatgggctttttattttggagaattattccatatattattattattttttttttttagaaatttacaatttgggttactccggtagtttttatgtgagttgctatgtgaattttaattgcgatttatattgctctgttggttgctatgtgggttgttatgtgaatttctgtaaaaatttaaaaaaactattttaaagtgtaaaaataaaaaaattcattttttttttttttgcaaagtttacaaaaatataacttaaaaattatttggtgaaacaaataaaaaaaaaagttaaaaatataggaaaaacaatttagggtaaacagagaggtagctagttaccttatattagtttttctatttttttttttttttt

SEQ ID NO: 134146 - DNA, 2308 bp, Cannabis sativa
tttcttagcaagtttctgccgctgcaaagcactttatgcccggtttgtgatagtgaagaggaatctcacgagcacattttctatagatgcatctttactaagcgggttcaactagaagttaactcttggcttggaaactacagttggccgagctcgaacattgatcttagctacagatgtgatttcaagaagcatgacctccgaaatcgcctcatgaacatggtaactgctaccgtctattatcagatttgggctaatagaaattgttgtttttttgacgtgacttgtgcttctcccaaaagtattagtttggaagttagaaacattgtgcaacttagagtttcgagtaaagggccctttaaaaggagccatgggaattcatatttacttaatgtaattaagaattggtagtcctttgtttgttttggtggctgctggtttagtggctgttgtgtgccgtttgttgacttgtgcctagtttggttgtatcttgcttgttttttgaataaagtttcctctttttcaaaaaaaaaaaatcatattaaaaccaaaaattaatgtcaaacaatctccatttgaaccctaatgaactgttagctacttatgttcatcgtagcaattttacacatattaatttagaataaaagaagaaaattgagaagaaaagaatgttgaaaaccctgttgagaaagtcttcaatatcgattttactctctaaaatttgtactccttgattgcttgttgaaaactattaaaattcacttcttttatagccaaaaaatgataaaaagaaaacgataaaagacgctgaaaacctattttgcttaggattagaaggggcgggccgcgtcatggaaattctatgcctaggcataaaccccctttatttggccagtgagctttctgatgcatcgacttatagtattttagtcataactctcttgatattgcttggaattggacgattcaagatgttccggaaagataaaagagatttagaacttttatgttttgactttctaataggttgtttttaatattatttttagattaattttagtacatttttaatttagttttactcgtgtatggagaaattttactctttttatcttttattttcactgatttaaaatagtagaagattaattagaaaatatcaaagaaaaaaagatgaaaaaaaaaagataaaagattgcataaaaggataagtgtacagatggaccgcgcctaggcatggaaataccatgtcgcggcctgtgtctatgaaggccttaaggatgcgtggaatagccaacacgggcccgggcgcattatgagcatgctgcggcccgccccctagtttgaagcaaaataggagtttttctcagtgtgggcttatggtggcgatctaattcaaagctgaatagaattttcagcatgtgcaatcttttccatctttttagtccctcattggctatataagaagtgaacttcagttgatttcggtaagcaattcagaaggaaatcagaggcagtcaagagagtacgaatttcagagatcgaattcaatattggaggcatttttcagagggttttcagctttctcttcttttctattttcttgtcttttctaaagttaatatgtgtgattttgctacaatgaacatgagtagctaaacagttaattaggatctagatagaaattgtttgatattgatttatgcttctaatatgattttattttctctcaatttctatgtattttatttcattcgtacttaatgacttttaattgcctggccatcaattcattgttttatgaatttgatgcgagatcagagaagtgactgtcaattatgctatactgaatttcgatataggatgagagtacctgtatggtttagatagcttataggatttttgtgttcaatgcttgttgtatgtttaatttatcacgagagtagaaaatttgcatgtaattgaggtttatatatataaattaccttagtaaacctattattgttaatttgtctattaatttacttgcttcctgatttttattattcttatttgttttctaatttatttattttttttatatattttattcagccaagtagaagtaaaagtttaattttaacgtacttaactacaatgcttgtgggatcgacctcactctttgtgagtaatacttgttaaaacggtacgtatacttacgtgttgcaataaccacaacactttctctaaaatctgatcagaacatagtctaatttaggcttgaagtttcaactttattttcttatacaattttctctattttatagat

SEQ ID NO: 134147 - DNA, 823 bp, Cannabis sativa
ctctgacttttgctacacctaagcgaaatttgtaagaaataaaagacgaagatttcgattataagaaataaaaggcttgcaaagtttgaaacataaagaggcgaatatgagaattttaaacttgagaataataaaaataattaagaagaatcatcaatatatatatatatatatatgatgatgatggatgtatattaaatattcttgcacctacttgtttaataacattgtggaagataattatatgagcgtttaaaggatcaacatcaacccttttaagtgcagctgcaaaacaacatcaaaggaaatttataaaactcactcttgagtgtaggtgccctttataatttttctatttataagaatccatataagcatctagtaaataaatcttggctagtgctcatacagaaatattgtcataaaatatcatgtacatggataatggtgatgcataccattatctatttagcccaatccatcacccaatatgaaatgaagtcaatcagaaaatatcatcaaaataaacaaaggtttcaaaatatttaccttgtttcttagaatttcctattgcttccttggaacctgttgaaaataaataaataaataaattactgcttgatgtaaccccatatatctaaactaccaatttataatattcaaaccttctctataaagtcccaatatgaagttccaataaatcaaaatctcctaacattttgagtgaaaaataatctataaaagaaacacatttaatcagaagaagaagccaaaccttctctggaagcggtgcagtgctaccctcgtcgtcaccgaaccttgt

SEQ ID NO: 134148 - DNA, 528 bp, Cannabis sativa
tttaaacaatagtaacttcgatagataacaattatcttatttattttattttattttttccaaaaagaaatggttaataatagtagtaacaataaataacagaagcttatctcttaaatgtggtggtggtggagaatatccacacaatcgtgtgttttagtttcatgtattcggtcagtttggccatatttttaacaccatacacataaccaatccaaatataacccaataaaacagagtaggcaaagaaactataacaacaaacaaagtacatttttttattttttctaataaaatgtcatataattttttattttaattttttgctttaatatttaaaatatattttgtttttattttatattaaatatgattattctttttaacattagaatttaaatttaaactcattgaaatagaataaatgtttatttatttaaagaattattactataatcctgttaattattgtagttactaaaaaatatatttttattattatttaaaaaaaataaaaaaaatgtataa

SEQ ID NO: 134149 - DNA, 752 bp, Cannabis sativa
ctcttccgatctattttaatttttattttataaaatatggccacgtaggataactttttagtgacctatcattgccacgtacaaaaaattaggacttaacaaagctggacagatgaaaccttaaaaatgtaaacgaaacagtactttgaagagttttctcactaaaatataaagttggataattttttacaagtaaattgatagttgatgaattttaccgcaaattaatctttttttcttaattttataagataaaaaaatggaggggaatatagtttagacttgatgtgatgaaacccaaaacaagcaaattggctacgtcatcaaaccacgtggccaacgtagataccctacaatattctattcacacccactgtcgaccgtgcttaaaggaatgtatacccacgcgcctatttcatagtacaaaatgttcgcgtgcagtacacgcatggatgacatggacatttcaagggccataattgattatctatttggatcaaatggaatcaaagaactttctatctcaagtggaccccacttgaaaagccaactcccaaaaacatcaaaactcactcttttttctattttgttttgttttgttttgggattgaattcaattgttccatttctcaatcctaaatcaatctattcttcttttagccaattctatttagccacaagcatcttaatattttgtttttttgaactttatctttttttttaaaaaaaaattggagttttttttttttttt

SEQ ID NO: 134150 - DNA, 512 bp, Cannabis sativa
actttgtaaattcgaaattaccagaaagttataaaataatcaagcaaaactatcaagcaataagcgaaaggagttaagtaggtcatcaagaccctagcaaaccatgtctttccagtcaaaagaagcatgtctaacttcccaattgaaggttgtaggtcggtcttgtcttgagaataagttggtcagccaaatgtccttgtcagacttgaaagggttgttcaagcacgggcgcctggcccttacaaggaaagttggacaacaaggctatgtggacaaggatggccgacacataccaaggctagaaagagcataccaaggctggcaggcccataccaaggcttgtatgaaaatacctggctggctaggtcctaaaaatagggttggtcgaccattttgtgtgcacaactctaaacagctaaataaattgcgggatagatccaacaacccatgaaaataggaatattttctcgagacattagtcctattttctagggatttagttatcctttttt

SEQ ID NO: 134151 - DNA, 585 bp, Cannabis sativa
aataataataaatagtttctactgtcacgtatctataatctactcatatatacctaaggtttaatttatattaacgtgcatcacccacatgtacactataaataaaaaaatcaaacatgattaaacattatctatattctacacgttacattgaaaaaagtcatgcatatataatcaacacacttataagttatattattattatatttatcaacaagtttacctgttaattaataaatatatgggaattaattgctaacaatgttcttaataatgagattaatgtcatgataatgcctcgtgtcctcaccaatattccagctcatcaaatagagtctcatgtggatgtggcccaagcttttgttgttttgcaatgcctgttttattaatattagagaaatgtctcttttatcaagcaccacaaaaaaaataatacattgctattagtgaaaattaatttaatcgtaacgctctacttcagtatacaggggcggagccacagccaagaaaagggtggccatggccccctaaatatttcaaaattacattatatatatataaaaatatttataaaataaagtatat

SEQ ID NO: 134152 - DNA, 677 bp, Cannabis sativa
tacgctcgttagtttccgacatgggctttactccaatatcaccaccaagttttttaatctcataaaggtccaacttcccaaaatgtttaaggtcataaagtaactcttcttgggctttaaagaaatgagtcaaagccctctcctcaactccatttctctcggtctcattcccacaaaaaacgacctcatgggtctccttcccatccgaaagtgtacgctcattcccacaaggcccaataccctccaaaggtcccaccttatcctttaaagtattcaacagcttcggccccacaaacgccttagacccagcggcccaacttcttcccatatcttaacctcggtcgggcccaacacttaagtcaaacccaccatcaataacctctttcaaagactctctaggcccattacaaaaagatcccatcttccccggcccattagcaacttgacccataacactcttttctttactcggcccaaaccccaaagagtcaacgtcagtacaaatgtcaccttttaccaacgggtctcttttcttcattacctttttattttatagttctgctacaattattttttctcacaacacaactatagttactttttaccacaacacaactatgctaaactgactcttagatgttttatatatatagatgaatgttggaaattattttacc

SEQ ID NO: 134153 - DNA, 1174 bp, Cannabis sativa
aggcttgtttcagcatatgctgaaatagtaggtgttgtgttggaaggaaaaaaaagtccttggcccggggtggatttgagatattgcaatatacgatttgcagcatggagatgtggaacccgtggacaagtgagaaattgactgaggtggttcacggcataagaaatatcaggccgtgtaatagtcaagtatataagtttgcctatgagacttctataggctgtaggatcggggagaggattccctttgtctttacttaacttgaggtttgtttcattaggtatgtagccgtttggactaggtaggaccaatataccaagggtaagttggattgaaatcctagtgctcgggctatgtttagtatgtgttgatgttttcgttccacaacggagttttgttgtggtctttccacacaagagtggtaatggataatgccttttgaggcatataaagattgtaagttcaattctttggcattgtccgagcgaattgctttaatagacaaagagaattgtgtacatatcatatttaagaaatttggaattatgtgttgaacgtccgatttgttcttaagcatgaaaagccaagtgaaccttgacttatcatcaactatggtaaggaaatatttgtaaccttctatagtagtgatgtgaaaagggccccaaatgtccatgtgaaccaaatcgaatatatgtttggcaaagttattatgagaaataaatggcaatcttttttgttttgctaaatggcaaatatgacaatgtaaagatggtttgggatgtgaaatgtgttgttctttattaaaaaaacttgaaatacacattgatggatgtccaaggcgattgtgccattggtttacattgtttttattgaaacaaaaagaaattgaaggggcagttgtatctgctgtaagaacagtaggagcagaaatagctgctgtagtaatagtatgggcagtaagatcggctggagtgggttcttgatgaagcaagaacaatttgccacatttctcagctttcccaatcaccacattcattgtaggatcctgaataatacagcaattgttatgaaacaacactgagttagaagtattcagcatgtaatcagttatggaaaaaaggttaagctgaaattggggtacaaaaagaacattctgtagtgttatttttgagtt

SEQ ID NO: 134154 - DNA, 782 bp, Cannabis sativa
caatgacatggtgtccttcgggtagagagacaataatccatgtatgattcttctctagagcctctatctcagtgtccattgcattatcccaaaccgcgattccatgagcttggtggaagaactcaagttcagagtgactcgaaatggccagaatagcagctcgaaatgctaaagacagcttgttgtaaccaataacctgagacaaagggtgagtggtgacaaaagagacgttagcaatcttagataaatcggtagaagcaagataacaatgatattcattcaagtaagatggtttgttaactgctcttcctgatctggtatgcgaaatattattaggagacaaatctggtgtagcactcagatcagaaaggacagtcagctcaataaattcaggttgagacaactcacctgaggctggaacagtggcagattgctgcaaaaactgatcagaaaactgattaaatgaattgagaggagagatttcagctgttacagtacctggtgcagaagaattcaaatgttctgcagcagctggtgtaaattctgctgcaagaacaaatgaatattctgccttatttggtgcattgtgtggtgaatgagagaaaaaattctcataggcaggggggatacctccaatggaaacaaatggaaaaatatgctcataaaaataaacatctcgacaaataaatataagatttttgtttaaatcaagcaacttgtaacctttgacacctggaggatatcctaaaaaaatgcaagggctgatctaggtgagaattttg

SEQ ID NO: 134155 - DNA, 720 bp, Cannabis sativa
  modified_base (548)..(581): a, c, t, g, unknown or other
atgtaataaaaatatataatttattaaatatgcgggttggcgggcggggtcgggttcaacccgaaactcggtactcctaaaaactcaactcacgaacccgcctgaagggtaccgggttaaactcgacccgcccaaacatttttttaaaaaaaaattgtgggttcaccggttcgggttcgggcgggttgctcgggttcgggtcgaactcgctcgaaatgttcagtgctaattaccatactcacggggctaaacctttttaaaatatggtatttagtttacttattatttttgctttcttttaattacattattcaatcattttattatttgactcactgtcgttggctagaagcgagaacaatatatataatatttaattattttaaaaaaaaattgtatgttttactataaatgaataaataatataaaaacaaaaatatttttttttttcaattatgtaaaattttatactaatttttattattaaactcatttaaaattatatttttgatagcttttcatataattatatataataataataatannnnnnnnnnnnnnnnnnnnnnnnnnnnnnnnnntaataataataataataattttacgtgaaatacacaatttttttattgtattatgattatagggtaatactatggtaggacctagcaaaagttccctaacggtagggaactttttttttaaccgttgattttagatctt

SEQ ID NO: 134156 - DNA, 930 bp, Cannabis sativa
ttgttttcgtgttattttttgaaaaactgtaaaaatgtaaaaaaatattctttaaacgtaaaaatgtaaatattttacaaaaaatgataccttatgtaattatttttttacatatttataatttattacttttggggtaaaatacaaattctttctcaaaaaatggtgcatgtaatttttttccaattactagttgaggattttcttcggtctctaaataggagaaatataagatatgaataggatctatgtttcctgacatttgattggaggtaataaaatggaatgaaataaaaaagaaatattatttatttcattcttttattttgttgcattcataaattctaattggaatcagaacaatcaatgaaagacaatcaatttaaatataaaataattgaaaataatattttattttgttgaggaaattagaatcattttatttagtttgcataactaaaaaagtaattagaatgctttagtttaattgaattgtcattattaaagcatgtaattattttttatttttatatttttgaagggcatatttggtttattttattttatttttaattgataaaaaatataatttaaatatagtagttaaagaaatagaaaagtattctttatgaaaagagaacggctaaaaggcaccgctagtgcgtggcattcttcttagtgtcatattgttattggtgtaattaagtattgggtcccacataacttaagaaaataggttttagagaatattactaaccaatcgtaaagcgccacctatagaaggtgctgagcagtgagcaccactgatgcccaataacaatgctcttataaaaattgggaaccttttccttaatttgtgtggattctactagtttctctcattctaaaatttagtaaacaaattaatgggaatcagtcttatataattga

SEQ ID NO: 134157 - DNA, 582 bp, Cannabis sativa
tctcagtagctaatagtgttttttagctcatatatttatatatatattgatctaataggcttattttttccagttttttattaacaaaaatgggaacatgtacacctttccataagcttcaaatttcagattcttgtttttgttttaacaatcaactcaaaataaatgacataacttaaaatttatagaactcttctttctcagtaagtcatgtttatggtttttcttggaaattaattccaagcctttgctctgtttattttagtctcttatatatatttgtacttaattaagtgatttatttacttacattgcttagtaagccatcgttttatgttttttcggttcatatagaaatttctttattttttctaatcaatttcaaaatctttaactaaatttattttctcatttttccttaaaaatcaaaaaaacaaaaagaaaagcaaaaagacagaccattggcaaaatttatatatatacacagggccggccagagggtggagcggccggggcatacgcccaaggccccaccattttggaggcccccgaaaaattaaattgatatatatacacacaaaa

SEQ ID NO: 134158 - DNA, 1108 bp, Cannabis sativa
tacctaaccgttaaatgttaagtcattatatccacgtgtcattttcttattagtatatttgaactattttttttaaataataataacttaatgacttggactaatcaacgattgtcacgtggcaatttatataactaggtacctacagaagtttcaaaatgataacttaggtattattaccaccaaaaattaaactcatttatgccgcaaattactcttaaaaatatatttttttgattaattatgatatatatttataataaaaaataaaatattaattttggtgtaatgattaattaaataaataatataaaaaattgctaaccactcacaacacgagtatgatgttgggtacctcatggtacctgataacaatccactattttttatcataactctaaaaatttgtcttcttaaccctaaaacttcctatttagtaaataatttgaacaaaattagatttaagatatcattatgtttttttttttaaatatatgttgttatttaataaaataaaagaatcgattaataatttttacaaaacacgagacttaaaatagtatttactcataattaaaataaattattttttaataatgatattaataattatttttagtacatgtgtattttttttaattatcaaaattagtaaaataatattttaattcattaaatttcttaccattatctatatgttatactcattggaataattattgattaaattaaattagaccttacattatacttttcataaatatatttatttattttgaactttttgtttttttagactccacacatattttgtaaatttgttcaaaatagtcttcttccttatttttcgaatgattcaaaattgtcttctaattcaacttttgttaaaaatattttttctcttactaacgttttgattgtttaagtattgtatcgatccttacaaaatcatataaaaataatatttctaacaatctcttactagaaaactattttgtattcaatttaacaaaaaatgatggtgaggatttcatttaattttagattctaactacaaacaaaaattgtactatttctaagggtctgtttggcacaatttttgaaaaaa

SEQ ID NO: 134159 - DNA, 707 bp, Cannabis sativa
aggtccacccctaataataagattattaccggcggatttagggggtccgccggtattagtttttttttaaaaaaattaaaaatataatttaaaaagaacaataccagcggaaagctcattattaagggggtctaattaatgcgggaaaactcttgcttatttattcaaattggtattagcggcagttctataccagcgaggatctgccgctaatactgatttaatattaatatttattatattatcggcggttcccctatttaaaccctccaaccccctgtatcacaatttttcccctttaaactcttccgcccctatttatttgtattgttgtagtaaattcagaaaattttcttacattattttgtattttattagattattaattgtagatttctttcttgttttcattattatattgttattatataataatttaaagatttggatattttttttacatatctattctatataaagtgaggttatgtaacagaattcttagtttaacgatgtttttttgatttctacgttaactttaacaaaatattctattacgaatattctttattaattttataatattattatggattttttatataaataaatttttattttaatttaaaatacctaaaatattattgatatttttaatcttatttttaaatttattgatttaattttaaattaaaaaaatgaaaaaa

SEQ ID NO: 134160 - DNA, 579 bp, Cannabis sativa
gagtaaatatttactttcattgtagcaattgcaagagttggtgagtttatgtataaagatccaaattcacttacgatcattggacccaataatatccttggcaatctttgtgtttggacttttctccattatttaaagaaaaagttaataacactaccaataccaattataaggaggaaattatattgtatatccattttattttatttattttaatttttacttttattttcatattctttaagatatactcacttttacagatgatgtccccattaaatttcttaaattaatataaattatttgttggacttaagtaaattataaaggagtaactcatttataaaagtaagtatattttaataaaatataatataaaaatatttttgattaataattaaaaaaatatatattttttaacttatcccgattataagagtttataatctatcaacattattacaaaaaagattattctcattcatttttaagcgatgtacacaaaatttatgttagttaccaaaattgatgtaataattgtaaatataaataattttttttttattggttgtcaaagaa

SEQ ID NO: 134161 - DNA, 765 bp, Cannabis sativa
tttatgttcattatggtatattaagcaggtctggaaggtttgggatcaatttgaggttgtatggtttttttttgtgtttcctgcatttaaccggtcgaccggtttagggggacctgtaggaaccagtcgactggttggtctccacgaaacctcactgaaccagaatcccagttgggaaaccagtctaccagttgaggcattttacggaacctgagtgtttttcgtttttgcaataattagagtatttccatgttattcatcgatagggaaactttttgtttcatgtttaagtccccaaaaagtgatttagcgtgtcactcaccaattctacgaataatgtgctttcggggcctataaatcgtcgagaagctgttccacttaggttggccagcacatttgaattttgtaacgatgtatgattagtataatgctatgcatatgtgttttcatttttaatgtacatgttatttatgcatgttaattacatcgataacaatatcagtatacacagagttatattggatactgatagatgtatgttggctcagatactgatcgacattatcatatcagtgtggctagagtatgactagcatactgagtatagactgatattatggtgcatagtattgtcttacaaacgttatagactcaataccgtgttggacaaggggacatggttgtggttgggtgtatgggtgcctgattataatctgggttattgttatgatattatttatgcttttcttactgagtctgtcgact

SEQ ID NO: 134162 - DNA, 969 bp, Cannabis sativa
cttgattaagtgtaatttttatgagatcgaaaaagtgaattttttttaagatagttttttaaaaaagttgcacacaacagcccttaaagcttattttatcttcactgttagtggtagaaaaagaaaaatgtttgcttctctaaatttgtattttcagcctgagaagttttctagttcattgttgttgtacccaaaatttggctagaggacacatgtacaagtaaagggaatgtgaatcggtaccgtatatttttatggaataactcattaattgcgtaagtatcagagtatattgtagcccgctgactgtaaggacttaggtgaggattcaatgtacgaaatggtacttagtgtataacgagaaaccatatatcgctaaaagagaatagtgaggcactaaagaaaagtaacacataccctagcttgcaataagcaaactaagtgtaaaagtcaaatcggctcgaagaacaagaatgtgagatgaccatctcgctacgaggaagctccctatagttccattaaactaacaggaaggaggctcataaccctagcaagtcagaagatttctatataccagcaatcgatgtaaaacatatcaagttgacctcgaaaagaagatgattccagcttgccattgggatcactacaatcaagtttctgtcgagacatctccaaattcaacaattaaagacgtgtttaatacatgatatttctgacccagtaaaagcgggaaaatcacagctaaatgattttcaaaattatacaccgcatttatatttcataatatgtaatcagatcccacgatttaagggataatgactgtaattacattttcttcatccttgtaattaaataataccatgaaattataaatagtggaaaacaatctcaaaaaacggacaaaaaaactcttatgcaagaggccctaaaaaaatactcagaaatcttaataagattgactcgtggact

SEQ ID NO: 134163 - DNA, 1004 bp, Cannabis sativa
  modified_base (688)..(690): a, c, t, g, unknown or other
  modified_base (951)..(975): a, c, t, g, unknown or other
aatttcacatatattgaactatatcataatataatttctcaattattcataattatttaattagggttttgctaatccatttcttaaatccaaggtattacagaccccctcgcatgcgctaccatgcccattgagggagtacctattcaaactactgaatggttttacgtggggtagaaaccaactggagtctccatggcaacgcgccagcttgtaagggccgtagagatcattcccataagtgaacctattgtagagagaggtcttcttgtagataacaggagcagtgaaagggagaaattccttccccggtgcaggtccgtcttgagtccgtatgggagatggaccaaaaagccaattgcttccaatcttatgggatgttgcaagcgtattctgaaattgatggcctccgtaacgtcccaggactgatgtggcacaggctttctgtccttttgaagatcataaatagtacaactaagctgacctaatcatatcaggattaagatccatagacctaagatcaaccagtcaaattgacttagaaagatataacggtaagattatgatatcttgtctaagatcaatattggtcccatctaatgtatactccatacaatcgatactgctaaactttgccaataccctagaaaggacataacacttatccaaggtgtaagtacaccttatnnncaattatcatgtcagcctaaatccagtgaactaacaaatcatggaaattaaacttttgaacatataatgatgattatattccactatgatgacgacagtataatcatgaacaaatatatatatattttggacttaatagaatttatacattgaatatagtcatgaaataaatcatgtgaaccatgcaacatagaataatttctgatctttattaattagtaaattgataatattgaaatagttttatttaggacacaaaannnnnnnnnnnnnnnnnnnnnnnnntataaaactaaaagtgcatttcaaataat

SEQ ID NO: 134164 - DNA, 692 bp, Cannabis sativa
cactaaacttcctacagctttcttgcatattattaaattggttgccgaaaacctcggtcaacagtaggtattaaaaaataagactttttatagaaaaagtgggataaaagggtacattttatcctagtttttttatataaaaaaaaaagataaaaagtaccattttatctcacttttttcaaaacatcgggataatatgggtacttttatcccaattttcataaaaagaagggggataaaagtactcattttatctcggttttttaaataccttttatcctactggcatacatcccggtttttattctagcaaaaacagggataaaaagtcttaaaaactgggataaaaggcctattcttgtagtagtgaattgttgggattagatctcttaacctctcaagtcagtatgtccatctatttgctcatctgatgaatctgaagaaagctgctgcacgttataacagttggcttttataccaacttaaatgggacccacaagcaactacatataggggttcctctactctcaaaaagtgttttgagttgaagagttttgagttctaatcttcaatgctcatactttagattccgtttagagagagagagtccaagatcatagtgagtgtgtgtggagggatgtaaaaaggagtatcactcttgaagtgatttccctcaatgtgaggcatttctt

SEQ ID NO: 134165 - DNA, 1743 bp, Cannabis sativa
atcgtgcggattagattggatcggctattttatgaacacccctagctggaagataccatcttcttgcttttccacaagtttcggtcctctcatcattggttaataaaatagagaccatagtcaaaaactatataatgaaacaaaattaatataaacaatgaaaccatcaaacaccttattcataatatagtcacattaattaccattatttttactccttttcgagggccaaggtaccgaaaatctgatcgtaaaagatgaatgtcactattccttacactcacttgcctatacatgaaaaatgtgtgaattaagacatacatgaaaataaataaatttaattaataatacaaaataatcataacacttactcgtatcattggagtttgaatatatatactgtaacatatctctgtccttatttcttagtgtattttctagtttaaaatcttcgaagaaaatattatctcctttggaagtatttatgacagacacattatcttttgatgatgaattattttatgctattgcacacaattcttcctcatacttccaaccaatattcatccggtttatctttttatcttcaatattttcctgtaaattttttctgcattcccttttgttggaatgtgatacttttcaccagtgcacaatgcagaagatgatgagtgagttttatgtctagaggaactagttgcagtcaaaaaaaacttttataaattttaagtttaaaaccatgcatgcccaattagtatcaagaaaacccaatcatgtataaaaaaaccataactagacccaatcattcccccagacaatcatcacaagaacacaccctgcaaaaaagaaacccgaacactttttcaagagtggtgttgaatcaaggcccaacaacaccaaaagttataagcttgaggcctcataatctaatttttttttaaaaaaattataatttaaaaatttattataaggacagaattttaatttatataaaaataagtttaatttttataaaaaaaattgtaaatattataattaaatgacttaactgttaaaataattatagtagggatttataaataaataaaaaaattatttataaattttaattgctaagtcttgttaaatatttatttaattatttaaaagtagttaattataattagttaattctaaaaatagaatttttacctattcgtaacctgctattacaggtaaaaaaatgtaaccatgatagttacaataaaatataaccattgaatagtcacctaatatagttatatataatgataatttttaaatattaaagatacaaattcatttttaaagtttacttggttattaatttaattagaagtaatttgtttgttactatatgtattatcttaaaggatatatgtgtaattcaatgataaaaaacccaaactattgccacttttatttatgttatagattatagatgtgggatagacaatattaaatccaattgaatccaactaattaattttaatcaaattacaattacattgaattggatgtttaaaattagattctaattagatttgattggatttgttattggatgttaatatcaaaatctaagtaaaaactagttcaatccaattatatttatatatattaaaaatgggtactattatggtaggaattgggtattttacctatcaatagggatattgatttatagcccttgatttaatccaatggttcaaatcaactcttgaa

SEQ ID NO: 134166 - DNA, 673 bp, Cannabis sativa
tttttcttctactctaataacgctttttttgtccataatcaccaccttcctgtggaatcgaccgcccgatctatactacaaccaccgctagtggaagtcacattttgggcgtcaaccaaattttggcgctgttgccggggaggtaatttttttttcaaaagcttagtgaaatctacaatcaagaggttagtaatttttttattttattttcttgttaatatcttcttatcttgtgtaaatatttttttaaaaaaaaaaatcaagaaactcaaagtatgctctaaggttgcggttttatccgatcttccttatcagaaatgatttttttgatttttcttcaatttttatttcgttctctatttgacttttatttactattatagtttatattatgtttttgttctttttatattttatttttatttatctttttctttttatttctttttaatactcttagaatttaagtccttcaaaaaataaaaaataaaacaaatttcataaaatacaaaaaagaaaaagaagtgtgttctaattttttttccttcataaaatacttagtattttgtacaacggtataatattatatatgacacaaacaaaaattgttctatctagaaaagttagtttttaaataaggtttgtgttggtgtaccctccaccttatctggga

SEQ ID NO: 134167 - DNA, 1048 bp, Cannabis sativa
ttagccttacaaaactaaaactagccatactagccttacaaaatcaaaactagccatactgttagctatttaaatactggtgtaatcttaatagtttgtgatacgtgtactgtaatatgttgactatttcttttatttgtcctaggcgcatacatgttaaaaaaaaaaaaaaattcccctcactccacctcctctaagcctctaatatttgtatttcttacattttttctctctcctttttaggtatacaagtactaaatttttgtattaaaaatatatttctattttcataaatttaaaatatttttttggctataccaataatggtttagtctaaaaaattatactatttcaatctactctttaaagtgatcattttaatatgtgagaagtatatatttctttattgtaaccgaaaaaatgactaaaataaaaagtaatattttaattttttgttatttagttaaccaataagtaattatttttttaaaagataaatattgtattctaattaaacttatttgataaattaaatttgatagacttttgaaataacttacaagaaaaccacacaacatcttaaacatcttacattaaaaataaaagtatactaattttgttaataaacttatagtaactttttatactttattataatttatttatttcttaattaggtttaaaattaatgtaaatgatgttttaaaaaagtagcaccaaattatctcaaacaacaaaataacatcatataacttaaaaatctaaaaataaaatcatgattttaaagttagctatgaaataagtaaccaaatatatttaacgaaaaattatcttgaaataaagttctcaaaaaaaaaaaaaagataataataataaaataataattttgatatgtggaaagcatctctatatttttttactgtctccgaaaaagaacaaacaccattaaaaataggggttttttcattagtgtacaacaaaaacaattatattacaaaaaatgtgcaaaaaaacacaattttaaaaatgtacacatttgaaaacatat

SEQ ID NO: 134168 - DNA, 1356 bp, Cannabis sativa
tttttttttaagaaaatattattatcataccccgccgctaataaacgggcgagattttcccgcccatacagtttgaatactgttagcggcggggcattagcctgctgctaatagtaatcttttttaaaaaaaataaaactggaaatttaatactattagcggcgaactatccgctgctaatggtattataaatatcccatctgaaccctttcccccattttccccttcttctcttcaaatctcaaaatttttcattttcccccatttctccaccatcccgaccccttgacagcgccaccacccctaccccttgacggagcagtcaacagagcggccattactggtatttttctccagtttttgtaagttttaattttttattttacatttgagattatatagtttttaggttttaaattgatatatataatacgttttatatacaaatctatatatttaaggttttaaatatttttagagatctatagattttatattctgcataaatcattaaataaatagataacattagggtttataaattaatttgggtatttatttttaaatatctgtgtgtatatatattaatttgtgtatgtaataaaatagtaatataaatataaaataattagtatatatctgcgtttatttaaatatatatatattttggtacaaatttatatatatctgtgtataaatgtatatatttatatagatagttttagggtttatatatttaggtatttattttttttatatgtgcatatagaaattttaatctgtacatatatatgttttatttatatatatatgtattattaatgtatagatgttctaaatatatataagatttatattttttttatttatatatacatatgtataaataaaatatatagtatatattaatgtgtatataatttatatatatgtatacagtgatatatatatatatggtattgtgttattttgtagtatttttaattaatttcagtaattgataaatgttatacttttttgttttcagattaaaatgtatgtttttaataatgtgtatttgtttgttttatgttaaattttatttaaattaaataagtttgttggtaagtttagtaaaaatttaaaaagtaagtttagtaagtttagaatgatgaaaaaatttaaaaaattagaagatgaaatatattagtttatactttaatttttaaaatgaatttttaaataataatatttgttttcattaaattattaatttatatttatataattttaaaaagtttagtaatttgttaggttttgaatagattaataaataatttaaatattaaaaattaaatagattaagtagaagaattt

SEQ ID NO: 134169 - DNA, 1057 bp, Cannabis sativa
ggggcccatgaatcaatgcagaagtgacatgtcttgtgtagaattttcatgggcttttggtaatttgattttttaagtttttacaaaaaatactaaattgtgggcaaaattttacaattttaatttcacggaactttttattaaaatactgttttttataaaaattactgtctttttagatagagaatttcatcttctctatctctagtttgtgaactaagatttatcaacgtcacaaccacgtaaaattcatagtattctcttttcttttctaactctaattttttatttatttaattagttatcgaaaatctcggtcaacaattattatttaacaaaaaaaataaactgatcggtaatttttagggaaaaaaacaggaaaattccaaaaagagaaaaatattacaaaattactatgggccggcccattcaacatttatacaacccacaatgaaaaaattacaaaaataccacctggtctataccttaagccacacataatgaacggagaagctgaagataactccatcgatcaaatgtgcaacgcaaccagaatgaaaccaaaacaaggataatacaaccataaattccggcaaaaattgattggaaaagaagaactgcaatgatctaaacagaaaattatgaaaaaaaaatccagaaaaactgtgaagaaactgaaattaaatatttgatttcagttttaatcgttcaaaataactcactccagaatcgaaaatcctgattcaagcaatgtagatatgtattaaacagatctggagctcccccccgaatccaaatcaaggtatgatatgaaatttttttcaaaaataaatctacgtcatatacagttgcattctggttgattccctggtttccaacgcgcaattcaaattcttaaaaacaataaacaagatctgattctaattaaagagcgtcatgttacgtataagcctgttttaaattttttttgttgccttacacttacaatatcgttttaaaatagtttacaaattatgaaggattgtcacttgacgggtaccaaaaaatagcagatata

SEQ ID NO: 134170 - DNA, 779 bp, Cannabis sativa
caaaataaataaactagaaaagcctagaatatttagaaaactataagtaaccaatcaagaagattgtagaagaatgtaaatcaattagaaaagtctagaaaacttataaattatgtagaagtactagaataatctagatgaaattaaatgtaggggtaaacaactataaataccccatcaagcttccaaattgtaaccaagtttgagtaagccaaatcaagtcttttactactaacttactaccttgtttcctctcttactacacacataaaaattaaacacataactcttccttgtcctaccaatcatccaacttatcaacttatcaacttatcaacatcatcatactacactacctaatatctatcctatacaattctaaaccaatacaaatttattctcaaaccatcagatacaaactaatctttggatgtggaatgtagaatgcaaatgaatttttagtgaggtgatttaagaggatcataagcaagtactgcaccataaacaaggttgaaaaaacgtcctttgggatttgggagagtaaagagtggtgaaatattttctttgatggtaatggaattataaatataatccattaacatgagagagatgtccaaaaaataaaataataaaactttaatataaaatccataaattatgatttttcgacattatacattatgtactctattttgccaagaaaacataatgtctacaaactactactactaataaaaaaaatgggcttttttatttttacacttcaaaagagtttattt

SEQ ID NO: 134171 - DNA, 841 bp, Cannabis sativa
  modified_base (26)..(28): a, c, t, g, unknown or other
tccacaattaaattaattcacaaatnnnaataaaataataaaaattagtgttaattgcctttactaatcaaaaattactagagaggtcattacactgcacaaggccaaaaaaaaaaaaaaaataaagggcttaatatattttttctttaatgtctaatagttttttttaatgaacctaacttttgaaggggctaacaatttgtaattagtcacttctatctcaatttccaaagccattttcaattctattaatgtttttaagcaaaaaaaatatatatatatattactgctatttattattttttttcaaaccttttataatcttttttttcttattatttttttgttctattagaatcaataacaacttttataaatagttgaagtttttggtgtttagaaaaatatataactgaatgataatatttaaaaatattatttataaattgtaatttttttttgtagagacctaaattttaaattagaatagggcctccaacatatttaagacgatcattagtcctatatagtttaatatattggaaagtatcgctagtcaattataaggcgacatgtctagaggtactagacaccattgatgcccaataacaatactctaactataagtataagttgactaagtcaaagcttgccatttgattgaattcatatatttaaagtggaatttgagtattattcgacatattttacaaacttttacaaaaaatatcatttttttaagctaattagtatttttattctctaaactttaaaatgtaccaaatcatgccgctggacttttttggccgttaaaaatttcccttgaactattgagattgtt

SEQ ID NO: 134172 - DNA, 1403 bp, Cannabis sativa
ttcttttatacgttaccctggtaatgtccccgcttcaagcctccattgggcccttattcccacagaatgatggctcttatatacgagtgcatcactatagctggttctcggactgatgactcacccccacgtaccaatccaagtgttttcaatgtactttgctctaactcgcacgcttcatggagaaatttcctaaatgaaatcaccccaagtgaaggacactcaaccatgaagttccctcatggtgagctacaaatcaagatgcttcttgctaacataggtagtcacacgcctacataatctcaaaattagtaaacaatcaccgccttcaattcacttaggattttagacaatactcataaattgtcccacctttgctaatgctagatcacttttaaacaaaagattttgttatttgaatcaattagatcgattcctccattaattactcatgtcctatattccacttgggcttaccagcaaatttaactcatattatcatttttttctaccctgtgatatgaactacaactaaataacatacaggcacagtccattagatctttgatgtcctcccatcgagagtacaatgtttaatatcaatataaatcgcaattataatgtttcccataaattctaacttgagtcgatcgaaagatcgatacctgagtccccttgaatcataactggcacttgggcaggacccgtacacttttcttaattgtgggaaggttctttttaggtgactcactaccctacaataaaataagatctggatctacaagggttcaaatggcgccttttcgcatcttaaacactcaagataaggtcaccatttcttattctcaccttaaccgcaatcctgactaccctaaaacctttttgtcatgttccataattgatggttcattttagtttttgcttcctgatctactagtaagttggcttcatatattccaccacatctagtggtacaacaagaagtgtcggtaatacatgaacagacacaagatgagcctattgttctttcaaatctcggatctattttcccttgtgtctaatcatatattacatagcagaatttacacgttcctaatattatggaaataaagaattctctttcttatcgtttgtcccgagcccaaatagctcgctaatcagactatttcattgccgttactgcataacttatcacacatttagtcaatatcttctaaccatttaaaactcagatggatatcaatatcaatatgcataaaccatacacatatgcttatcaaaattatcactatgctacatttcccaacatactttataatagcctaagcaggtaatccaatagcaaataatataaatacttactataccatgagtcgatatgtccttgcagcaaatgtacatat

SEQ ID NO: 134173 - DNA, 1333 bp, Cannabis sativa
  modified_base (470)..(475): a, c, t, g, unknown or other
aacttattttatataatattttattttttatatatttttaatttttttaaatataaatttatatgcatttgataaaaataatttatagaattttttaattatgttttctcaaatgtaaaaaaaaaacatagaaactaagtatataagaaaaattgtaagttaatgttgtttgttaataataaaataaaatataaattatttttttttaaaaaaagaaatttaataattatttattttattataattagtttatttaattttttttaatatgtaataaataagtaaatatggttttagtataaaaaaattattatagtcttttaatcaaaatagttttttctaaaagttggttggagcagcttcagcttttagcggtagcttttccaaaaattcttcaaaaagctgtttttttgactatttaccaaacacacttttatcacaacttttttaaaaagcagcttttagctttnnnnnnagctgtgccaaacgggccctaagaagtctgcaccagcacaagcacaacattggaaatactattcaaaactttcattcaaattttccttaattaatgataatgcgtgatggggctacttaacttatataccatataataaaaaacatatacaataattcaaaaggttcattttgctacaaattttaaaatgagaatatttactaatataatcctctaatttggggtcacctactataatttcttattatttttttgccaatcaccaacccaactttgtaatttttttggggggtgaaacctaacttattttttcacaggttgaacccaacttgctattttttttggcatgttagtgtgagttgtctttcaactatgaccctacttcttaccgagttgaggtgagttctttaatttatgctccatattcaacatggaagaggagtttattctccattgtttagtctcttgacaaattgttcagtttgtttcgaacaaggttgggatcaagaccaatgtggcaattagggacacatttttagattgggtggcgaagtgttttcagtaggtcgataatgagaaacgatgtttattatcaactttgtgttaggctatttggggagccaagaatgagatggtgtggaacaaaaaggtttatggaacttctactattgttacttcaacatatggtatcttgaccaattaagaaagattaaagcataaaattttgagttattacattctcttaatactaataaatattaaatttaaaataatatttaatgatttattttttattttattttataataaagggtaaataccattttggaacctgtgttttgcaaaagttacatattg

SEQ ID NO: 134174 - DNA, 1254 bp, Cannabis sativa
atttggacagcttgacatatctctacaatctgatccccaacttataggaatttctttgatgactcacgatgcgaaagctacattcgctaagtattggtcgttctgcgcggattgttgatcgctttgcttcgagcatgcatacgaggcatcctgttcggaatatattctgcgagcagatattcggagtcgattccatgtgtcaccatcatgtgatgccacgtcagagtgtaaaaattgagataacagggtataatgcaaaatataagaaaaaaagcataaatattatagctaaggtatattcagttgtattgtcgttgttttctaatttttaatactgaatatattaatttataaacaaaaaaagaaaagaaaaattcgaatgaatctacagccacatacgtgtaattatgttccaagttttttcaagttgatttgtagttgcattatcgttttattatggtgttaatcaacattgcaggaatttcatttgatagcgaaaaagaagaaaacacttcgaccaactggttagtttgtataaaattattgaactcgttgctaattacttgaatgttagttttttaatagttgcataacagtagtgaaacaaaaaaaaaataatgaaaaatacagggttcaaattagcaatacaagacttgaacagaagaaagcaaataaaagtaagtttctattctatttcataaagattattttaatttttgtttataaatttgtataaaaaatgttcggaaacattaataactgttatcccaatttctgcactctgacgtggcatcacacgatggtgacacgtgaaatcgacttcgggtatcggctcgcaagatacaggtcgaacatgatacctcatatgcttgctcaagacgaagcagttagcaacccgcacagaaggacaaacacttagcgaatttagctttcgcatcacacgatggtgacacgtgaaatcgactccgggattagattacaaagatatggcaagctgtccaaatcccacaattagtgtattctgtacttacgatgcaatctttctgcttatagcaattgtaacgataagggaaatacttcctctccaagctcatagccttataaatagtgatgcatattcactggggaaagggtcgagaacattttggttgagaggttttgtctaagaattcatattcagagatcctgttgtaagagctataagaaaaggaacctttctccttgttcttaagtcaatacaaataatgagaatta

SEQ ID NO: 134175 - DNA, 778 bp, Cannabis sativa
aacaaccaagaacatcaaaacccataaccacaagcttgaacataacctaaaatcagaacctatactctgattttgaactcaaaataaccccaaaaacgcctctaaaatcaccaagaacaaattccacatttcaacaacaccaacatgccaaatatacaaagattatacccaagctttctcacacatgcaaagatgaactaaatcataaacaaagcatgtttctcaatgtaatttcagcaacataaagttcaaaataaaaatagtagaaagagttaactctaatcttttccaaacccaagcacaaatgccaccaaaatctaaacttctttccaaaagaatttcccaatttagatgttgaaaagatgaagcttaagggtgagagagaggagctcggctaaagggctgagaacaaactgaaaatgcatttccttttctttaaaatttccttttgttgaaaataaatctcatatgcaaaatgactaaaatgcccctagagccaacatacatacatgcattcaagggcaaaagtgtcatttatcttcacatacatacttaaaataactttcatattaatcactcaataatacaatgccaataaattatcccaaaattgtattttggccccgaacccggttcggcccgaaatatccagttgtgactataccgcgccgacttgttagaacacacctaaaaaaagaaaaaactcgcatactatataataatatagttcataagcacgcaattaaattaaattcacaattttacccttctcgggtca

SEQ ID NO: 134176 - DNA, 1099 bp, Cannabis sativa
tgtagttccatatgttagtttagggagatcttttttaataaataatattcactcatattcaaacatgaaaatagataaaaggagtatgttgatttctttcaagaatataaggtcatttattagttggtaatttgaactctcatatatggtattttaggctcatcttgacaaagattatggctagcaatatatacaaccttatatttttgacttgtatgaggttcaacttaattatatatctatgaatttgtacttttttccttttaatttcaaatcttaaaatagagagaacatgtaagtttgtagtatcattatctattgtatatgtttacattactagatgctattttgctatgtgtttagataatgtcgaaaatgcataattttttttcttttattttgcaatatttttaatgttggaggctttggtcattaaccctttgaagcaattttaatctcttatgctttcatgatgcctaacctcaatgaagaaaatgtttatttcgatagtgcatacgtgtttacgtgtttttctaaaaggcattggaggaggtattattgtcatcctctagaatattaaaaattatttttgttgtaagttgttcaatctagtcttataaccatgtataaatataaatgagaggtctcgaggataacgcgtctggtcaaactctttgttgcaatggaggctcgttgggggtgatattatcggtggttggtgattacataagatttttaacgtatttattttagacttttaataataatttttttttttgatatttggtttatttattttaatgagaatatatataatttgtggtggttggctaagaaaatagggatggagtggtatttaaaaaatcgtgattttgggtgttgggtgagatctatttggttttagaatttttttattttttttaatttttttaatgcttcagtttataacagaagcaaaatataattagcgtcggtgtattgactttttgcttcggttatgaaccgaagcaaaaacttatattttttgcttcagtttataactgaagcaaaaaattaattagcgtcggttcataaccgaagcaaaaaaataagtatttgc

SEQ ID NO: 134177 - DNA, 1057 bp, Cannabis sativa
aatgttaataggaatggtatatattggaataacaccaaacctctggtgggaaaatgcccacttagccacgttatgggaaataaagttataagttctactaatattagaataaatataactgttaaataagggagagtaactattacaaaaagagacgtagttatcaattgcccactgggactccttcccattaagagcattgatgaccaccctcgagtcgctctccacaatgacaaaattagacgacccaatatccctagcaaccgataaagccagacagcaagtcgtcgcttcttcgcataacgcattagaaaactccaaccgagatgtttgaacccaaatcaccttacccagatggttcctggtcacaactgcaatacacatactttctaaccctactttaacatcacaattcagcttaatccaatcctgagagggggggatgccactcctccttcaggctcgaagtaggggaagggaaaatagaagcatgtaaatctgcaaatgaagtacaaatagagtcaatacacttcttcacatcaatataagattcattatgtaccttgtcatttcgtattcgccaaatggtgtcaacaacaatcgaagcataaaggaaaacctcatcagcaggaattcctctctatttaagatcccagataaattttacccagccccacatgcgaatatcagagtcacacacagaataaataccctaaggagaagaccaccaaagatggaaagccacatcgtaggacaagaaaagatgttccataaactcctccaccaaaccacataaagggcatttgacatcctcaatatgaaaccttttcctgatcaccgcttgggttgggagagcgctagacaagatgcaccaccaaagaattttatgacgctccaaaattttactattccatagcttgttccagagcgaaggggcaacctcataatggggagccctttccaaagcctgagccaggtaggcagatttgcacgaaaaacgaccattactttcaagagtccaaatccatttatcattaccctggccagaggggttacc

SEQ ID NO: 134178 - DNA, 1074 bp, Cannabis sativa
aataatctcaatagttcagggggcattttcaatgaccttaaaagttcagggggtataatttggtatatgtcaaagttcagggggcaaaaattctaataattagcctatttttaatagcacaattaattaattggaaaaaagtccttaaatattccaataatctaaataggttaatggacatttttaacgaccttaaaagttcatgatttgatacatgtcaaagttcagggaacaaaaattctaattaaaatcttattttaatactaatataaaagaattttggaaaaaaaaaaaagaattaaactcaacatcaattgtggcaaaataatacttctcaactattacgtaagcaaatgcgtaagcgtatgcgtatatatgttttttgacttttgctatctcttacgtaaaacattaaattcatagttcttttctttttttgttaagaaaaggaaattgataattcttttagggcaagtatcttatactttaccaaagaaataaatgtagtactttatgtttttaataatgattatttagtactttttagaataattagtaaatttgctccctgaacttatgttactaccgaattgtgacccctaaaatataagggctgttaaaaaatctctctaatatataaccagtatatgattgtaccccttcggttgggttttttaacagtccccgtttatttgctgatatggcataagattaaagattaaaattgtaattgactcaagttggagggaaaaatgacaggatccctttctttttgtataattattttttttaaaataacaaaaataaaaattcataattaaattgaaattaattacagtgacatgtacatacatgataagggcaaacaaaacaacagtgacatacatacattaattacagttccatatgcaagaattgaggcatgatgagggcaaacgttgtgaaatgcatggacctttccattatcatcttgacacaccacaaattcaatattccctaatctgttgtcataaataacccaatcaaccaactcattcacccaaccaaaacaattagggcccgtttggtacgcag

SEQ ID NO: 134179 - DNA, 925 bp, Cannabis sativa
tgcctcctctccgcctgtgcctccctctgttgggcctcctccctgaacgccttcctctcagctgacagatctcacagactcctcatggcctcgtccatgcccccaaactcggacatgacatacccacgatctatcaaagtctttgagaggctaccaatctctacagcgatctggaaaagaaaacaagttaaatatgagagatcacatgccatagggcagaacaaagacaaaaggggaaaaccaataacaaagactcaccgcggtcatggcagcactgatgtcctaaacctgaaaaaatagcgtttgtggaggcgcaaactgcatatcttttggccgggagttgggttagatgggaaacgaattggctcgtcagttcagaggtgaagaaagcaagggcagggccgacaaagcggttgaaccagtccgtcagggggtccatgttctgatcccaagcattcttaaaggcctcctcgctcaaagaattttgttgagcctctcgtaagaccttcttcaaggcctccgcctcagcattccccctgttgtattcgtccatggcataattatgcttggcaattcgaagctgctacctctcctcatcaacgagaaccggagtaaggataatgccggggggcacaacatattcctttgcctcaggaggaatccctgaatctgagctgacggctgaggtgtcctttcttctgggcttcttggaagactcaacctcaaccatcttgcccttgcacttccggtccagcggagccacaatctctccttcctcctcctcctcgacctccccatcttcgtcgatcaagacgattgtgcctaggggggcactggaagatgacctccccggagtcgccatctgggcaggcgcaaaaggaagagaagggtccgggctgtaggtttcggcaagagtcgccaagag

SEQ ID NO: 134180 - DNA, 741 bp, Cannabis sativa
agaaatccatatagaaattcacatagcaaccaacaaaacaaactaaatcgcaaccaaaattcacatagcaacccgcgcagaaaccagcagagcaaccagcatagaaagtttagaaaccatcaaagcaacctaaatggtaaatttttttaaaaaagttaaaaaataatatatgtagtaatttctctaatcgttatgataatgttatttactactatatatattccaagatctatatatttaatttcgaatcttttattgatcagcgagcaaaatgttagcttgtacaataattttgtctctgtgataagactagactcattaatttattactcgaaatataagtacaatacgccaaatctaaataaactgccaaaattaaattgaaacaacagataaaaaaatacaatccaaataacttcaacaaaaaaccaaaccacccaattaatatattggatccaatcacccaatacgacttgaataaactgaacaaaccaattatatttttttagaaaaatattacatatatgttaaatggataaattattttatatttgaatttcaacttataaagctttatttgatattatattttatagttattaatgttgattaatattaaaattcaatatttaaaatttagtacattaatatttctatttttattttttaaagatgaatgttgtttaatattttgatattaagtcaattaatattctcacttttaaattatactaggtgatt

SEQ ID NO: 134181 - DNA, 992 bp, Cannabis sativa
caaatgtcgtttttaccttttaaaaaatatatagataattgtattaaaaatgataaaatagtatttttaatatttatttttttcaatattcatggtattattgccttttctttttctccttaaaaatcacaatgtatgtcattgttaattaagaactactatactatgatagacaaatgcagtgtacagccatgaataaagaaagaaagatatgcaattaatgtttgtattggtaacgaagaaaattgttatgtagttatttatttatttattctggttattttattttattgtggagagtttttccttttttgagaaataattactagagagtcagaatagaaaaagcttgttgaaattttgaaatgacgtcatcgttatcttgtgaggtggaaaatggataataataataataataatagtaattaggattgagcttcccgagagagagatgaggaaatcgccgcattatggcgggtcccgttctttccttccattttttgtatttatttatttttgattaaagagaaagacagacacgtcacgtttcatcgctccaatccaacaccaacaatccctccacattttggatatagtagtaactaatcttattaataagtttaattcaactatactctatcaccccatttaactcaataatatatattgagtaaatactattttaaactttatattttgtaaaaattattgaatagaccatctgttttattaaatgacaaattagatcatgtattttttaaaatagtactaaataatatcttaaattaattttttttattaaaataaaacttaataataacttgatgtagatagattataacaaaaatagttacattttctgcattaatttgttcgtgtcaagaattttttacaattagttatattaaaataaaaaattattaaaaaccgagctcagagtcctatttatatcattttacataatttactttgtcatttaacaaaacagataa

SEQ ID NO: 134182 - DNA, 894 bp, Cannabis sativa
gaagcctattcttgacaataaaccttaattatctaaaggggcatataatgataaataaatccttaatcattttctaatttccataataaaatcaagcagtcattataataattcccctgtgaaaaggattttatcattgaaatataacttgaacaacttcaaatactgagacctcatatcagactccaattcccaggtggcttcctctccaccagattgcttctcaagagtaccttaatcaatgctttggtcttgttccaaataacattatatttcttatcaaggatttacattggtttctccttatcaaataagtttggttagagctttagggcttcataactcaagaaatgagttggccctgaaatgtattttcttaacattgaaacataaaatatgttgtgtactactaacaatgttagaggcaaggctagagggcaagctaccaatccaaacttctcgataactttggaaggcttagtgaatctagggcacaacttgcccttttttcacaaaacatttaaccccattcactagggatacccataggaggacaagatctcctacctaaaattccatatttttacatttcgaatctgcataacttttctacctactctgagaagcaagtattctggccttgattttctctatagcctcattggtccgctgaactgattctagacctatttattttctttctcatgtctcatcccagcgaattaaagattgacattttttgtcatacaaaaactcataccatccctatactttgataactattattgtatgaaaaatctattaattagggctgagtatcggtcagtttggtcaagttttttctatattaaaatccaaaattctgttttcggtttggattggtgcaatccgaaa

SEQ ID NO: 134183 - DNA, 622 bp, Cannabis sativa
aattagtacaatatttgaaatatttgaaaaaaaatttgaaaaaaaaaaaaaagtaaaaatgatagactttaaagaagtgggtaaaaataaacgaagacaatataaaaaagggtatagaatgtaattttggtaagtgatgaaaattagaaagtggcggcaggcgcagccttaatttgctcacgtaagcattaccaccgaattggaacccaaaataatataaatacactttattttattatatttattttgcatagattaaatatagtaaattatactctttttcttatttttttcctccttatattctaaaaatatataataaaacatattttaaatattaacataaaaaagtaaaaacaaaaaaaatatttaaaatgttaatgtaaattttaaaattaaagttgatttcttttcaatatgtccatcgaacttcacctacgaataatcaaataaaaattaatagggaaattactttatatattatttttttaattttttttttaaatttatgatttggatttctaaagtggtttcttcggaggtttttattatgtgggatgctatatgattttttgttacaatttaggttattcgctaattgcaataggaatttctatgtaga

SEQ ID NO: 134184 - DNA, 977 bp, Cannabis sativa
tctccatgcctcggggaggagctccaactcgaagctcatctaaaaattccaatcaatactctgctttggacaccaatgttagatcctattcagatgaagcaagaaatccttactacctttctaatagtgatcatcctggacttagtttagttccaaaaatactcactagttgtgagagttacagctcgtggcgtcgagctatgatagtcgcacttgttgcaaggaataaactcaaatttgtgaatggaaaactttcattcgatgaagattttgagctttggaattgttgcaatagcactgttatttcatggattcttcatgcgatctccaatgaaatagttgaaagtgtcatgtatatgtatgatgcaactcagatcttgttgaatcttgaggagcgattcaatcaaaagaatgctcctagagtttttgaagctattcgaacaaaatagtctcttgcatagggatctaatagtgtcaccaactatttcactagacttaagtctccatgggatctaattcaggagtatcggccacaacctatatgcacctgtggagctatgaagacaatccaaggatattaggaagaagacagagttcttaaattcttggtttgtctaaatgagtcctacagtggtactcgatctcaaatcttaatgcaagatcctttgcctaacatcaacaaattctatgcatcggtatttcaagaacagagtcaaaggtgtttgtcgattgttccagctgagaatgacaataatggagttggatctagatctggaactggttcgaattcaggacagtttgctgggaatgttgagcctcatcatcctaaaatggtttgcactcactgtggtatcacaggccacaccatggcaaaatgtttttgtaacaccctaactagcataggcgtgttagcgtgatttttaacgtactatgcagctcgttgctaatcaacgaggttatttggaaaacgtgaataa

SEQ ID NO: 134185 - DNA, 673 bp, Cannabis sativa
cccgttgaaccccgtgagctgtgaactactgggcaaaaggtccctgttcgtgagcccgatggccatgaaagattctttaaataatagattcacgaagcttccgttatccaccaatatcctagccacaaccttattggcgataggagtttctttgactaaagggtcatggtgggagaaaagtattgacttcgcgtcttctttcgtaaatgtaataggttggtccatgagcctaggcctttgtgctgggagttgagtgacctcccatacttcatcgtgttttagggccccagcgtaacatgttaactcattcctggtggttcctccgatatgaggcccgccagagatcatggcaactctcctatttgactggggtagaaatccgagtgcctactgaggaggtgcccatccgggaggtacttgtccctcgagcatacccctagcccgtccttgaggtaatgggactcctgctggggctgggtttaagtgcggtaacctatttttgatccactcatacaaatgacccaatcgaattaggttctcaattttatctttcaagtttttccactcgtttttggtgtggccaatgtcattgtgatagtcacatcttttgttggggtctctccgggagtattctctatacaagggtggaggttttcggtaatgtgtatttttc

SEQ ID NO: 134186 - DNA, 727 bp, Cannabis sativa
aaaaagaaaatctcattaaagtttcaacatcataacatatatactaatcatcaacttattattgtctcttaaaaaataatataatatataaattgataactttataatatatatagtgcactgcaatttgaatcataattattaaatttaaaactgatgaacactcctaattcaaaatagcccccacgattgacgaagaagaagcgcgagtaagtgtgagagggagaaacaaattattaaaaaataaataaagagggagaagcaatttaagccttcaaattcaaatttgaatagaacctcagaatcagagaagtaaagtaggaaggaaaatgaagaagaaaggccgtggccgtggtcctactcctactcctactgccacgcgaccccgaactcgcactcgcaaacattccgccatggagtttctcgaaacgccattgacgacggcttccactcccaaccaatctccccactcacccgttttcaggaccaccactaagaagcgccagaaatccatggccgctgcttctcctatatcccctccctttacttcgccctttcatcctcccaagaccttgtcctccatcttcgatctcaaggatatggtggcctcgcgcctcgacgatttcaaaaaatgcatcgaacgatcgcactctgatatcttcaacgaccttgatgctttctattatcgcctacataagcgcttcaaggtctctctctctctctctct

SEQ ID NO: 134187 - DNA, 634 bp, Cannabis sativa
ataaataaataaaaattgtctttttttgggagcttttatgtatgaatcagattttggggtcttgtgttcattgagccctaagcacgggctcagcttgccttatagcttagggttggttttctgtatgtgttgcctcccacattattcatatgtactactttatgaggcttatatgtattagtcttagctaccaagtcttattctgatgataaaattttagtaattaggtaaatgttatattggatgtgattaaataaatcaatccaatatataagaatcaaattgggccttgggttaggccgtttgggtgagcccttagtacgggcttagcttgccgtagcctaagagtgggcttgtgcatgtgtgttatctcccacattatccatacttgagcaatttgtcaggtttataattatattagttttagctaccgagtcttaattcgataaagttttaattattacaaaaatattatatttaatgcgattaaatcaatccaatatatatgatatttatgtaattttcaaatgtatggtgcttgcagattttaacaaatggactatatcctagcattgagcacagagttgtagtaaaccctaagcaggaaaggctctcaattgctacatttcttaat

SEQ ID NO: 134188 - DNA, 852 bp, Cannabis sativa
tattaacaatcaattcacaattaataaccttttaactgaggaatataaaaaatcaaaaattttcaataattggcattaaattttaatgtttgtagagatagtaaaatattatttaatgccaattactatccactaatattgccaataccgggctctctctctgttttttttctttgaggaaagaataaattattttgtttatttctcacttttgaaaccctaaaaaaaaatgaaagaaatgaaattgtaatcataaaggcccattaaaaacaatcaatatatagaaatttaaaatctaatcggtccattaatgtatatatggaaagtgaaaaatataaataaataaattaagattaaatcaaaaaaaattagaagtggagagattaggagataatgacatttagggtgccatgtggaatcctttgggcattcctttatatatatattgattgattgattgattgatgattagaattaatttgatggttttaattcttttcttcattacaattagtgcaattgttgttacaatcaaagtagaaaatacttaatataaaatttagtgtacgtctctcctaggtagttttttgctaatatatatctatatatacattcaattcgaaagtcctgtgagtttttttggattctgatgcattcaacttttttttttcttttcgtttctttcgtcgagaatgcttttttgcattctattcattattatgtttattattattattattattatatataatatttttaagtaataatagtttagaaatttattaaggatatataatattttagttaaattaattgaaacaaaatattgccaaagtgatctcttttgtgtag

SEQ ID NO: 134189 - DNA, 733 bp, Cannabis sativa
tcaagtcatctctaagatgaagcaatttaaactcaagctcaaagagattaataaggagggtttccatgacttacatgttgttgtgtctagatctaagctggaattagatgcccttcaacatcagattcaccaaaatccgttagattctcagctgcattcacaggaaaaagaggctagagagaagttaattaagtctcaaagtgattatgcatccttccttcaacagaaagctaaatcttcttggttacaaagtggggattgtaacacagcccttttccatgcttgtatcaaacagagacagaggcaaaataggatcctatccattgagaagcttgatgggagtagggtcaatgacccttctaagataacagaagctttcttggaattctataataaattgcttggcaccagaattgaaaatagaaggaagatagagactagcgtcttggctaggggccccactctcactcttgatcatgtcaatgtgcttactcaaaaatttacaattgaagatgtgaagaaagctgtatttagcatccctgggaacaagtcccctgtacctgattgatactcaagcagcttctttcaagctaattgggagtacattggaggtgatatcagtgcggctgtgctttcatttttggaatcaggcaacattcttatagagattaattcaactataattaccttggttccaaagtgtaaatgccctaactctgttaaggattttaga

SEQ ID NO: 134190 - DNA, 886 bp, Cannabis sativa
acaggttttcatcgaacctcatttgctcaatgacaaggagagttgggagctgtttcagaacaagtactcccatattggaacagatccatcaggtaacattcatatcactctttctaattcaatgatcataatatttcttttatctttgctaccatttgtagatgttcctattgtgctaaacaaagatatctttaactattctatttcatattagttcttcttttcatctatacaaaaatatgcatgtagcattagtgagcctctacaattaatgttccattacttaaatcataattctttttgttcattttcaccggatatataaattcagactcaaatgatgatgaagaaaggaagaaagaactagctgtagagatgcttaagaagtgctctggtctaccattagccatcattgtgcttgctggacttctatctaagaaacataccatacatgattgggagctgataaaacgaaatgtaactcgttgcataggtcaaggtgatcaacaacatgatgttgactcgagataccgtagtgttttgtgggtgttaggtttgagttacagtgagttaccatctcacttaaagccttgttttttgtacttggctcgttacgctgaagatgtcacaataagagtaaaagagttatgtcaaatactcatagcagaaggttttatatcatcacaagaaagtgtaatagaaactttagaggatgtggcatatgattggttaagtgagttggtggagaggagtatgattcaggtaaaaaaaatgagttcaacaggaagaaggataaaatcatttggcgttcatgatctcatgcgagacttgtgtctgtctaaagctcaagatgaaaactttctgcattttattgattggaggaata

SEQ ID NO: 134191 - DNA, 558 bp, Cannabis sativa
tagaaaaattaatggaataaatgaaaaataattcaaatcaatatttgtaatatgttgtttattgaaattgtttggaaatgaaattataatcatttatcttgtttacttttttaaaaaatgtaatcagaatgtttaaattgattaaattacaaattttggttaaaatataatatttgatagatattttataaaatatatttgaaaggaaaaaattattgaatataattttaaaaaataaaatataaataaataaaaatcattatggcattcctttgacaaataataggagaaatattctctttcttttatcttttatttaattaaaagttctcctattcctaaattgttaattttgataaattaaagtaaataaatgtaaataaaggactactttatcattattttctatcattttttttttttgaaaaatgaatgtattattaaacgacactaggcaaatctgctattaaagaagcagcagcacagtttggtaacaaatcagtccacatctcggacttttgagtcaaacgactccacttagctaaactattagcaact

SEQ ID NO: 134192 - DNA, 1241 bp, Cannabis sativa
  modified_base (1187)..(1189): a, c, t, g, unknown or other
taactaataatatttttttaaaatttttaattgtattactttttaataactttttaataacttaaaaaaaaaaactagcataaaatttagtatacatatataaaaactagcacgtaaatttttgctagtatatatatatctataaaggagaagtatgaggcggtgacgtggcggtctaaaatctctctaaaactattattcttttttctccttaattctctccattttttaatattttattattattttacaaattaatattttactatttatataatatcaataccacacgttttttttattaatataaatacccttccggaactacttcaattaaaaaatatctaatatcataatattaaacataattcaaattcaaaaatatcattattaataataaattaatttcagcatataaatgtaccattaagaatcacactccaagcctaattcgttttccagtctcattctctcggtggcttgtaacttatttttgtttgtatatattttctctctctcaatatggagaaattgtttatgtgatgtatgtgcattgacattcatcaatagaatagaagaccttgtagaagcttgtaagcatgaagtaattatttttccttaacattcaaattttttgttttgtttttttttttttttgacaagaaattctaagtacatgcttaaaatagtaaagcttataagttgaagctagcttctatacctgaaagtaattaattttccttattcagtttttatgtttcttttttcaatttaagttcatcaaatagttatatttgatattattaaaaagaattcggacgagttaaaaatagaggtaacggatgtaatctaaggtgatttttctttttctttgttgcgtaaattattttactatggataaaaaaattattaatttgtattatttttttacttctaatttttttgcagcaaatcatcttattaattctcaaagccataaaaaattatatttgtttttgaacaaaaataatacttaaagcataaatttacaaattgatattttactatcatataatatttttttctataaaaaaaaagcataaatttataaattgatattttactattattttaatttttaataaaaacataaaacattttaaaaaaaagttcgaaaataaaaaataaatttcaaaaaaatattaaannntaaatcaaatataattaatcgtaaatttcgtttatatacatacataaaatat

SEQ ID NO: 134193 - DNA, 748 bp, Cannabis sativa
  modified_base (712)..(722): a, c, t, g, unknown or other
taaataaaatcaaaaaatcgtaaaattgtttaaaatttcgtaaaaccgtatttttataaattttttattatttttgtatatttgtgaaataatccctataatttttaaaaagcccatagttatttttttttagaaaattattgctttttattggtaaaatttttaaattttacttttaaagttatatatatatatatatttgcggtgttctataaagttgcaagaatacaataaaaaaaccacataaaagtaacatgaaaacaacaacataaataatatacaaacaacaaaaaatcaacaacaaaatacaagagtacaatataaaaatacattaaagaccgtattttataaaaataaaattttaaaaaccgtaaacaaatgtttaaaattccatacaactatatttttgtaattgttttattgtttttgtattttcttttaaattatcctttttttctgacaaagttgaacttgatagttatgttttttttataagaaactagagatgcacacaggacagagaattggcagggagtgctcccctgtccccatcatcgttaaggattttaatccgtatccctacttattctccatcggggatggggcggggaatcccctaatgagggcgaggacgggataggaaatcccctaataaaaaaaaataaattttttaataaaaatttaaatatataaaaatattaaactacataannnnnnnnnnnttacacattaattattattcaataaa

SEQ ID NO: 134194 - DNA, 692 bp, Cannabis sativa
tagcagcttaccaaccaaatttgtgtgtcagtgcaagcttttgtccctcaattgcattgctttaacaaggattaggagggttattactattagtttcctttcctacatcttttttatttttttttttttttttctgaaggtgcacaaagtttgttattttgttttctgggaacccatgaattaaaagaactgcagactaaatattcaatcattttaaacaacgggcctataataatttagtgctattgctagaattatttaatagaattagttgtttccagtagatgaagttcatcaactgctcatgtaatattgtaaatttaaatgatacataaaagattaaactgtttcggatgataaatcatgacatcagtggaacctctttatcaagtataaaataagattcaattatatgttctcatctctataagtgtgtccatgtgtgccgcacacaatatacttttttagcttttacgcttggtcaatgttttctctaagctccctaggaaggacttctttattggttattcattggcattgatttacatagttatatttttagcatgggtcaagataacatgctgtcccgttagttgtgatcttgaactttatgtatatgagcagctattagatttttctttttctttaattttctccatttgactttttattcaatacttacgttgcttgct

SEQ ID NO: 134195 - DNA, 652 bp, Cannabis sativa
gtcttcttgtgtacctgctaaggtaaaatattttgtctggcatgtgctttccaactctatacctgtgctgttgaactttgtattatacatataattccttcccccatatgtcctctctgccacacaaagctagaaacagtaactcatgcttttcttgaatattctagatcaaaaactgcttggaagcactcacccttccataattattttactgaaaaaaattacttaatattattgcttttatcactaaggcttttgaaacctttgatgtgtgttggctcgtcttttacgtttcctttggatgctttgtaatcaacgaaataatagttttcatcataaaaagtgattacctccaatgttttatatgatcatgcaacaacttatttacaggatttttacaaatctcaaccgatggcaaccaaaagtagagggcaaccacaacctacagatagacagcctactcaacgtaggatcggcatgttcaaagttaatactgatgctgccttagacaatatcttgaagaagcatagcttgggaattgtgaaacaagatggatatggtgaattgattgcaggcataattactcctatatcaggtaatgtgccaccagaggttacagaggctaaggcccttcttttggccctgcaatgga

SEQ ID NO: 134196 - DNA, 901 bp, Cannabis sativa
gagttgaaaagtgaagagaaagtgcagggttcgaaaaacaaagtgaagattgagtttgctgacatagaggatgaacttaattactggcaaccatcccttgtttgctatgtaattggagcaaatcctcctatcaacattcttgatggcttcgtgaggcgtatatggaaggattctatggtgaaagttgggctgttggctaaggggattttcatcatcagattccaaaacatggaactaagggataaagtgatgcagcaaggatatgtattctttgataggaaacccatggtgatgaaaccatggaatcctattgatgatttcaccaaggaagcagtcacctatgtccctacatggattcaactgaaaggcttggatatcaagtattggggagaaacttctctcttcaaaattgttagccaaattggggacccgttgcaagtggataatattacaaagaacagagaccgacttcaatatccaaggattcttgttcaggttagtctttcacaggaatttcctagctcgatttccttcactgatgaatttgatcatgacattgatttggaagttaaatatgaatggatccctctggtgtgctatcattgtgctggtattggtcatgagacaagtaattgctagaaaaaagaggtagtagaggagaaagagaagcaggtgtgggttccaaaacaaaaacaaagtaaggagaaggaagggattgaagaagatgggtttcagaaagtagttaaagggaaaaaagtgattgtggatgaggttgtggtcacaacttaagtgaggaatatgttcgattctcttacagagcacatttacattggaggggggggggagatccctctacttccaatggataggctgctatgttggaatgttagggggattaaca

SEQ ID NO: 134197 - DNA, 744 bp, Cannabis sativa
aaaaaaaaaaaaagtgggtaaaaatggatgaaaatgaagaaattgggggaagaaaggggtggttgggcgagggtttcatgggtttgagaggaagaagggttgttggctattttagggtttaaggaagacgatagctggagatggttatataaagacatatggagtcggttattacaaaataaccgatgccatatgtattttttattaatattaaaaaatcacctacgaagtcggttattacaaagtaaccaactccgtagtattttttttattaagataaaaaaaattattacctatggagccaattattacaaaataaccgactctataagtaattttattaaaattttattaatttgttgaaaaaacccgcttctaaaagtttattttgtagtagtgtgactctttagtaaaattaatgaaataattatttaattcatgatgttattaatttggaatttattttcacttatgtaaactttttttagggatatttatatcttttcaatgttaaacttttatattcaattttttttttcggtattaatacattttttttttttgaaagaagcgttcatatcataaataaaatcaaacgttagacctctcggtcgttacatagtatattgtcaggtaaagaggacaccgggatagtcccaaacacctgatgagcaaacgcccatctagccacattatgagcggcaaaattacaagttctaggaatataagagaaattacaactaa

SEQ ID NO: 134198 - DNA, 567 bp, Cannabis sativa
gtccagatctgggttcgagcctaggtctaggtttgggtccgagtcccgagttcttatctaggtctgggttctgaggcctaggtccagtcccccatccaggtctggatccatgtttggttttgggtcctagtcccagtttttattttgattcagtgtctgggttcaggtttgagtccgggtctgggtcgtgttctgagtcttggtccgagtcatggtatggtctggatccaggttcggatcctaatctaggtctgggttcgggcctaggtctgagttcaggacccaggtgcaggtccaagtctaggtcttagttagggtctcgatccggatctatgtcttgagtttcaatcccagtctgggttcgtgtttgggttcgagtccaggttcgtatcctgatctatgtcttgattttcaatcccagtctgggtttggtctgggtccaagttcgggttcaaggtcacggtcctagtcttgttcaagggtcctggtctggtggttcttattccggttctagtttcaggttgcgggtctgactcagggttcgggttttggtcctagtctgagtcc

SEQ ID NO: 134199 - DNA, 1023 bp, Cannabis sativa
ttttttttttttttgtattattacaaaattcacattgaaatctatatagcaactaatgaaataacttaaattttaaaaaaatataaataaaaattacaaaaatacaattcgtataaaactttcaatatttttacggtttttttttatgtatttttatgttgtatacttattattttgttgtttatttttattatttgtatattattttttatgttattttgatatcgttttttgttacttttatttttttgtgtttttataaaataccgtaaaaatattaaaaaaaaaaaaaaactttgtacgtaagaaagtgaaattttacaaaaattagtgttttacgtaattattctatcttttagagtaaatcgtggataagtatctaaaattttaaatttataagtgatgtaaaatcaatatttatttttagcggtataagtaactcatataacacaaaatatagatcattgagtctagttatatttttgttataagttgttgtactcaaacaactctttttcaagctctatatataaagagccattatatattgtcaatttctcgaatcaataaatttttctctctctgaaactaatatgatatcagacgcatacaattgaagcttcaagaaatcaaattgcatctctaagattctttcaatagcgagaactcgagccaccactttagctaccaacactgataatgatcctccagtaatcgatgcacctctagttccgccacaatctcaaatttctacagatacttaagtttgaactgatcatgttcctctaattctcaatcctatcccaaatacttgtccagctacgattgatcatcctgcatataaggatattcgatcaccttacaacagaaacatatagtattcgtgacttctaaatgttcttttaataaatttaaaataaagtttttactgataaaactaaaagaaaattacaattttacatgcattaggtactcatgccgctaaaaataaatattaattttatgttgtttacaaacttaaaa

SEQ ID NO: 134200 - DNA, 511 bp, Cannabis sativa
cacattgtcctcaatgtgacataaagaaaaaacttacctgagcgccacatcaatatggcggtgataatgatggttgcaaagttcaactaggatatagtccacccattgcattcataagggcccttgtaccaaaagaagagaattgtcctccaacgctgcaaatttgaaagctatccctagaatgagagttaccttcacaattcccacacatcagtcttttgatatgtcatcgaaaagatcgaaatcgttatttggacttccctttctttttgttggtagttaattctcgaccaacctttactacttccactcgacaacaagtaggaatttcagttgcggcaaagaaaccaaagctgaacatcataggccggcagggttactacaaccattagcctttcctaagtggaagtgggaagaaattgcaatggatttcgtggttagtttgcatagaaccacgagaatgtatgattcggtatgggtcattttttgccagtaaagattacctacacag

SEQ ID NO: 134201 - DNA, 1147 bp, Cannabis sativa
tttttttttttgaaagaaagtatgccattaaatcataagtgggaataattttgatatttgtttttggaagattaataattttgatattgattggaatcatatagtcaatcttgatattttccactctcccacattgcaagctaggtaactaggtagtagtgttagatgattaattagtaaggtccattattttatacttcaactgcccaaaaaaatatttagtggttgaaatgtggaatttaaactgatgaaacaaaaacaaacgggtaggagacaaattagtgatgtggttgatcacgggtggataagttggataggaaaaggagaggagaattattataaagttaatttaaaaaggtggaagaaaaatgattcataaattttgaccccttatatttataactaataaaagtcataatcattgaagatttaattacatgccaccaatttcgatctaaggtaatgtgtaaaaatcttctagatgaacaaaaataattgtgatgatatacgattgagctaaactaaatagtaatagtaaaaaatacctttttaaaaatttgaagtatatacacctcataacattaatatcgtttaacaaaatgttaaagttataattatttttatataatagtaaatattgtactaaatttggcacaaaatttgttatatgctaaatttacatcactttttggcacactatttggagcgcacttttgttaaataagctatattttagcttttcaccacttatttacactttcattgaagatgctcttactataatgtaaaatttacaccacaataaatacactatttttttatttactattattattagtatatttaactatgacattattttatgaaacatttatattatatattttttattgtcttacatattaaaataataatatataaaattattataaagttattagtttttattttttttaataaaatattaattagatattaaattttacattaaaattttacaattgtgcattggagcaaaaaactaaaacttgatgtaaatttctcataaaattactttttgtgccaaatatagtataatttttaggggctttttcatttttataattcaaaacaatttttttttttacatttttacgaaattctacat

SEQ ID NO: 134202 - DNA, 590 bp, Cannabis sativa
atttttatgatttcgtttgaatcattgacgggagtctgagttctggtttttttatcaacttgcgacatatcacgacattgttcacgacgctttgagatatcgtcttaaaaatattgtggattttttatcaaagttgtttagcatattagcgatacattagcgatatattacagtagtgcctgggattctgtttcacgatgattagcgacacattgcgatatattttacaatgttcattttttttaatttttaacaaaattactaacaattttgcagatggctcctgaacttaaacttccagtttcccagcatttcacaggacgtcttacctatcagggtacaaataggtttatatatatcaaggccaagtttactcagcttgatttggttgatacagttcaggctagccctttcggacacttctgggaagctagagagttgactttctctggcgctttggtccacaacctcctcttacggaaaatgaaagtagatacagaataagaagatgaggattggtttcatgtagggagaaatgacatgagattcgaacggatagagtttggactcattactggcttacctatggg

SEQ ID NO: 134203 - DNA, 1227 bp, Cannabis sativa
tggagttaggatggtaattatatcggcggatttggctaccgcgagtacttgctcttaatgaggcgggggcagaggccgaattttggggtagaggcgaatatatgtttaaatgttcatacttgaagttgaattagaaatgggccctaggtgaaaatagataggatagaggaaattactctctatattttttcttttattttttttttattgttctcttttatttttactctcttttataaagtttattatttttaccttattatttaaatattataccaattttttattttcaaaatattttaggtacaatacatataaaaagatgtatgtttcaattaaatataaaattagagataaatttaattaattgattaataaaagtactatttttcaacttacgccaaatagatatgcccctgaaccctcccagatattatatatgtatatatttatattttaaaatcataactactataattaaaataacggctatgcatattaataatgacacttaattttcttaaaaaaatgacacttaaccacttattttttttttagggaaattaacttatatattattttttttaattttttttttcaaatttacggcttaagtttctaaagtggtttctgtggtgtttctacgtgggttgctatacgatttttagttgtgatttaggttgttctgctagttgcaatatggatttctatgtagaattccgtaaaaatatatatatataaaaaaaaactattttgaagtgtaaaaataaaaaacctctattttttattactatgtacactatgctatatatgcttattgttttaataaattattatgatggtttttttttttttaataattctctttgagaaatattttatttttcaaaaatatataaaatgagtatttgatgggaattcttttcttgacgggtaattcttgcgttgttcccgctttaattaaaacgggtattgaggcgaatagagagtgaatttaagaagcgggtatgcggtgagagagcaattcccgcccgtgcccccacaccgtttaaatccctaggagtactatagctagctagtccaaaaaaagctacaaatataatttccaggcaacgtacaaacactatacaaagggctcgtttggaacgtcatattaggtctattgtattgtattgtattatattaaattggattatatatcatatttttatataatactatgataaa

SEQ ID NO: 134204 - DNA, 955 bp, Cannabis sativa
  modified_base (843)..(852): a, c, t, g, unknown or other
tctccttggtgattccttgccaaacatacacattgcctctccctacctttacattgaggtggcaaaacctcaaagtctcaacaagaagaggcagtaaccaacaggaaacataattcgtaccttgaagcatacaagaataacttattcccattagcacctttcgtctcaagcccccataaagataggcatgacaccctatgaagaaaatctccaaaggtgaaatgcgaagttacaggtaagaaagaaagaaatataatgttcaatttaaatgtttaccaaacacttatagcacaatttttttagaaagcaacttttagttttttcaaaagttgtgccaaactagctttaggtgtataaaaataaaaaataagagaattttaccgacccccaaattatacctaaaaaattccacatattacataactaaaaagaatgagaaaaatacgagtaaatactattttagatcttgtatttgtagaagttaccgatcatactttttgtttagttaaatgataattcaaaccttgtatttttcaaaatagtacgcaataataccctgagctcaattattgtcattttttttaatataataaacctaaagtcagcatgaacaaatgcaaaaaatataatcagtctggtcatattactatttatataaataaatatatatgtagtattactaattaattacaagacatctgaattgctaagttcagtagtaatgctcttattagtacttgcaaatctttgtatttattttatgtaaaatatttgaccaataatgttttatgttgaccagtgtataatttttttcattgttgaatatgttaattccatttttgnnnnnnnnnnttgacaaaaatattttattattcattgtatattttcggctggtatacattaatatggtttcctatttggtgtattcaaacttgaaaggaaagttgtctagctt

SEQ ID NO: 134205 - DNA, 854 bp, Cannabis sativa
attgaatctttctcaattaaattatagagcacttaatataaaactaagtatacgtgcattgcacgtaattttttttagtatatatatatatgcttgtatatataaatatatatatatgcttgtataaattaggagaaaataaaagacaacacaactgtatcgatcatgacttagcagtttcccaacatatatatacatgtttacattaatttaaatcgaataaatcaaaggcaattaattgcaaaactctacaaaatcattcatttattttactctaaaaaaaaaacttattggtttttaagaaaccgatcaaacttaaaataacaaaattaaggaactaataattatgtaattagtagagaattctcttctatttataaaagtttattgtttatgttaaatttttttaattaaatataaagccctagtccatgatcgaatttcttcgattacacgttacttaattagtactaattaatatattcatgtcttctcaaatattccaaatatatatggtacaaaaaacacaattatgcttttactcccttaagtaaagggttttgttctttaagcatattatttatagggctaataagtaagttgcattttacagcatgaaaatatcaaataattgaagatccctacatatagtgttgagacaaagaaatataatttaactaataataattgatatgacagaggaattaattaatatatgagaaaataaatactttttaatataaatttacaatatatagggatatgattttgtcccgtgatgtacttttatggaatgtattctgtggtacattagatgagactcagagtacatacgtttctactttttaacccta

SEQ ID NO: 134206 - DNA, 769 bp, Cannabis sativa
tatatgaatcagccacctggttttgaagacaagacacaccccgattatgtatgcaagttaactaagagcttgtatggactgagacaagcacctagagcttggtttgacaagctcaaacaaactctcttaggctggaaatttacaaattcaagggctgattcatcactgtttttctacaaaacagccactgaggtaatgcttgttctcatctatgttgatgatataattgttactgggaacaattcgaaaatgctgaaacagttcacagagaagttaaatcgggaatttgctttgaaagaccttggtcctctaaattattttcttggtatcgaagtgtatagggatgatactggtatgtatctatctcaagccaaatacatcacagagctactaaggaagaataatatgactcatttgaagtcatgtcccactccaatgacagtgggaaaaacactgtctattgaagatggaactccactcaaaaatccaacagagtacagaagtttaatcggtggacttcaatatttgactcacaccagacccgatctcagcttcgctgtgaacaaactgagtcaatttttgaaagctccaactgatcaacattggaatgcagcaaagagaatccttaggtacttgaagggcacggttgatcatggtttgcacatcaagttctgtgaaaggctcactttgacaggtttctcagatgccgattgggcatgctgccccgatgacagaagatccgtggctggatactgtgttttctttggtg

SEQ ID NO: 134207 - DNA, 819 bp, Cannabis sativa
ttctatataatattaaatagataaatatattgatattgagatagagaaaaatggaaaaaaaagtatattactcaaatatataaattttaagcatttggtgaatcaaaatgcaaataaattttaccttgcatataggatcacctttaccttatctaggaaactagccaaaaatgctagtcattctcacaataatctaaagagaaaatatgagaagaaatagataaaataagactaaaatttactatagtttttccaatgaaaaattacaccccaaaaaaatgtcctcatacatttacaatgtctacctatttataagattatttcatatccaaaaagtaaagaagaaatatttagctgatattctaaataaattaaatgtaatcagctttaaacaccgaatatggtatttgattgtatggagtaattgtgttgcaatgtaggcattttgaaaaggttaactaatgataataaaacgcataaatgatggcatgcgtatgaaatactctcatataatacataatcctcaaatcattcaatttcatgcatgaggagaggaacaaattggtattactctctcatgttggcttagtagtgattcttggagagacagctagcaccaaagggtcaattccatcatctcgctttagcaacttgaagtgaaatagaaacaattgttgtgttgctacttcgtgggcttttctttgcaaaaataccaattttctatttctttctttgattcttccttttcacttgtactagagtgcaacataattcctgcaaaataaatcaaattaaagtagtgcggggaccatgggtcta

SEQ ID NO: 134208 - DNA, 883 bp, Cannabis sativa
atcaagataaccagaactttaataatcccacatattatacatggaacaaagaagacattatcaatcaaacccaaatgcaatatcaaaacaattgggcaagtacaaatttataccagataaatcatataataataaacaaatctaggataacatattgcttggtatagtatggtatattaggttgtagcatgcaaaacgaattctagtgaaaaaaaaaaacaaagtttctttagaatattcatgaggcagtaaatcaattaaaaatgagcttaatcattaaaattatataaggaaatcaatgtcatcaaattgcaagttcatctttacaaaaccatcgtctctttagaaaaccaaatagctccaatcagagcccccagtcgtcggcggtaaagatggaggcgaacctcccgctactggatcggaaaaacctcagccgcctcctctgccggaaaagtcgttgcctggggattgatgtggaagcgactgcgttcgtatgggatatttattacgatgaacttgaggattataacaagctttacaaaatggattcgagccccaattcgaagccttcgtgagaagaaatcaagattattttggttttttttactttgaaattcgttaaattaatgttttattttgtgtaaagattgaatttgaatatcaataaaaatgtcgaaaattctgtgaaccactgatttcaatttcccaatcttcgaattcgattgggactgtagttttcgaaagcccgttaacttcttattgggcctataggcccaggcgatctctgcttagttatggcgtagaccgacgaattcagtagagtagagaagaagacgaattctgtgctgtggtggagaagatatgcgttgttttgaggtatgtt

SEQ ID NO: 134209 - DNA, 855 bp, Cannabis sativa
tttaaggcacaaaacccaacaggtgctcctctgaagaggctctgctcaaatcctttaacatttcattacaatatgggcgatatttattgaagacattattatcagttgagccttttgttaagaaactatgaagctcttaatcatgttgctctgttataataattgcataattgttattatttacaccagttgatacttttcttattttatatcttctttttttgtcaggtgtaatataatagaattgatgagtcaacccctaaagatttcttttttgaatattctaatgtgtattgatacttattgccctactaaaaatagaaagagatatctcagcaccatttgtactgattttcattttctatagcaatactaacatttcttacttggtatcagagttgtaggcctacactaaaagaaagatgtcgattcatggtcagacaccaagcagagacgaagataggctgtaggaaatcactcagtaccattagggcccatttggtacgcaggactggattggattagacaggttaatttgtccaatccagtgtttggacatgttagaagtctggataactaatctagctaatatcatctatctgggattatttatcccatccagcagggtgggataaataatcccatgcaagaaagattttttttttttatcattttttaattttaattttattaatatattttaaatttaataagaatttaaatgaaaacattatcacacatttatttatacgtttttttatcaaaaacttattcattaaaattagtgaaatgtataattttaaattattatacataagttttctaaattttaaatattattaattaaacaatagt

SEQ ID NO: 134210 - DNA, 591 bp, Cannabis sativa
aattgatgctgtgaaaaagtgctttagcttccatttcatctgatcgaaaacatccttgaaccggttttgataaggcagttattacatgcccttgatgattctgcacaatagcacctattcccaaaactttttttttctgaatttaatgctacaacaacatttaatttcagtccaagtgggtctggtggtctccatgttgtatcaaaaggatgctgtgcaggacttgattcatgaggtgtatgctaaatatgttcattcgatgaactaagttgaagagaagtatgtttgatatcatctgtagcttgcttatatttgtcccgatagttgctggcaaatgtaagtgtgagaaaaccttctcttttttgtccaccatgtaagaccttatttctttcaccccagatggcccacattatgcaaataagcaattcaaagtctggtttaggatataggttggataagtggataaggtaatcaccattatacatatttcgggcgttgtgaaagtctatagtgaaccttgatttcttccaaaccgaccttgctatatggcatgtacacaaagcatggcctatagattcccaagcattagag

SEQ ID NO: 134211 - DNA, 924 bp, Cannabis sativa
tggtaaaatatttccaacaactatcacattggtatgattagagtatcaagtataggctaatattatggtcaatcgcactattgtacaaatgtttaagacctagcacacattggacacgagatacgattatgattgggtgtatggcgcctgattataatcatgtttatgtttatgttatgtttatgctttttttactcagtatatcgactcacatatattatttatatgtgtaggtaaaggcaatgaaaaggctaaacaacattgaggtcgggctagatgaagattgtacatagcgaggcgattaaacttggactgttcagatcttcaagacagttatgcttttattttgatagtcgctaagcgaaaacttttgtaaattttgtatttttgaaaactaatgtactttgtaaaagggatcgcgaaatatgttttgtatttgtgtattaaattttaagtttattatgaaaattttaattatttacgttttcctttaaattcttttattagcaaaggagcacacagaaacttgaaaacacaataacatgcctaaagtagtagggcatttacacttacggtggccctttaatattttcttgtgtttttataatatatttccctttatagaaggaatttctagtgttcgtcctcctattctcagtgattctaactatatgtattggaaggttagaatgaggacactcattaattccatagatgaaatgcatggagatcaattcttttaggttggtctcatcccgttgtgatatattccaaaggtaatagaaagttaaaatttgaacttgaatagtctaatgaagatgataagttatttgcttacaataataatgttgggattttatgccctaaataaaacccgttacaatctaatttgatttgtcaacaataaaaagattagaaatcatt

SEQ ID NO: 134212 - DNA, 765 bp, Cannabis sativa
gatctctacacaggcctcattcccttcatcatcagaggatcccatttcctgaagccgagatctatttcacagcctcagggaatttctcaacactggagagaggctaaggtaaagatctcctgggacaggttagggtcttgagttgactggtttctttgacagaaaccacgcaaacttccttcccaaatccacctaaaaccatgtcgatcttcctctggaattcttcaccagcctgaggaggatctttgagattgctcacaagatctataccctctgggatcacttgtgaggatcagccatggcaggtcacggggttcccttggtttggatttgtcggaagctcctcaggcctggaatccatcatttccagctctagttaaggctcaaaatctgtaggaacggatggaaattggttggtgcatctgggtattataagtttggaaagataaacttctgaactcagaagagacattttggcaggaagaaagtaatccattctaaaaatggatttcactaaagccagaagggtcgtgaaaaagcttgagccgcccttttatacacaaagttcaatgataagaaagccaaagattgagaaatctaacggctgggaatcatgcagaatatgaataggcgatttataatgatcttcgaaaccatacaaccgtcagaagcaaaggaggcgtcctttccaagaaaagattttggcaaaaatgccctctgtaattattaaaaagctctttttactaaaaaagaactttttaaggg

SEQ ID NO: 134213 - DNA, 1402 bp, Cannabis sativa
tttgacggggactaagaaatagtagttatacgtagtaagttttgtgcaaatagttgcatattagttttagggaaatttgcgtcataaacattatatgtttttaattttatacacttaaatactatatctttttttttggcagatttaataccaaacgttgtattgtaagcctctccgttactactactctgttagttgtgactagatgtacacgtgtaaggcccagattaaatccttagtttttttaaatttttaattaaaattaaaaacttaacttttttaatctaatatatctaacttaaatttaatttccataaatttttttgatgaattaaaataaaaaaaataaaaaaggaaatgaagccccaaataacctaaatttcatcctatcttcttcctattgctttcttccaccaaaaagaaaaataaaaaaaaaattacttctaatcgcagtaacaccagcacagccgcctctgatgaatccgggaacaaacgccatcgccggtggtgttcagaaaagttcgagtaatgaggcgaagactggaggaagagattgtggagatccggcgatctcgatgtgtctgcctccgaagcttggacagttctatgatttcttttctttctctcatctcacgcctcctcttcactgtgagttgagaagttgtttatgattgattctttttaggtggcgtacgaagtgtttgtggaaatggttgtgaatgtgttttttgatttgatgttttgtgttgtttgttgtggtagatattcgaaggtctaatcgtccatttcatgaggatacgacagacgatgactttctcttgccttgacattgtgatttggccattgctctgtgcaggttacttttattcaccaaggggagaagatgaaggaaatggaatttggggttggtttctgggtttagttttgagtttgaatgcctgtaattttttttttttgggtggaagaagctagcaggaagaacataggatgagatttagggttatttggggcttcatttcctttttaatttttttttttaattttaattcattaaataattttatggaaattaaatttaaaatagatatattagattaaaaagttaagtttttaattttaactaaaaattaaaaaaaaaaatggggatttaatctgggccttacacgtgtacacctagtcacaactaacagaatagtagtaacggagaggtctaaaatacaacgtttagtattaaatccgccaaaaaaaaagatatagtatttaagtgtataaaattgaaaacatatggtatttatgccgcaaattgcccttagttttataatgaaataacatatgcaagtagtaaaactataataaaactacaaaataaatgtatacaaactaaaatacaggaaaaactctt

SEQ ID NO: 134214 - DNA, 2065 bp, Cannabis sativa
tgtgtagattgttgtaatgtatctaaagggaatattacaatgattaaggaccatgtgtatttacgaggtttcaatagaagttatactacctggtattggcgttgcgaacatttagctaatgatccatccatttggaaagcagggggtagatgctatcaagggtaatgataattatatagattacttgttatatatatagctaactttaaattttatttgttaatggtgtagatatggccaactaaggttgaagatcagattcagacccagaggcagagtgtcctaggctgatgcctacacgagaagctactcaaatgaatgaaatatccaagctaatggatcaaggaaaaagagtggcccttgaggtgaatgacaaaggacaatactgcgacaaaagctactccaagctcgtatcgactttaatagttagatgtcgtcagacgatagggttgtcctataaaaatttgaaagaagtcaaccctacactaaaaaataaagtttggacaaatatacaggtaagctgttatttgttagaatttttatttgtttttgattaattcagatgttaactctaattgtatttgttttccttcaaactagacgggtttcattgtgccaaattctttcaaacatgattgtctgatccttggtgggaagttaatgaaacaattcaagaataggatgagaaacgatattataatgcctggaatgaaagagaaggatgggcaacaactggcacaagtccttaagaagcatcccgaaatcgaccttacagattggttaaaatttgttgaaagttgactaactcttaaatcttaggtatgctaattatatttttactaagataaactcttgaatacaagtacatgtatctaatttatttttttggaattgtaggaattgattaaggtgcaaagggaacgttcctcgaaaaatccaatcgagacatcgaagtggtcggagtggaatggtgaacgtatgagaagctgtggtaagtaatgtttgaattctaataatgtgctttaaaatgtaatttgtactcatttatttattataaaataatgtggaaaaatgatcttgatattcaagatgccccacaccaccgtgtttggatcaaatctcggaccaagagaacaaaacttgtcactaattatgacaagaaaatttccaagaagatagtaagtatatattaatccttaattgagttctacaaatgagttagtttatataattcacatactaattgcttgaatatatccgtgcatacgcctcaattagaggagcagcttactaagggacaaattcaagtacagggccaaaataatatcctgacgcaggcgctcgggacactagagcatcctggatgtggcaaggctgctgggtatgctagtacttgaaatattgtttatttagttataaaaaaaaatcgtatctaatttacattttatgatttgcaggttcttgaccagggcatctaaactgttcggcaggaagaaaagggaagtgcctgatgttgttgctcgaccacagaaggagattaaaaaattaaaagtcaaactccaatcccttgaacagaagaaaaacactgccaaacaagaggaagaaggagagctagctggtgaggtgtgtgttccactaccataggctcgtgaggttgatgttcaaccacaaacctatgctgaggagtatgtttccctcaacaagccagctctcctatacagtttcaatgaccattcggcccttgatcaacaagtatacctatgctctgacaacatcgacaacattatggcccgagcatatctgtaagagcttgttggtaaaatcattgttcactgcacgtgctacgatgattcacatgtctcggttctaatttcagaaatgttgcaagaggatgttgaaatcccaatctaaattgaagggtacagatatgttagggacgtaccaaacatgttctttccttggcccaaacacttaattgtaacatcgaggtaacttctcttataaattaattattaatgattagtggagtttgaatatctttaatattcaaccatagtgaagtagg

SEQ ID NO: 134215 - DNA, 1871 bp, Cannabis sativa
gtcggcctgtacgcttgagttctgaactaaggtaagaaacgttgtaagcaccatatgtggctaagtattaatggttgaatggttatgaccttgattattatctagactttgattagatatttgttgagcctaggttatgacctagggatggaaatagttaataccgttacgagtaattactcttgacaagtgtgaagcaaattttcaagaattgaagcaatggttgatcacagcactggtgttagccttgccattagaccaagaaaagtttgtcgtttactgtgatgcatctagactgagtttgggatgtgttctgatgcaagctgatagggttatagcatatgcttcccagaagtggaaagaatatgaacaacgttatctaatgcatgatttagaacttgctactattctgttttttctaaagatatggcgacattatttgtatggagaaaaatacgagatctacatagaccacaagagcctcaagtatttcttctatcagaaggatttgaatatgaggtagaggctggcattagtcaacgattatgattgtgagatttgtatcatcccgagaaagccaatatcgtggcggacgctttgagcataaaaggttccaagcaggttttagcctcagaaatggttaaggctgaaattcaatttatggttcggaagttacataacctgacacttcaataaaatttgttggaaaggatcaaaaagacacaattggaagatcctatgttaattaaaattcgagatgaggtattagcgggtcaacctacggatttctcccattgtattcacgggggaagatgagaaaaacgtgaggtatcctcatgtcgatgcattggtgataaccattcaactcaccaataaaaggattaagagagtgttaatagataatgggagctcggtaaatatcctttataaggagactctaaagaaaatggggctcgaattaaggccttgtatggtaaacctttacggattcaccagaggcaacatagctaggcttggcacaattgagctcgcattaaccttaggcaaggcacctttatctgctaccgttgtgcaagacttcttagttgtcgacctgccctcggcttacaacatattattgggtcatccagcactgatcggattaggggccgtcagttctatcaagcacctatccttgaaattccaaacaccagatggcgtgggagtggtgcgtggtgaccagatgctggctcgcgattgctatcgcatagagctacaacatagaaaagtcggttatcaattgatggcgatcttggtagaagaaactgagcagaaagacgaagatcttgaccctcgagttcaagatgagagaaacctattgaaaccaatcgaggaattggaagaggtcattctcgacccaggaaatccagtaaagtgtgtatacgttgggaagaacctagacgagcagctcaaatagcagctaataagctttctgaaggtgaaccaggattagttttcctggagccatggagatatgatagggattgaccctaatattatataccattacttaaatgttgatccaaactaccttgcaaagagacagaaaaggaggccctttgattccgagaggcaaggggcactaacataggaagttgggaagttgttagccaacaactttatacatgaggtgttttatccctcgtggatagccaatcctgttctcgtcccgaagcccaacggaacgactgttttccacttcccatgatcgactagttagtggatgcaactgctaggcacgagcttatgtcatttatggaagcatattacggatattgtaacaccctaactaacgtaggcgtattacgtgattttttaaacatgttgtgcag

SEQ ID NO: 134216 - DNA, 635 bp, Cannabis sativa
tatatatatatattttaatatttttcttttaaggaaaaaaaaaatcatattaacattatagagggctgggtccgccactgtgaggaactaagttaaaaaatatttcttttattaatcaattaaccaaatttacttttaatatttttttttaattaaaacatatttttatatgtattgtactcaaaataccttgacataagggagtcacatggacagtatcttgaagtgacaggggtaaaattagtacgatattcaaaaaaataagtaaaaataatagactttaaaaaagaggataaaaataaaaaaagacaatataaaaatggtatagagtctaatttcctccccaaatatttagtagtacctattttcatttcttaataaagaaatgaaaaaataaaaacatgtaaacattgactcgtatattaggataatttatatatttttgtccattaaagtttttttttttgaataaattaatatttgaagtttaaaaagtctaaaattgactttcctattcgcaattaacaaagtagtgttaaattaaagaagtacaattttgcttagggatgacaattatactcgcgggtacgggggttgactaggcgggtatgggtttaaagatttatacccgagtt

SEQ ID NO: 134217 - DNA, 978 bp, Cannabis sativa
acacgattaaaactcaattaaaaatatactaaacttaatctaaaattaatactaaaaataacctaacagagacagagtatataagccatttttaagcctccccttgatcaagactctccctgttaatttgtccttaacaaaataacacttggagtgaaattctagaaaaatattattatctgcagtaagcttagacatactaattaggttcttggtaatttgaaggactttaaggacatttttaagatgtaaagaaccattagaagaagagagagaggagctaccaatgtgacttatggggagacgttttccaattccaatagccaaggtgtctgatccagagtatggatttttagattccagatattccacgccttgagcaatatggtttgttgctcttgtgtcagcgtaccagtcgtggtcatctgcaaattcttgaattgcagaactggaataggcttgaggatcttcttggtcatcaatctcagcaagataggcacgggtttcattgatcttgggtgtgatgaattttttgtcaaatctgtagtgacatactgctcgtgtgtgtccagatttgtgacaaacttggcacaggaggcatggaatagactggttgccacgaccataagatcgtccctgagatcgattagaagtgaagtttccacaaccttgaccagcataggaacgataactaggaccagagttggaatgagagttgtggacagtgagattggccattattttagatgaagaatcatttatggtgtagtgtctttccagcctgctttcatgggttagtaacatagattgaatggattctaaagatagaatatccacaagacttgtaacatgaaccaccacgggatcatattcagggcccaagccattcaacatatgcataatcaaatcattgtcatcaaggggatgaccaacagtggataaagaatcagcaagaagcttgactttatcatagtaatc

SEQ ID NO: 134218 - DNA, 625 bp, Cannabis sativa
aactcttcatttccaagtgagttttccacgttggaaatgagaaatgcgaacttatgaatttgacttctttgacttcatggatcttagttattgtgaacaactagatggatggttgaaacgaaatcagaatcaaataagcaaaacccagtgcaccaggcctttgtcaacttgggcactcggtaccattcctgagctctcgagatctcgttttgagacttccaaggtttctgaacttgaagacaaggtctcttacctcatttttgacaattttgaattcattggtcaaattagatttggcatttgagcaattaaaggaagcgccccaggttgattgtcaacctaggcgctgggcccaacactaggtcaacattggcactgggcctcgtttctaagggctcaaatttgtggttttctccctgagtttgcttgaatcttcattatttctgatgacgaattaatgccctgaacattttttgatgaacttgatcgggaacagaccagatggaaatatgtcaacctggcgttgggtcccagttttagcccttcaaaaattccttttggttctcagaaatagttgaatctcaatattttttcaaaacgaagaaaatgcttgaaagagttctca

SEQ ID NO: 134219 - DNA, 766 bp, Cannabis sativa
tttaatttagttttacttgtgtttggagcaatttttcgcttgttatcttttaattttacagatttaaaatagaagaagattagaaaaatattaacggaaaaagatgaaaaaagagataaaagatcgcataaaatatcattgtgcaaaatcaggatcctgcctagaaaaaaagatattacgcgtcgaacacgcggggaaaaaaaggcacacgagtcgcggcccgcctcttgaaaagcaacatcaagtgtgaaaatcacacacggtctacgacccatgaaggagggcaccgcggcctgcccctttgttgaagcagaaaaaagatttctcacgtgagcttggtgtggctttccaagctgaataggattttcagcatgtgcatttttctatcttcttagtccctgaatggttatataaggagtggacttcagttgatttcgataagcaattgagaaggaaattaaaggaaaaaaaaggagtacgaatttcaaggaccgagtttaatactagaggcattcgtcaatgggttttcaacattctcttcttctctattttcttctattttcttcagttaatatgtatgattttacttccataaacatgagtagctaaacacttaattagggtctagatggatatttgtttgacattgttttatggttctaatatgattttgttttcccacaatttctatgtattctatttcgttcttacttaattacttttaattgcctgattaccaattaactgtctatgattttgatgcgag

SEQ ID NO: 134220 - DNA, 571 bp, Cannabis sativa
agtgtttttcgaaacaaaaaaattatttatcttcactgttggagcttaaattattatagatagatttttacactcttctagaataattgctccacccccagagaaaccaccatctcgcattggttatgagttggtgtacatataaggattctaatataacgccaattatctaacatataggagtctggttaaacttgtatatagaagtacatttaacctcttactattgtttttgagggatatcttgttgtgacatattatcttagtctgaaactgtaaataccttctagactaagtttgaacataaaaatctagtatttatattaatataaaatacttgcttaagattaattaatcattagacataccatgaaatattttatgaggattaggaaattcgcctaagtccttcgaataagctatgcaaaatcctactatcttatcctcaaaatttgataagttatttctctccatatgaatggttagatttactttctcagttgaattctaaagttcctatcacaagtgtaatccaaatgaagatggtcttagaattttaaaattctcccac

SEQ ID NO: 134221 - DNA, 1561 bp, Cannabis sativa
ccatcgcattttccgttgtcgccgggcaaaaattacatatttcacatataagtcaaataatacccctagagtttaataaaatctcctgaatcgagaaattataactctaatactcgtttctaatattagggtccacaaatacttaaattcataaataattataaaaataacagaaattagtgctaattgtctttactaatccaaattactaaagcggtcattacatatcatgacaccaaggtattatattggtgttgggaatgaagagtgatattgttgaatacgtctcgaagtgtttaacctgtcagcaagtgaaagctaaacaccaaaagccagcaggtctactttagcctttgagaatatctaagtggaagtgggaagacataactgtggacttcgtagtagggtacctagtactactcggttatatgattccatatgggtgatagtggataaattcaccaaatcagtgcactttttgcctgtgcatgtgacctatactttggactagtatgttgaattgtacattaaggaaatagtgcgactctatggtgctctgaagtcaattatctcagaccgtgatcccaaatttacttccaagttttgggaaagttcacagaaagccatgggaaccaagttgaggtttagtacggcttttcaccctaaaacagatggtcagtttgagagaaccattcagatattgaaagacatgttgcgggcctgtgtgattgattttgagggatcttggagcaagttcctacccttgattgagttttgatgtaataacagcgaccagagtaccatcggaatggcacattacaagatgttgtatggtagataatatcgaccacctatccattgggatgaagctggtgagagactttatcttggacctaaattggtctaaaggaccagtgaagccattgaaaagatttgatctcgtatgctcacttcacaaagtagatagaaaagttacggtgatccaaagcgtagggatattgaatttcaagtgcgagactttgtatttctctgagtgtcacttatgaaaggggtgcgtagatttgggaagaaagggaagttaagccctagattcatcagtccttttgagataatagagtggataggccatgtggcctatcgattagtcttaccacctatgttgttcggggtgcataatatctttatcttccatatctctatgttgagaaagtacgagtcaaatttgacacatattttgagttacaatgatattgaactctagacagacttatcttacgaagaacatcctatctagatcctagatcgaaaggagaaacaataaagttgaggaagtgacctgggaattagaatcgcagatgcgagagctatatcccgagttattcagataattttttaggacaaaatttttataagtaggggatggttgtaatatcccaataagcctaataataaataatttgggtttatatatattatggactaatcaggtaataagtgagattatgatcatactaatctagggctgaacatcgggtgggtttactgggtttcgggttggcgg

SEQ ID NO: 134222 - DNA, 929 bp, Cannabis sativa
tcataccttttatgtatttattttatatcgttttagaagttcatgtttaggatgctaaaaacatacttgttagtaaatctagatcttgtaaaatatattccaacatatatattcaacttgtaaaatcttttattagtatatcagataaaatagacaaaaataatacttgtggtattttcaaaattgtgtctaatagtttattcattaaatttgaaaatatagtttcattttcttgtgtgaaaaggcttttcaaaatcaaatcctattcctatttgacttattgtgaattaaatatgagtttttcttttatagaatattttattttatcctttgctttttaaggaatttcttattcatattttatttcttttgatctgatttcttgaccaagaaaccgtgtacaactatgggtattaatgttgccaaagttgccttatttgtttatgaaaactttgttgaaaactgtccaggtttaatgtacctgtttaaacggattgactgtctatttaagcagattttgacttttcttttcgtgaagattttcatttactgacctgatcgtttcttggttgcttgaccacgatatagagggtttctaacatgtataaatacaccattaagtcgttggtattggttggctctcttggcgtatcaattctaaattacttttaaaagttagagagtgttttcttttttgtgtgaagaatttgagtccaacaagttcttactattttattattgtgttactctatattgtttcttgttaaaattgtgcacattgaacactttggatattgttaatcaagcttcgggagaagtcttattcgtgagtcacctttcgggaggaaaagtccatgtgagtcactcttcgggaggaagattgcaagttagtcactcttcgggaggaagattgcaagtaagtcactctt

SEQ ID NO: 134223 - DNA, 602 bp, Cannabis sativa
  modified_base (26)..(29): a, c, t, g, unknown or other
tacccggtgtttccccttacggatcnnnngactactgactgtcacaatatgggtgatttttaaaacatggaattaaaaaaattggttactgatacctgctcgaactgcataggaataacactcgaactcaatcttttcaaacaagtttttttgattttcgggtgcaccaagtttggaccgaacaagtgcatcgggcctttatgtgcagtcctagaatgcacaatatactattgtaaaaatttaagtatttataattatatttttatgtatttttaattaaggtagaatatgcatttaagtccttgtaagaaaaatatacgggtacaattcgaacgcgacacaaaatattaaacttttttatttttatggtcattagagattgtcatgggaagttaattgaagttagttcctctttgcactctggggtttgtcagccggctgtggctgagatattgagcgtcaaggaggcccttaattggttgaagttaaagaatttctccaatgtattagttgagacagattgtattgctgttgttcaagctcttaatagctcggttgctcttccatcagtttttggtttgtttgttcaggagtgtcaattg

SEQ ID NO: 134224 - DNA, 1031 bp, Cannabis sativa
  modified_base (147)..(152): a, c, t, g, unknown or other
  modified_base (218)..(219): a, c, t, g, unknown or other
atctaagatcctagtaaaatatttccaacattaagaacttttttccaattttagtaaaaaagtctatcatgaatgaaagtacaggggccatgatttagtacatgtccaaattcgaggggcgtggtttggtagatatcaaagtctggnnnnnntgatttagtatataaacaatcattgaatagtaaaattgaatgacattagacaaaagtccttaaatnnaacaatctcaatagtttagagggcatttttaacgattttaaaagttcagggagcataatttgatacatgtcaaagttcaggggacaaaaatcctaattaatcttctttttaattacaatacaatttactttccatttattcattcattccctcatatttgagaaacagagcctgcctaaggaaaaaatatagacatacaaattaatggaagaaaacctaaaaacttctaaacgtggaaaataatttttgaataatcaagatgtgactctcaacaatgcttgcttggtcatcactcgagatccgattattggaaacttacagacttcacaacgattttgggaaagagtcttggagaactccactattcaaagcacacgaacaaaagactctcttcgatgtcgttgggggggcaattgtgagatgttgtaacaaattttgtagatatctcacacaaatagaaaatagacatcaatttggagtgagtgctattgatataataagatttaatttttttatttttatttatttgcatgccaattctaatacgcagtttgattttgtacgttcttcacgcaaaattgctatatattgagatggagaataagaaatttacatttgaacattgctcgaaagtgttgaaagaaggagtgaaatggcatgatttagttgtacaaaggcaaaagaatgatacaaaaaataatgatttgtacattgttcctaatgatcgaattccagacatttctaatcctcaagactccaatcagctacaatctggaaatcatatcaatgactcacgtatcaaaagacctctt

SEQ ID NO: 134225 - DNA, 628 bp, Cannabis sativa
  modified_base (316)..(328): a, c, t, g, unknown or other
tttttaggtgtattgttggagcaaagttgggattagattgaagaaagtatgagaaaacagggacaagattgtattttaaaaaataattcagatctggcctcaagcaaatcccaactcgtcagctctgcactaaccaaaagttgccacgcaagccaaccgtcagcctccatccaatcgtgccacaccttgtggccgtctgttgagaagaaaaagaaaggaaaaaagagaattgttaattgattttccacattttctcccacaatttacaaataaataatataaatgacaatttcatttgataattaattataattannnnnnnnnnnnntttggcatttataggattgaattataatataaagaagcaccatcaccattcgtcgccagtgaaagatttgacaattcagaagaagggtcacgttgttagtgtgacagagagtttgtagagtaaactagtaaagtagcttgtgtgcgacatcagttgaggacatttcgaacatttcctctcgtagttaccaattgtgttttggtgaatatggatgttacgaattttatgtttattacgcaagtgtacgcaatcaagtagtatctcacgcaagtgaggccgaaccacagggaattggattaa

SEQ ID NO: 134226 - DNA, 982 bp, Cannabis sativa
acatacttcttcttcaacaaccgagcaccttcaatctagttaacgtattccccacaatcttcagtaccagtgatcttcccaatctctttaacaaaaggaaacaactccttagggtcaaaagctaattcactagatggctccttatccttcttattttgaacttttggttcagaagaaccaaactcattgacaaaaggagatctacaatgcaatctaggttttgtttgtctcttgacagcaacactggattgcaaaggtagtacatctagaacctcaacctcatcatccacagcaggggatgcagactcaggaatttataccaaatcccattactcattctttgcactaattggggaggaatatgcccgagtgagtctgtcaatcaaatccaaaatggattggttaactttaatggtttcataacaaaacacatcgccctcatccctcccctcacctaagctagagtgaacctggaataaaaacaagaatcaattaaacttacaatctaaaaaaaacacttataataaacacatccataataacaaagaaaaaacaaacaaccttatcttcccgaacaagtgacaattgcagcccaccttcatcatcatcatattcaggaacttcggattttgaaacaacttacaaaatatagaacaaaaaacatagtcataaccggtttctaaacagataaagaataaaataatagaacatgcaaaaaaaataaccggttatcaaacaaaaaaaaaaaataggaaacaaaagggaccatagaaaataagaaataaccatttataaaaacagaaaaacaacaaactaaaagaaaaaaaaaacctcaggtgacagcggatcaggtaactcatcgtcattcccaccaacattccgattctcagaacaagaatcttcaacattctcctcaaaatctttgggcacagatgaccctttcttgctcttcaataattcaatgacttcatcaaatttaata

SEQ ID NO: 134227 - DNA, 1299 bp, Cannabis sativa
  modified_base (34)..(43): a, c, t, g, unknown or other
actttatatgtgtttatttattatcgttttagannnnnnnnnntaggttgttaatcaacatacttgtaagtagatctaagatcctggtgaaattaattccaacagtcacgccctctcctcctactcgaggctagacaacgttctcattttcttctcttacttgcttcgaaatgaccaactggttgttgtcaagctggatctccacatcttgaaggtggcgagagcgtctaggcattttgcattaattgcatataaagaaatgacttggcttagtcttgtcattcccctagacggtgccaaactgttgacggtgagaactcgttaactaagttagtggtcagaaaatgcaaggtttcccagaaatttgataaagatgaaggtgaaaagatgtctaaatattcctctctatattgaattcaatatctgagttactccaaatgattttccaaccccttttcacatctgagataaggggtttttataggctgtaatggcctgatgcacaaagtagtcccatggggacaagacatcgctttcccgctgaatgctacaggtgctagaggtggcctggcacccagtatccttgtctagtgtcaaatggtcatcagttgcaggctacaagaggatggtctctaggtacatgcgcgtggtccctagttgcacgttgcaggaggatggtctttgggtacatgcacgtggtctctagttgcatgtggggtggtccccaggtatagggtgttggagagtggttacggcgtacccttggtcgggtcttcaggccttccaagtccgttgtcgccattacttatacctccttgctctcattcttcagaaggcgtggtggtacgctcttccttgcatgccttgtccttggagctctcatccaacaccatgctcgtctacatgccttcgcttctttccttatatgcacatccctcagaaatacacccacgaaacctcacctttgactcccttgtcccaaacacccaaattcccctacatgcacacctgattacccccactcgctcacaccacactccccccacttgcactccctcccccacatgcactcacggctcacgtgcgagcccccaagggctcccatgtgagccccccactctcacacaccacactccttcttaattgaacctcccccacatgcactcacggctcgcgtgtgagccctccactcgtacacaccacactccttgcactccctcccccacatgcacgcacgactcgtgtgcgagtccctcacgggctcccatgcaagcccccactcgcacacaccacactccc

SEQ ID NO: 134228 - DNA, 699 bp, Cannabis sativa
  modified_base (35)..(52): a, c, t, g, unknown or other
aattgtttttaaaaacaattttctgtttttaaaannnnnnnnnnnnnnnnnngttatgatgccaaacatgcactcatattcttatatcaatattttctcttaagatggtggctattttttccttactaatcttgaaccatatcagagtgaacagggtcaccatctttaaaggtgttgataaaatgtctgcaaggaatacaactctaataccataacaagaatcataagattttatcttaaaactaattggttatataatttttttttctccacaagtcaaaacgagaaatggatttacttgtacttctcttgtaagaaaactcgacactgtgcttaatcgtgagtaacatggatacatcactaacaaaacttactattattttaaaaacaatttcacagatagtgtgaatcaaataccttgaaatacctttccttggggataatatgttcccaggaatgattccaaagaaatatattgcaaatttttttccatgaagttttattggattggaaccttttcctacccctaaattagtacttgtccatggtcttggtctacgtttcttgttatatttgattcttatggtctagtccctgcaatgaaaatgggaaatttgaatttatatgcttaaataattaaaaaattttattattataccaaaaatttacactattaaaaaactatactttttttttcaa

SEQ ID NO: 134229 - DNA, 542 bp, Cannabis sativa
  modified_base (515)..(516): a, c, t, g, unknown or other
tttattgatattgaataatctagattacattgaaacagagttttatttagggcataaaacccaacaatcaccgcctcatatttttcgtataaatttgttataaaagtgttattattaataattataatgttagtagatttaaaaattctgctcttgaacgttctagggttttcccttcttctctggttaatccagtttccctttctctccctgtgactcccaattgtcgtttccctctctcttcctcctctcacttcttaattaatgctatttcctttaatatcttccattaatcattacaattttttaatgcagcctccaatttctcattaccgagaacctcatttattgcatgtccagaaatcccatggttctccttttctccctcatcccttcacgcattcaatttcagacgccattctcatgtggagacgaatcattgctctgatcctgggcagaagacaatctagacctccgtcagctaggatggatttagtgttaggttttatgccctnnataaaactctttacaatctgattagt

SEQ ID NO: 134230 - DNA, 2145 bp, Cannabis sativa
  modified_base (27)..(28): a, c, t, g, unknown or other
  modified_base (462)..(471): a, c, t, g, unknown or other
tctggattacattgaaatagagttttnnttagggcataaaacccaacagcgtgatcctggtttttattaatgagtattagcaacggagaggggtcccacttctattatttttgtcaatctcgaattctgagaatacctaacatctttagtagcagacattagtagcagcatccgttgctaattataattatttatattttttaagaaaaatttacacaatttcaaaatattataataaatttcaataaaaatatatataactttagggccagctctatacgccaaacttgaagaaaatcatcgtttcacttgtaaatacttatagaagctatagattccatatctatgattggcgctcccactcaattatactatcatgtttccaagatgtaagtattcgcccaaactattggttagctttcacgaagtgttgtaagaacataaataatacaattgagatcnnnnnnnnnnatctcaggattaagatctattgacctaagataaattagtgatagcagtccaatctgatgtatgttaaaaaactttatcactcattaaatatgtaatatcaatattcaactccatagataaatatattacatataattataagtgtaaaaaacatagatctaaagaatacctttgttgattcaaagagaagaaaccaaatagcagaaacgtaccttaatccatagatagatcttaatccatcttgtaaagataatctctgtggtgattttgtaactcatcttgaattatggtgtaatgtcaaagtaaggtccatgcttagtttgctacatataagttttatgtttggaattttgtaattgggctatttttggtgaagcttttcttttaaaagctataataaagtaaatttagttttcaacatacatataaatttagatttctatatagatgcaaaatatttgttattagtttacaaatttatttttaaggatttttctttaattggacaatttaagataaggatgaatatttttttttttggattgttttaagtttaaatatgacatactaaaaataaaatactaaagtttgtctttcattctaaattgattgattgaaatatgatgtcgccaaagcaatttctcttgcgtagattgctcatgaggaatgttagaggtttgtgtgtgtatttttcatgtaagtattgatcggcccaaaggaaggttatacttattttgagtgcacacatacctgtggtaataaaaatgtgacaattatatggtttttatgtgaacaatatgtacagtccaaagattgacaggatttattgtcaatatttgattgctacaacaagagtaccgcttacagttaatattattgtccaaagatttgatattaatgtgtgtttggtatcttgagatgggatttgccattatttgaacttattgtgttataaggattctttagtgaaccttgtttaatttgttctccttttaagttcatgttttcatttatatccaccgacatatagttaattctcatgctaaatgggcaaacttttaactaaaggaaagaggcaagcatgcttctttagctaccttgtttaaataaaggataaagataaaactccggatgttgcatatggaacactactaaagaaaatgcaaaatatattggatatgaaattatctatgacttttgcaagagggattaaaaataaggctaaagtgttcaaagtatgccattaggcatatctaaggaaaatgaatttctggtttgttttgtaaatgatttaatttattgtacctttatatacttagtaagcaaaattttatgacattgcttatgtaagtataactatggaagatatctatgaaactaaaagccaagtgatgatgaaagattcatcttttagggcaataggaaaacacctatagttgaggctataaggatattcaaactatggttaaaaactagttattttcggatttagaaaaggcttatacagtatcatcacttagatgattttttggttttgaattttattttgaataaattaggtcattcttgttcaattagagtttgaaagtattttccaatattagttctactagttctttaatttataaatttattgaaatatgcctcatataaagaaaccttataatttctctt

SEQ ID NO: 134231 - DNA, 572 bp, Cannabis sativa
attgttattgattaaaagcgaagtcaatacactttttttttttcataaaagataagagaaatataaagtgaagttaaatataaattataatatttaaaaaataacaattttattatatagacacatctaatataatcatagaaaaattattaggaattcatttatttatatgtatacgagaactaataattcttgacttagacttatttttatatcgataaatatatgatggtgtttggtaacacttttatttttaaatgttttaattacaaaaataaaagtaaaatttttgtttttaaaattttaatgttgaaaaataaaaatgtatcctataactacttttttttttcaattttaaaagcaaaaaataattaaaaatgttttgtatattttatttttattttcatttgttgattttatttaagtcggatctgtaattggatccaagatcaggactgggagcggatccaaatccgagttcgaagtcgagttcgctttccaaggtctgagttagagtcggaatttaaaatattaatttaaaaaaactatttaaaaaaaaaatattaaaatta

SEQ ID NO: 134232 - DNA, 1344 bp, Cannabis sativa
gctcgcaacatatcttctaatatccgaattatcctatcaaactgaccatctgtctaaggatgaaaagctgtactaaacttcagctttgtacccatggctcgatagagactttcccaaaacttggaagtgaactttggatccctatccaatacgatggactttggagccctatataatcgtactattttccttacataaagttctgcattttgatctactatgtacgttgtttttaacggtagaaaatgtgctgacttggtaaactgatccacaactacccatataaaatcaagcatacccgtggttctaggtactccaaccaaaaaatccatggtgacatcttcccatttccattcaaaaagatttaaaggctataacaaccctgcaagtctttgatgttcaaccttaatctgctaacaagtcaggcattgagatatgtattccaccacatccttcatcatactgcaccaccagtaaaaagactttaaatcttgatacatcttggttgtacatgaatgtaatgaatagggagtggtatgagctttatcgagaatctcctttttaagctccacactatttgggatacaaactcgagttttataaagtaacatcccgtttgctgatatcaagaaatctttagcttgaccagctaagacttcttcttgaattttcactaattttggatccatcaactgagcatttctaactttgtctaaaaaaattgattgtagtgtcaaattattaggttcaccaaccgcgaactcaatacattgatgtagtttctttttagttaagggttatttcaaaatccaagacatcaattcatattttttatgatgaatgttattttttaagtttccaatatatcaaattgcttctatttttctattttcaatgccatgattattgttttaatcttctttagataaagatgatcgctaaattatattttactttaatctattattatcttagaattactattcacctaatagtctagggttttaagtgcttgtgataaattataatttttaatattgtcaaaagtattttaattatgatgaagaatagaacctaggtgaagtaaattatatgcttcattaatttattgcctaaattaatctatctccattaaatttaaagttttatctatgttaaataaattgcatgcttattgcttggaatagttgtctgctttagtgttatttgcgggattaataattttattgaaaaattgaaataacattcattattaggaattaaggatgattgttgagggtgaagattaacttttaattatttcttgaatatcgtagtatcatattttatttattttgttaattt

SEQ ID NO: 134233 - DNA, 800 bp, Cannabis sativa
  modified_base (37)..(40): a, c, t, g, unknown or other
taaatatgggatttagaaacctaattacatatatatnnnntatcaaataccataaaaaaacctaaaaataaaaaaaataccatctaaattggccaaacttcaatgtgccatatttatcataagaacttttaaaatctcatactaagtgtaacttcctcatatttatttgggtcggggtctgggataagacgagataagtttgcgtctaagacccgaccatctagcctatgagcccaaataaatatttttttttcttaaaagtatacatatattccttttaataatttttaaaaatatcacacatctttttaataaaaggcctaataatatatttctaaaatcttgatatatttctaaaattatatataagtgacgcttgtgtctaagctcatatgtaactgagggcccaaataaatattttcatcttaaaaatatatatatttttaatcatttttaaaaatactatatatctttttaataaatgacctaatagtatactttgaaatcttgatatatttctaaaattttatacatataagtgctactataaaattggggccctaaactagggactaccttgcttagagtaaaactctacttggaactactctaaatattttttgtagactgagaatcaagggtagaaaattttcttttgatttggttattttattttatttaattttactttaaatcttttatcattgcttttagctgatattgaattatttaatgtaaaagtctatgtggatacgaactttgatacttatcattgtattacttgtttgtgattgtgtaca

SEQ ID NO: 134234 - DNA, 1151 bp, Cannabis sativa
  modified_base (111)..(115): a, c, t, g, unknown or other
tattattcgccatcagatcaaaatctaatgacttgatattttaaaaattaatatttatagttaaatttatttagtacccatcaatggataatacccattaagaagtgttcnnnnnatatatatatatatttaataaaatgggcttaaatggtagctaaaatagagtggatgactacaatcttatagaaaatcagttaatatacatataatggttgaaactgatccaatttaatacatttcttggatcgaatcggatcggatgacttaatttgattggattggatgggatgacaaaatgtagtatctagtaaataattagagtagatcaattgagttcaaatccattgaatgtgaaccaatgaacatttttatttttagtcactgaaatccctaattataaaattttattttatgtgttgtctgatgtttgtcctcgtactatctaatcttgatttcgcttccaagtgtattaaaatctgaaaattatactcaagtatattttttctatataaaatgtggatatgtaacagaattcttagtttaatgattatttgttttaacatttccttttcttttaataaaaactaactagcaattaacttctcggctaactttcatccactatatatattaataataataaaaaaatcacaaattcatgtatagcaattccaatcgtatacaatatagctgataaatttttatcgcaataaaaatttacgaaaaagaaaaaaaggaaaaaagctacaattgcttcttatctcttgcctttcctcccttctatctatgtctcttttttactcgttgaatctccaatgatgatgatgaagacgacgatctaggaatagatacctaccaatcttcgagatgttggagtcgacgctctgggattgctaattttcttgggtcggctaattctacagttcttgattcgatgcaaggagttttagggttgaaaattggtgtacccaaaacgaaagaggttcataattttacagcttgatggagaccccaatttcaatgtgaaagtcccaccattgttaactatcctttggtgactttaggactttgggcatacgatgccgttttttggattttcagattttgataaaacttcaaactttagaggtcaacacatttttctatggaga

SEQ ID NO: 134235 - DNA, 651 bp, Cannabis sativa
  modified_base (595)..(615): a, c, t, g, unknown or other
aaaaattagtatttttataatatgtgatgcagtgcggtttgaaccgcatattaacaattcaaaccgctaactgcatcccctcgcgcggtttaggaaaaattcaaactgcgaccgcaccgcaaagaattttaaactgtgttttttttacggcgtggtgcggtgcgggcggcttggacagtttgacgaacacctatatcgtgaagtattacctatagaaggtgttgagcaccactgatgccctatagcaatgctccttaaaataatataaattatttttttatattttcaatgagcattaatagtagtatcgacttttatagttaacttgcactttgtgtattgaagcataaatataaaaattaagccaaatttaacataaaatatactccatttatgaaaaatgatcttaaaaattattgttaatcaataataaaacgctatttataaaaagtgctagaaaccaccaattagttggtgaccatttttttttaatttaagcgttcatataatgtacaatgcataatttgggactcgaacccaggacctacacacacgcaccctccatggccacttgaggcttttttttttttttttnnnnnnnnnnnnnnnnnnnnntatatattacaacatgttttacctgggactcgaacc

SEQ ID NO: 134236 - DNA, 1087 bp, Cannabis sativa
tagagggttggggcagacctctacggttcgggaactgaagtccctgatcttttcccgctctccggattttgtttttctttccgagctcaaagtggacgctgatcctcttgtacgtattctaaagtctcttcacttttactttcatatttgtgttccgtcggttggaaatgcggggggaattattttggcttggaaggtcgggttcagttttgagtgcatctcttgctcgtgtaatcatatctcggggttagtgtactctgatcccccctctcatccgtggctcctttcgtgtgtttatggtcctccctacttgcatgcgaagaaaaagttctggtctgacttcttgaagctgggtgatagatttggggggccctggctgattttgggtgacactaactttgtcctttgtgcttcggaaagagagggttcctctggtcgggacccctttataccgatcatctctaaacttctggacgctggaggcctgattaatttacctatccaaggggacaacctgacttgggataatcatcggtctgggaggcatcatgtgaaatctgctttggataaaggcttagtgaatggcgcttggctcaatctgtttcctagggctaccctttgctcgtcccagacttgcaactctgaccataggcctttgtgcctcttgtcggatggtctggataccaagtttaaaagatgctttaaatttgaggagggttggacccgtgatgctaggagcaacctggtagtggacaatgcttggaactcagtaaatcatgattgggctcctgcgataattttcaaaaaggttgggaccactagggtggccctcctgaactggagtagatcccagtttggtaagcttgatgaggctataaaagatcttgaactcaagctcaactccctgcagagtctcccggctgggtctcgggattggaattgggaacgtgatatccgccgagagttgaatgagtctctagaaagaaaggcgatctattggaaacaaagggccagaatctcttagcttaaagacggggacaaatgctctaagtttttcttcctttcggctgccattaaagggcgaaga

SEQ ID NO: 134237 - DNA, 506 bp, Cannabis sativa
aaaaatgtagacataggcgtgtagaggtatttaggtaataaattgtgcaaaatggatttttcatgtaaaaatttctttagataattatgaataaaaacaaaatacatacattgttaagttttgttgataggatgattcaaaaatatatttgttgattggagagaagaagatacaattatattaagaatgtgtactattttactagttcacacaatttatatagatagcgtaagtgaagtaaataattaagtttatatctacaaattttaaatgtattgaacgttataatctttaaaaataagattaattaatataaaattatacaaagtaaaatttataattaaaaatacaatatgaaaattaaaagaaaacatgatattgcaaaggattgaatccatgcgcttttatcattaagactagatagatgttacgtgtcaagtcacgtatgttaattttattttagattttagttttttttaatatcataattttaaaattaataatat

SEQ ID NO: 134238 - DNA, 727 bp, Cannabis sativa
tgtggatatttttttcttcaaaatatttatatttttatttgtattaagtaaaaataaaaaattaatgaagtaattagattataataaataactagttattataaaataatttagttagaatgacataattgtaataacattataatatcataactaaatattaagcaaaaataatccttactcaaaatttgacatttttcattacatcaaaaagagagaatgcaaaagagagtgggatagagagtctccttagaactcctcttaaaataatatgatttcaatatattttgttgatatgaaaaagattgcatttttattatgatgtggtgtattgtagcaaattagtattaatttatgagaaaactaacaaaaatactgacttttttcgttatctttacaaaaataatgccacacggcagaaatttcttttttactgtccaggcccattttttttctttcatattgtctaggcccattgtttttactttttttactgtgaacagtaacaaggcacaaacgacgcctccttccttgtttgggacgaacatagcaacaccgaaatcataaaaataccaaaaaaaatccggtgaagagaaaaattagtaaatcaacgactaatcaagaccgaacaataaaatttaaagtagattcaaaggaaacaaatgaagtaaacacgcctaagcccaatgtattttaattttttaaaaactagaaaaaaaaaaaaaaa

SEQ ID NO: 134239 - DNA, 976 bp, Cannabis sativa
ctgcctcagctcgtccttcatcctctactaatcccaaccgccccaagaaaccaagaccctcttgcacaaactgtggcaaaccagggcactatggttacaagtgttatttccttcatggtttccctccgggatatggagataaaaagaaatctgagaaaaacaaagtctctgccaatcatgctactgtcaatacagccgaaaacacctcaagtaacaccacaattgatctttccacacaatgccaacaactcttatctcttctcagccaacaactaagtcaaggacagccccgtgaggactcaactactgctgatgccacctctaatttggttggtaaaaagtctttttttcattctcattcatggataattgatagtggagcaactcaccacatgtgttttacaaaatcttattttttttttatctttttctaacaaagatttttccccacatgtgactctccctgatggaaatcaaatatttgttaaaggaattggtacagttcaaataaatccacatcttattctttatgatgtattatttgttccaacctttaacatcaatctattgttcattccaacattcctccttagtgacacggctaacatggtctactttcaccatgatttttgtatattacaggctcattctccaagtgtggtgattgggacagctaaaagacttggaaagctatatgttcttctccaagatttcatacctattgcaagttttcattgctctttactttcttgtaataatggagacatggcacaaacgccttggtcatccctccatgtacatttccaatacaatcaataaaaagttcttttcttgttcaaatatttcaaaaaaccagcattgtcacatatgtcatatggccaaataaaaaaaggttgccattcatatcaaaccataattttgttgatgatatatttgaccttattcacatggatatttggggacccttcaatgtcat

SEQ ID NO: 134240 - DNA, 819 bp, Cannabis sativa
tgatctatttgacactattgtttattgaaaaatgctaaaaaggtactagtagtggtgtccaacactatcacaaaccgacgtggtattatcagtgtaattaaatatcgggtttcacatttgttaatttttcacaagtatctacactgattaattcccttgtttggattagcgtggatttcaattcttattgcaaattgtttttggaatgataatttagagtgatacttgggttttcattatgtgtaaaaaagttctttacatttaagggcatggctggaatacagtgaaagtgggtgatttattgtgatttgtgagatgggtgcagataaggactcattttggggatattcaaactatttaaactgaaccaataaactatttatcttataccgcgtcgtgtacaaactaatgaatttataaggtaagcttctttaaataaggtggagtctttgggaatttaagtagcgtttggttggaagtaatggaaagaaaaggaaacattctccattctattcttttgtttagttgcatattaagtggcatttggttggaggtaataaaatagaatagaaaggtaaggaaacaatcttcattctattcttttatttggttgcgtaataaaatattagattgatctttccactattttggtagaatgacaattctattttgaaatggaaggaaagaccatttcaatgcatgattagaaaaaatttaataattttttttatgctttttaaattttattctgttctattcctatttcattcccattcccttttccatatctatgttatttcttccaaccaaacgccacct

SEQ ID NO: 134241 - DNA, 1969 bp, Cannabis sativa
tctcatcctaattttagtttcttgggtcttattaatatgcttattattttttgtggttgttgtcgatgcagtgttcacaagctttttctatgtcgtgctttattttatttatattctgatatagtctttgatgctttctgctttgttattgttattgtaatcattaatgacaatttactgagtttacatggtgtcgtagagggtgcacatgtatgtaggtactcttgttctaatgggtcttattcaagaaagatgatttgataacatatgttcttgagtatctctttcttttttttatgttttttttttcgtgtatgtttaagtaaacttgaactgtgaacattggtcgaattcttaagacttagtttaacaaagagtatcaaatattagccttctcaatttcaaatttaaaggtgttgctcaattagtttatctgagagcctttaatctttctataccacattgaatagtaagttttattgtgttgacacagttacacatgatgatactgatctttataggtaccagaaaagaaagactatttaaggtatagattttctagaactaaaatttcaagttagagttgttgggctggtacaagaacttgtgagttttttggtgggctagtttggtggtgagacttatattttactcctacaaagtatagggttgggaagaaccatgaatttcatactctccagagaataaaaatttcagcacagggcactttttcattaaaattatgggcatgaaaaaagaagaaattggttcagaatctatcaatatttcattttatgttatttcattattgaatatgggaatctcatgaagtagctctagctctttcctttttttcactttcaattctctttgataaaaatagatcttaaaggcttattgtagttgttatatatttttcctgttccttttgccataaaatcattagttttgtgctttttggtaggattttaactgatgcagtattatatcaaaaactttcttctaatattattaaatcaagaatatggatttccttggctaatagtgatgtgttgatgttgttgtgaatgtgttgatattgcaaaactaattgggactttttctctctgcttttgtcttgtttggactatggataaattagaggaggagaagaaaaaagaaacagtgtaggaaatctgtaagtgagaaagaaaaaacacattccctgctactttcattagaatagaaacagtgtgataattctaaattctacaaaataataataataataaataaaaaagaacattttagcagatgaaacaataagtgtacttctcagtcaatgataactgaagaaatttgaagttttaatagtttagtgagttcaaatctttattttattaggtgagaagattaagataataaacggtgtaaggggcaataattttggattgttggctttgaggtaaattttatgattaatgttgaaaattttttcaataatctgtaggttttgatgatgaatttattggtgttttttatttctacaatactaaaagttgagtaaattgtcttttctttaagaattatcaaatcaccttgatgcagaaatgctatgttgaaatctcttatggttggctcagaggttgttagtgatttaactttcattgaatatctgggattgtttttagatatggtcactgagacttgttttcaggtttttgttgatatacatgtttatgtttctaagcaagctgataagactccatctgagccctttttctttttttgaattttcacttttttttaggcaattagatcaactttttggggcagttgaatgtgggcatttattatatttatcagaagattaaaaatctctgtcttggatagcaatatttcattgaatatagatctaggattagaaagagttgtgtttgatgtgaaagagaagagagctctttccctcactctctttttttctttcttt

SEQ ID NO: 134242 - DNA, 753 bp, Cannabis sativa
  modified_base (55)..(63): a, c, t, g, unknown or other
gattaacttgttgacagatctaatgatctgattttaggatgttaatgaaacatannnnnnnnnaaatctagatcctggtaaaaaatttccaatagagttttctgctgacccacagatggttgatgctctggagaacccaatagtagttggggctaacgatctaataaaggcattggtagaaatatgagcatgactgcgacggtaggatgaagagtttgcataggctcaacatattaggtcgctagtaccaattgtgctacctcaagcacataatgaaaggtactagtgtctaaataaatacggatgcatggaataggatatgtcttcgaacagtttagaaagcagtctccacgcctagatattaaatgaagcttgacaaatgagaaccagtgaatgacttggaatggtggaagctatactggactaagatagatattctatgtaactaatttattaaagaagaatgaaagaatagatatcgaaagaacaaatacaatcttgttgggtattctagggttacacactcttaaattagatggtaaacatatgactagtatatgtgaagattttagaaagaagtttgttatacaaaatacaattagtccaaagaggactatgccatcatgtaggaaggaatgtagactgctgaatagtatctagaataagaagttagaaagagaactgataaaatttctggaagtaatggcttatgaaggtatcttgaacaccaagagataagcagatcaacaaata

SEQ ID NO: 134243 - DNA, 708 bp, Cannabis sativa
tgtgtaattattaaaatattatataattactaattatactatattttaaaatataaattgtgtttggatattaataagtaatattttaaataaaatatttttagtaactacacttaatttttacaagtgcgattacataattactatgtaataacatgataaataaacatattatatgaatacacttaaatttaattacaaaactattttccaaatacaaacaatattatttgtgtgcttgcttactatcttatcaaataacacaataggaattcatataattcatatataataaccattattattgacagtaaaaatatatattttttttaattgttatattttaataaataaatcaagtattcaccattaaattttaatatatcattaatgttcagtattattatattgattagtaatttcttataattatttttaaattaaaatatatgaaacctaatattaaattgagagccaagttttatttgataattgtaaggcatggtattggtgatagacactattgattaataatactattatttgattaatcaccgagtaagtgtctactaacaaagtatttactctaagtagttttcataaattctaatagggatgtaaacggggcggggcgggtgcgggaattgctctcccacccccatacccgcttcttaaattcaccccatacccgtttaaattaaagtgggg

SEQ ID NO: 134244 - DNA, 2716 bp, Cannabis sativa
  modified_base (1101)..(1103): a, c, t, g, unknown or other
gttcgagttctggtctgggtctaggttcgagcctaggtctaattaccagatttagacaccgaatatgggtcgggtccaagcctcaggtctttggtctagtcccgggtcaaaatcaaattcctggtccagttctctagctcaagtgtcttgggtgtcctctggtgtctgggtcttatgtccaagtttgggtctaggtttgggtcttggggttgagtcatgggtccgggtccccgattcaggtcagggtcctaggtcccaatctgggttagggtcccagtctgagtgtaggtcctggtccatgttcggaactggtccctttctcgggtcttggcctggtctgggtttatttaacggttcggttctgaggtcccgcgtttgagtatcaggtaccggtcccggtcccagtctgagttctagtcctagtccaagttcaggtctcggtcctagtctgggtctaagtccgagtcctgatctatgtccgggtttgagtcctgagtttgagtccgagttttggtatgagtctgggtttgggtccaggtctaggtctgggtttgggtttgggcccagtttccagttcgtgtctgtgtccgggtcttggtctgggtctgggtctgggtctatgttcgagttctagtacggaaatgggttctggtccaagtctcgagtcacgggtcctaggtcccaagtcttggcgcaagtctgggtccgcgttcgggcctgggtcctggtactgatcccagtctgggtccgggtctgtgtttggttctgtgtcttgatccggttttggatcaaggtccaattcctattccagggtccttattctggttcttgttcctatttcgtgtctcggggtccgagtttgggtttgggtcctggtctagaaattgttccaggttcgggtcttggtatgattgcaagatttagacaccaactacgagtcgggtccaagctccaagtcgtgggtcaagattgagatcccaatcttgggttccggtctcatttccattcggatcctgggtctcagtctatgtctgtgtccgagtgtgggactgagaccggggttgggtctttggtctcagtcctagtcctgagtcttgattnnngttctaattttgagtttgggtcccaaatctaggtctgggtcctgggtgcaggtctgagtctcccatcctggtccgggtcctgggttcgggtctaggtccaagtccgtgtctcggtttgagttcgtgtcccgattcctgatttgacttttgattcagatccgcatcctgatccaggtccgcgtaccgatccgggtctgggtctgggtcctagtcagattctagttcctggattcaaacccagactcgaactcggaccttggtctggggtacgggtctgggtctgggccagggtctttgtccgactccgggtctgggtttgagtccggatatgggtcctagatccaaacactggctacgggtcaggtccaagccctgggtctagatttggatcacagtctcgagtcctagtctagttccacttggggtcccaggtcccggtttgggtcctaggtcagggttcggtccaagttcatatcctggttctcagtcccagttctgatgcccgtgtcccgggtctaggtctgagtcctaggtctctggtccgggtctggggtcagctcttgggtcccgtatcacgagctggatcctatgttcaaattcgggtcaggggtcggctcttgggtcccggtcctagttccgttgcctaggtctctatcccgatttcgggtccatgtctcggttctggtatgggtttgggtcccaatctaggtttgggtcccaatctaggtttgggtctcggtcctaattgaagtttgggttttggtctcgttatgtgtatttttttgggtttgggttcgggtttgggtcctggtccgtgtcctggtcctagtcctagtccggttccaacgccaattgtgattccaagtttgagtttgggttcgagttcgggttggggttcgagttctagtcggggttcgagtcatggtccgagtttgggttctggatcggatctcggtctaggtccggatcgggctctgggtgtgggttagggtcttgggtgtgggttagggtccttggtcttggtccaagtttaggtccaggtcccaggtttcgatctcgaactgagttagggtttagttttgtgtctaagtcctcgtttcgatcacagtttgggtttgtgttcgggtgcgggtgcaggtctaggtttgggtctgattctgggtctgggtctgagttcgggtcccgaattcaggttcaatttttaatttgagtctgggttcggattttgtcctggtatgggttcgtgtccatgttcctatcctggtttgggtccggggaaggtttcgggtctaggtctaggtccgacttcagattcccaggtctaggtcaggtcctagtttgggttttagtcccggtttagatctgggtcctggttccggggcctaggtccctggtctaggtcccccatcgaagtctagttcctaactcctggtttaggtccaggttcgtgttcgggtcccgagtctttgttttagtccaggtcctagtccgtgtcaggaccaggtctcggtcctagccttgatctgggttcaggtttgggtccttatcagggtctggatcctggtctaggtcgcgggtctcaggtcccggggagggtttaggacaaggtcaag

SEQ ID NO: 134245 - DNA, 911 bp, Cannabis sativa
atgtgaacttaaatgtcacaatataacaatatatgtaaacatgaataaactaatttaaaagcacaacacaacacggtaacaaattctatattcataataataaatatgtatttattaattataaataatataataaaaaactaaaatatcataactctataattaaacctattatatattttaaaactaaaactatatatcaatttatatgcaaagtgtagtcacttgaaaatttgagtattcaaattctaataattttatttatatgattattataaaatattgttgaaattaaaaaaattatatatataaatagttgaagttataaaaagtacatattgtatagtaattagttcattaattgttaaacaaatgtaagaaagtagagcataaatccgatcgagcccatataaaaaaattagttggcctatttaagaaaaatgggtcaacctgatcaataaagtataacataaatttgagcacgacccgaaaatatcaagtcttttacctttaaaaatattgacatgacataacacgatatattacttcacgacacgacactacaaaactcatatttaaaaaaataaagagaaaaaaaatatcgatcgaactagtatgcatttacaacatgtatatactctataaatttatttaatatgtatattatttttctaaatatattttatttaatataatgataaattaatatcctgaattatatttacatttgttatatagtatatattttctcattctaaatttgaagtaaataatgataattctacttacggacttaaatttctgcaaatatagatagagtagacacactaagagcatctctaatgatgcactaaatatagtgttacactatcattaaatttggcgtaaaaaagtatttccactccaaccac

SEQ ID NO: 134246 - DNA, 1293 bp, Cannabis sativa
ggtttgctatgtcggtaatcaaaatttcacccgcaacaacaatccatattcaaactcctacaatccagcatggaagcatcatctgaatttttcatggggaggtcaaggagcaagttcaagtagagcacaagcataagaaaaataaccctttcaactggaattttctcaacaaccaagacctcaacaaccacaccaacctcaagcctcttaaacaagttctttggagagcttaatgagagattatacggccaagaatgattctgtaatttaaagccagacaacctcccttcagaatcttgaaatttaattggggcaattggccaatgatttgaagaatagaccacaaggcactttgcctagtgacactgaaaacccaagaagagatggcaaagagcaatgtaaaacggtaaccttgagaagtggaaaaattttggagtcaagtgtggcagcaacaaagggcagcagccctcttcaatccaaaaagagggggaaacgaaaaaaaaaaaaactagcaattttagctgctgaaattcccccagtagttacagcatccgatcaacattctgctgctgaaaagcctttgcaaaagccacctccaccatttcctcaacgattcaagaagcagcaagacaatggttaattccagagatttcttgatgttctaaagcagctccacatcaacataccattagtggaagctttggagcaaatgccaacctatgtaaagtttttgaaggacattttgacaaagaaaaggaggcttagcaagtttgaaatggttgttttgacagagggctgcagttttatgttgaagagtaaagttccacctaaattgaaaaatccgggtagctttataattccaatttctattgggagtcgagatgttggaagagctctttgtgatttgggagctagtattaatctcatgcccatgtctattttcaagaaattgggaattggagaagtaaggttaaccaccgtcactttgcaattagcggatcgttctatggcccattcggatggaaaaattgaagatattttggtacaagttgataagttcacttttccggccgatttcattattcttgactatgaggaagatagggaaattccaattattttagggaggtcatttcttactacaggaaagactttgatagattttgaaaaatgagagcttaccgtgagcgctcaagatgagcaagccacattcaaggtctttcatcctatgcgtgctccggatgcaataggagaatgcttagcaattggagatatggatcctaacatggttga

SEQ ID NO: 134247 - DNA, 687 bp, Cannabis sativa
tttactaaaactatatttaattatttattatatacaaaaataaaaaataaataaaaatatataaatcttttattttttattgtattttaaaaagtccttcatatttatatttttattatttttattattaacaaacttcatcaacttagagttttctataaactataagttgtaagaatataatttaaattattatatattatttttatcaaatgtgtataaatttatactatgggaaaaaataattaaaatatataaaaaaaaaaattatgattataaactagattatagcgttctcattattatagtaaaattttaaaaactcactgcactttaaaatttatattcttaccaaacactaaactcaatttttttttacagttttgctatagttatttttctcacagcacaactacagctgtttttcccacagcacaattgtgtcactggcccttataatgcatcacatttcctaaggtaggagcattttttatctttatataatatctagtaaaattatatcctaatttttgtgtatgatggtatattatagttatagtaatcattttagttatttttgagaattttaaaataatttatttcacaaaaaatagaaaagagttcaaatatatatcatattttcgcaggatattatatgaataaaattataatatgtacaacgtcata

SEQ ID NO: 134248 - DNA, 1230 bp, Cannabis sativa
ttataacctgtttgagttattttgtgttatttatttttattcattataatagtcatgcaattttattaatagcaatcaattaaaataatagtttgtaatttaatcaggacatcttccccattagagacacgactagaattagaattaaaaaaacgagaaaaataatcagtcgcctattttctaaatcgtttcacaaaaaaaaattaaaaataaaatcaaatgaaaaatattgtagcatcacagttaacattaagaacacctattgcttagaagacagtagaaactgttgcaacaggttcattcaaccttgtaggttgagcactcaactattatgcaagatacgtaactgcactactaacaacctcttcagtcctagagaacttcccaaccatcaaaaataaagaagaaccaataataaaataaaaccatgtcacacagacaagactaaaacactcataacaatatcacatagacaacactcaacactcaaaactatgtcacagagacaaaactaatcgtagtaacaaaaatcaaattgcaatagcaaaatacaaccccgacaaagctgtgcacctatgcccaggaaaggctggcgggcctggctagagaaaaaaagataaaatcatgtagttataaatttaagaacgataccttttttttttaatttttttagtttagttaatgacgccattaccaaaagtaattaagatcgataaaaaagagccataactcatactatcatatttacgagtatccgctttccactgtggctaacttcaacgaatcatcaagctcactcagtactcctcttttcgctcctcttgcacttacacactctcctacctgtcaaaaatcaacttccaatatgttacacttcctttatgagctttctcatgttccagataaaaataaaattacctctaattcttttcctctcttaaatccatatcaacctttcaccaagactcattcctcttttactagatccattacatcatttattaaaccatccttcaaagctccaaaagaatacattcaagtctcaaaattcagccagtgctaacttgcaccaacaccagaagtccaatttatgacttttaaaattccacctgaactctctccacaatgggtggcacagggttatacccacatccactttggtactattcaccttgctctaaattatcatggtaggaagggccttctagttagcgctcgtattggtcttct

SEQ ID NO: 134249 - DNA, 1840 bp, Cannabis sativa
taaaataaattccaacatttactactcccacggtatatggaataagtacttccatgcagccaactacacaagttagtcttttcgggtttgtagctgcacaaatcgaatacagtgccgctcctaaacaaacgaactaagaagtggaagttccagactccaatataacccactcatggagtaagaggattttgaagggttcaaatcggagtgagtctgtgaagaagggaaaaatccaagagccaagatagaccgagtacataagtctcatagatactcgagaaaatgtatacaagacaacttgtaagatggtacactacaggaagtctttgccaatgtataaaggcaaaaagtaaagaagagatccgaacaaaaagtgttaatatcatggtgatattggtcacaccacaaatgaatgtgactatataaaagatgaaatcgagggattagtgcggaatggacacttaaccgattgggtaaggatcccagtcatatatctaggacaggcagtcacacacagacaatttttcattctaggacaacatggagccataaatcctcctcagagagtaggtcatccacaagttcataaaatacaagccccgaatgcacaagcccttcagggggcacagaatgaaacccatacccttcagaatctacattactagtcttagatggtcatgtagcaactattttaggtggacctcatattgttggaagcactcgtaacacacaaaagcagtacctaaatgagttgaatcaaggcaaagcttgccacttggtacaatcacttgcccaacgtccaaggatgatgaatttgccaatgacttttacagaagatgatgccgggttcgtgcacttccctcataatgaccctttggtaatagaggctcaaatagcaaacaaaagagtttccaaaatcctcataaataatggaagctttgtaaacatcatttttaaaggagccttccatgccattggtttagtggaagccaatttgctaccatgtctgattcaactacaaggtttaatggagatacactaatccccatgggcaaaatacaacttttgatgactataaatgggaaagttcctagaagaaacacaacatcatcattcaagtacaacacatttatgatagttgactgccctactgcttgtaatgctatcctaggaagaccatttttaatagatttaacagtagtgacatccatctgacatctgtgcttaaaattcccaagcgatatcgaaagcattgggacaatcagaggagatcaaaaaagtgtgaaaagttgctacaatgtttcaaccagaactgtactcatggtccgagaaggaaatgactctaaagtcggaacatcttcccagccagcactgggagtggtctaggaagatgagcttgatccacgaattggcgtggaacgtatcatagaaataatggaggaagtggaagaagtatgcatagataatggggatcccaccaaggttatctgagtagggaagaacttgcctctggcagtgaaagaaaagataatttccacagtaaaggcaaatagtgacgtgttagcctggagtcattttgatatgactgacattagtccccatgttatttgcaatgcattgaacattgatcccaatgttgaaccagtccgacaaaagcgaagaccgctagatctagcaaggtcggaagcagtaaaaacagaggtggacaagttgacaaacattgatttccttaaggaagttctgtatcccatatggcttgccaattttgttctggtaccaaacctatgggacttggagaatgtgtatagatttcacaaatctaaacaaagcttgcccaaag

SEQ ID NO: 134250 - DNA, 530 bp, Cannabis sativa
aaaaaagtttatttacgcgggtttaaatatttaaacatcgtgaccaagaatgatagggttagggttagtataaacgagccaaaatcaaaacaaatgaagcgactgttagaaagtaataaaaaaaactctacaccaattaatatcgttggttatatgaaaatgaaaatatgaaaatttaaaaacgtaaagaaatattttgagcaacaataagagaagagaaaagcttgtatttcttggagtgaagttaatgttataataattttccaaccccctctgatcgtatttgagaaaggggtattataggatctaatggcctaggatacattagtggccccaagggacatggtgatatccttagtcaggatttcaggccttgtaggtgtagtacccctactacttgtaccttcttgcagggggtatgattgtactcccttttgcatgcacgcctcgtcctttgcatgcatgcctctttattttgatattttgcacacgcaagtgcacatattgtgacaagtagtaaactcaccaag

SEQ ID NO: 134251 - DNA, 611 bp, Cannabis sativa
  modified_base (53)..(75): a, c, t, g, unknown or other
  modified_base (239)..(242): a, c, t, g, unknown or other
attcaactcagcatttggatgaatgaatgactcactcatcactaatcaatttnnnnnnnnnnnnnnnnnnnnnnnctctctctctctctctccatatacatatagacatacatatacatacggacagagtgacaaaggtttcaattttggggaaacagagcaattgattcatgaaattgagaaacacatttaaccgaccacatctgatttccaccacgcacatatatatatatatatannnntatatatatatagagagagatacctggttgataaagcgaaagaaggaagaagaggaagagaggaggggctagggcttcaccaatcaaagaagagagagtgttttgtttcaaagcaaggctcactcctgagtaaggaaacctctgtatattattggtgtaatatgtcaatttcaaataaaataaaaatgtaatgcaaattttgttggaaagtaattttttttaggattttccaggcaaatttccctaaattaaagggattatttcactaatacacaaaaatatggttttacgaaattttaaatattttaacaatttttttgattttatttacataaaatacggtatgtttatgttgtactcttgttaatt

SEQ ID NO: 134252 - DNA, 788 bp, Cannabis sativa
cttatccattagacagagagggtgctcccccctctcctgtcttgactatctcagtaggcatattctcctctgcattttctgtgatttcatcttcttcaagcccctggaatgagttcttcattatcaccccattagtttcagttgctcccttctcacggttagcagtattttttctgctatgtactttggtaaagccctcttcatctacctgtggctgcttcctgttgtcttttttaataatccattgctgctgccctcccaccttcttcttacaatctgctgcagcatgacctataccagaacaatgtgagcaagaaattggcttccattcatatttgattcctaccgaagtgatcgaaccaaattcgttctcaaactgtaaaaaagctggcaggttttcatatatagctaaacatatatatatatataaacgttaataatagtataatatattaatatattaataataataataataacagcataataatattattattataatatatattaataataatttttattaatggttatcctatcatttcttagccactaagaatttctacttctaaggcattaaactaaattcggcacactcttaattgttccaatatcagcattattaacttatcacaatattcccattaattctatcaattgaatttgttatgacatttttagcacccgatcgagtctccaaggtcgccgaacctgaaaaatatttttattccacatataactcatatttcattcacacatgctatataaatctccaaaatttataa

SEQ ID NO: 134253 - DNA, 543 bp, Cannabis sativa
aatatattctgcattttttcgaagtcgattactcggttggataagaacctccctaccaagcaccaccgatcatcaattccttcatcctgttcttccgccgtgacagtaacatcttccaagtcttcctcgtcaatgtgaaacatcagagtttcattctccaaggctcctgtttgtcgactagaagaggccataatgaatgacgatgaagcaaaacaaaccaatcccttttcccagagacgatagcagcaaagaacaaggagcccagaaaacaaataacaccctctactggaatagaagaaaagaccaagaacgtccaaaactaatctcactcactcaccaacaatacacagaaaccatgtcaatagacatgaacatataccagcattactttaagaaaataattattagacacttttaaatatgttcttcttaaaagagggaaatgtgtaaaaaaaaatagagagagataaaggagggatgataagcttaattgaatggtagaagaaagaaaaagccacaaaccataaaggacattaagtttgg

SEQ ID NO: 134254 - DNA, 1108 bp, Cannabis sativa
  modified_base (1018)..(1021): a, c, t, g, unknown or other
acctgggtttcaaacccagaaaccagccacgaattccacaaattttagctttcaaaaccaatccaaactcatacaaatcaccattaaagcttcaactcttcaaataggtcttgaaataatcataaagggcatttaacatacatgctcaagcatcaaaacccaatattaatctcataatttcagtcaagataacaagtataaaccaagcttttaaactaacaaccttcaagctcagccaacatgaactccaacccaattaaatcaatttccagcagcaaaataccttaaaaacacatagtttcaagctagaaaaataccctataatcatacaccaagctcaacaaacatgaatcatgcaatttctcactcaattcaccaaaatcaacatcaaaaccatgaacattaagaacaaaacaacttaaaacatgcttttcatcaacaaaaaattcagcaagaaggacataaataaaaatctgtaaaagctacctcaaaaatagctagaagttccttaaattccaggctcaaaaatctcccaattccaagctccaagtcaagcaatttaccaaaaaccaaattgagattttaagagagagtttgagagagaggggttcgggttagggggtgatacaacaagaaaattcatttctttttcctgaaaaatccacttttatcacatgtaaatcaaataaggtcaaaagaccattttgcctctacggccatatatcatgcttttacactcacaagggcaaatatgatatttcatgcacaattcaattccaattaatttcatatttcccattaataaataaaatgccaacatttaatcccacattgcatttcgggcccgaacctggttcggcccgaaatacccggctgtgactataccacgccaacttgtcagaacacacctgaaaaagacaacaaaggcatactatataataatatagttccaaaagcacgtaattaagtaaatctcatcaatttacccttcttcggtcataattactaaaatgccccnnnntcaccaacggggtcttaacatataattaataacattaattcacatatattgaactatataataatacaattcctcaattattcataa

SEQ ID NO: 134255 - DNA, 651 bp, Cannabis sativa
ttttataccacaattgaattaataagatactaaatacaaaaaaacaagcaagcaaattaaccttttcaattaaagctaaatgagcttttctttctctgattaatcgttgtaagtttgctctttttttgctttcttctctttcctctttttctttttcagtctttgtcttttcgaatatttcccgcgtccttttcttcaatttctcatctacttcgatctttgtagcttggtaacttgagttggcatgcatagattttgcatcaagaatagttttcttgagatgacattctgtttctttatttaaaagaaaaacatataagttaataatttatcttaactctacatatattacaaattaatattaattaaattaacaaattactttttccaaatgacgaagatggaattatagtctcactagtagaaattatcgatttacgatatagagttgacgtttcagaaatttgagattttccgttattaaatcttttcatttcaaatttattcagtgatcttctctggataggttctttagcaccggattgcttctctacctatatatagaaattaatatataatctattagaaaatgcatttatatttaatacataaaaaaacaaacatgtaccctaattaatatatttaattaag

SEQ ID NO: 134256 - DNA, 843 bp, Cannabis sativa
cattggccttacaaaatcaaaaaacaagccacttacaaaactaaacatattgccttacaaaaccaaaagacacattagccataaaaactaaagaatgaggttttgctctcatacagagccaacttataatgggttggatcgttttcatgaaaaatggttgcccatttctttggttctctctgaatgtttgtagaaccaatgatttcctcttctctcaacaacaaaacaaaataaaatgtattacaatttagaataaaattattaattttacggaaataaatttacaaaatatatattttattaagatgtaattattcttatatagatgtatactttgttaatacgggacttggaaaatgtataattaattataatttagaggttattttttatttataattggctcaaattgggacttgattttttttatatataaaaaattagaagttattcttgaatagagtattcttaaagagaggttctatattgatgagaaaactagtggatcctaaaagtaagggagaatttcttcacccaattttctaagttatgacatttctactaaattttttaatatatttttaattttatatattaaaaaattaaaagacatatatatcctctaaaattatacgataatttgtcatttggaatatcactattgtttaattacaagtaaaaaaaaaaggtgacatctaattaaattttctttctcactttgtttgattgatatttttttgtatgctttgggttagggggtgggcatcatccaattcaattcaattgaaccgaaccaatccaatccaatccaattgcaaaaagttggatatccaattacaattg

SEQ ID NO: 134257 - DNA, 793 bp, Cannabis sativa
ttttggctaacataaagatatctattttcatttgtaaataattgtaatttttgttggtttctgaaaattaatgaatgttcagtacttcaagaggaccccaatggaatcaatattagatagccaaataaagttcaaagaagatcgaccaatgtcagtgatatttggtccacagtatatgagaacaaagatgtacccacatagtgaaccacaggcaagtaaaattaattacataaattatcattatatgttgcaatgcatattattgaattttaacatatacttaattaattggtgcaggaagtagaattggcaaaaatgttagtaaggccaactggactttacatggaagattttgataaggaaaatttattgagtgaatccaaattcggatcagtgaaaaaagtatatattttgtgtgaagaagatgaggtgatgaaggaagagtttcaacggtggatgattgagattagtgatccacctttgactaatgaacaagtcatacttattaaaggagctgatcatatggtcatgctttctaaaccatatcaactttcccaaattttcactaaattaatgattactcacagttttatatagttaggctaattatgatttttgcttcttgaactttgacgtgtatcaaatcatgcaccatgaacttttaaagttgttaaaaataccatttgaactattaagattgttatttaagaacttttgtctaatttcattcaattttattatttcagttattgtttatgtactaaactatgctctctagactttgatatctacc

SEQ ID NO: 134258 - DNA, 1551 bp, Cannabis sativa
ctttttatttactatcttatcattacctgaattcatagtattatgcgatcatgaaaaaaactgttttaaatatggaaacagacagaaggattattgaaattatcttataaggagtgtagatatttctaaaatattataagtaatataataatatttttcaatcaaaagtggaaccgacagttttaaaaaactattgtcacgtcttgtctaacttatatcctaatgacatgtgtcatgcaataaatatagtcataagtattatttattgaggaatgatagagaaactttcttttgctaggtgtctagcaccctcctatgtgttaatatcgctattggttcaactaagtatcgggtcccacacaatttaatataatagtttttagggagtatcgctaactaattgcaacgtggcaccactggtgcctgataataatgctcttcttttgcactctttttacactctttttataattaagtgacatgtgtaatcttataagttatgtttaaaaatagttacaattatactttattaatgataattaaaatgaatcatctcatttacaattatgcctttgtttttgttaaatgataatgctcttcttttgcactctttttaccctctttttctaattaagtgacatgtgtaatcttataagttatgtttaaaaatagttacaattatgctttattaatgataattaaaatgaatcatctcatttacaattatgcctttgtttttgttaaatgataaaatggactctgtatttttcaaaatggtaaaaataagactatgaactttattttcgacaacttttcttttaatataactaacttgaagataattcctaatatgaatagatacagaaaatataaacagttttgtcgtaacacatttaaatcagatttttattaaattttattttaataaaaatcagttcagggtcttatttgtactatttaaaaaatacaaagagttgtcatttaacaaaataaagagtccaattagtaacttttacaaaacacagagtccaaaatagtatttaccctactaacaataataggtgtacacaaaatatgtatgtaataaaatgctaggtttgtttgtagtacgcttctaaagggttgtttcggtagattcttaacgtgttttagcattcaaaagagttttttaaactattttctttttcatgattgtgtatattgtagttatataggatcacttgtaatttttcaaaaaaaatcgaatagtttacagttccgaaaataaggttcaaatattttattgcacaagaaactgttttttcttatgtgtggtaaataactgtttgaactttattttcgacactgtaaactattcattttttttttttgaaaatttacaattgatcatagatcgctacaacgtatgcgtccccatattgaaattacagatagtaaatgaattatgatgtataaaatggtttaccctttttcctcactatcttaattcataatatttgagagagaaagtgcttacggttttggcattgttgctcgagattcgacgggcca

SEQ ID NO: 134259 - DNA, 770 bp, Cannabis sativa
aaaaccgtcaactatactataggcgatggttttataccattgcctatagtatagccgaaagcgtcccctatagtatagtcgatggttttaaactgttggtaattctcttttacaaatacacagaatattttaaggcacgtttaaaaatcgtcgcctatacctctcaatagtttaaaaccactgggaatacctgttaggttatttttagtattattttaagattaatttagtatatttttaatttagttttactcatgtttggagtaattttacgctttttatcttttatttttgcagatttaaagtagaagaagattagaataatatcaaaggaaaaagatggaaaaaaaagataaaaaaaatcacataaaagataaatgggcacaaagtggggatcatacctaggcatggaaataccatgctgctactcgtgtctgtgaaggcttgaagaacgtgtaataagctcaacacgggccacggcatagggagagcatgctgtggcccgcccccttaattcaaagagaaataggagtttttcaatgttggcttatctttcctatctaaatcaaagctgaataggattttcagcatgtgtaattttttctatcttcttattccctcattggctatataagaagtgaacttcagttgatttcaacaagcaaatcagaggaaattagaagcaatcaaggaggacgaaaattggagataaaaatcaatcaggaaggctttttcaatggggttttcaacattcttttcttctctattct

SEQ ID NO: 134260 - DNA, 1214 bp, Cannabis sativa
agtcatttcacatgtttatgttttatactaactgttatttaaatttctacacaggggggtgacgtggcatctaccaggggggtgacgacacgtggaacagattctatgacatggacgaaagaccccactcgtaatgaaccatgcagggggatctaatgctcaaagtccgtaggagctgggactttcgatcagggtatgcaagaacacctgaccagctccatcatgtgggtagcttgcataagctgcccagagagtgcgagttggacattttcacaggatataccccacatatcctcgtgcttgcaagacacgtcaagatccctattttaatgagacagatatgaagtatcaaggaagaaaggcaacatgcctagtttcctatttttcttattataattatagaaagtaaatagtttttacattttatttcttactagttttgggaaaccaattgatgtaatttctccccataaatagtggaagcatcgcactatattcagggatacgaaattcattcagaaaatatgagagaaatctagattcaagtgtgtaagaactcagagatcattgtaagagctttcgagagagatcaagatttttttgcttctctactcacaaatcaatacaactaaaggggagtaggctaatcaagggatcaaacctctataattctagtattttctttactttacattattcatatttattgtttaattatttttaattgctttaatttgactcactatcattggtgctttcattgagagtaaagaaactcgagtctttgttttaagtcttttcgggacacaagatggttgtacaaacatggagaggaaatcagactgatccaatggctacgaatcctaacgtacaaacacctgcaaacctcagagatccagtcaagatagatcccaacctaactaatcctcatcaacctataggcccacaaatagtagggcaaggagtgaccacccatctagctaggttcactctgaacgtgcaagaaacaggaacctagtacaccaagcaaactagccccggtactggaattccatctgctacaaattctcaaaggtcaagcggtgatgacaccgagatacaaaatttacgagctactctagggcacatgcaagagcataacaacatgttgggttttgtgtcctaaataaaactcatttcaataatataatcaaatttactaattaataaaatat

SEQ ID NO: 134261 - DNA, 866 bp, Cannabis sativa
taattatctgctaatttcaatttaagctaagcggtctttacactattaatctatgacaggtcattaagttagttacaaagtttgttataactttataactaactctctgagtcactgttctcttctacgatatataaaatacagcaaaaaatattttataacagagaacaacagaacaaaaccagatttgtacacaggaaaaatacacatatcagattgagttttggaggaggcttacagtgaggtaaaccttggaactctagggttagggttcggagatccaaatttcaaggagagttgttcatgcaaaaagaaaggagaagaagaacatcagtactgacttagagagaaacagagtgaaaagagaggattaaaacattgtaaacaattagggattaccaattcgtacctatgtgttttggaatactagctttgtaatctttcatctttgaagatccatagtggaatcgaggcaagctcgaagaggacgcacccaacacaattttggggaacctctataaaatttggtgcacactttccatttttcttctctgtttttctttcattgtgtttattgttttgtgtatgtttgtgtggttcgaatcgacttcggaaggggttaatttggttctggtttgtggttgctgtcttcatgttcttcagggaagaaccacgaagaacagctctgctagggttattgtttgtgagtcgtttgagtgtttgtgtatatgaatggggttctattttgttctgaggtattagggctaaactagggttatgaaacgacttgtagctcatcaaaaagggggctgtcgtttgggcttaaatcaattgagtcaacttggttttgactcagtgggaaaggt

SEQ ID NO: 134262 - DNA, 1300 bp, Cannabis sativa
  modified_base (976)..(981): a, c, t, g, unknown or other
  modified_base (1053)..(1053): a, c, t, g, unknown or other
tgtttctttattgacgttgaataaaatagattacattgaaatggagttttatttacggcataaaacccaacagtaactaacttaacaacttattaattgcagccaccaaccttatgatctttatcctgagcctataaataccaccaacacttatcattttaacaatacagagtagacgagttttgagaggagattttgagattgagagagagagagattgagaggtagagaaagaaaggtaaagagaaaagagatttagattttgtatgaagaatcttttgtagatgaagaaggttcttgggtaagagtttgatcagagttgaaacactttgagagaatctaacagagaatcaatatcattgtattgtacccttattcttgctcaatcaataaagaggatttggtagtgttcaagaactggagtagagtcatagatcatatcgatctataggaattgaaccaattatatcttggtgttgattttattattttattgctttaatcgattctaattttagatactctattcattcctgtttttctccaattactgtgtgttttattaatcttctcattgctaactgtttagtgattaaagttttagttaatttgattctacaaattagttttaatttttccacaaatgaacatatttcatttatggcattggatatcatgtcaagtaccaaagggatatgcaagaattttcaagtttagatttgatgatcatggaaagaggtctttgtaataataataagggatattggcggctaaaccacctgaactttaaattttttaacacttaaccataaaaattaaaattttgacggtaaaacctactgaagccccattctatttttctctttacacttctgtcaaaaaatctcagttaagtgctacgtggactgccacgtgtacacgtatgtacacatgtcaaatttttattggtccacttaatattaattttaaaaaatannnnnnaatatttaaaaaattaaaaaattagaaaacaaataattttaaaaaatagttttttttaactttttttttttnttttctttttcttcttctttctttcttaaactttcttaaagcttaatttctcagccctccctcccaggccctctctttctatctctcgtctcggcacccaagatctcgtcgaagctggagcttaagcacccaagccctcaccgaagcacccaggccctcgctgaactcccctcgctgaactcgaacctgtcctctctttctctctctcaatcttctccttcctggaccctctctctctctctctctc

SEQ ID NO: 134263 - DNA, 556 bp, Cannabis sativa
  modified_base (35)..(44): a, c, t, g, unknown or other
  modified_base (501)..(514): a, c, t, g, unknown or other
ttcacttttccacttttaaaaacagaaaactgatnnnnnnnnnnttaccaaacgccacctaaattattaccgttacagcgacaatggatagaacgattggtggtggtaattcacgaaggcttggacgattgatgctgaaatatgtaagaatttttcttcccaagcttatttttttaggttaacttgtaattttcatatgtttaattagatatattaacttgttaacaattggactaattttaaagcatttgtgtaatataattaaatttttttaattactttcataatattaatttaagtatattcgctagtcataaaaataatttaaataaattaaatttcaaaatttataatagattttaaactaaaaaaataaactaatttataatattgtggcgttagtgttttagccttttccgtcaggtgttttagcctttttcgtcagttctgattgcatatggtatcaattattagtatataactgtaaagcccgcttagttnnnnnnnnnnnnnncagttgtttatgtttaatcatgaaattatttatagccattta

SEQ ID NO: 134264 - DNA, 584 bp, Cannabis sativa
  modified_base (537)..(544): a, c, t, g, unknown or other
acctgtttatttggaatcttgattatgttaccgatcttgattctattagtcttatttggggactaattctactgctctatatatatagctctctttgtatcagttaaacataataataataataatacagagcaatattcacttgatatttgtcttttcttctcgagtactttgtactctttttcctcatatggtatcagtagaaaaccttgtcccttcatccatggcgaggccctccacacgctcacaagatggtcttcttccatccacagatctcacaatgaagaagacaacactgcaccagtccattcctctccaaattgtccaaatcacaacaactctgaacctgctgttgctacacgaagattgactcctgttgatcgattagctcatgacgatgcctccagtccattcttcctcagcacagcagaccatccatggctcattttggtctcgacagttctcgatggtgctaatgttggatatattttatcaggatctagatttactaccaagtatgtttgattaacaccctannnnnnnntctaaaacaatgaaataaactcataagagtttaagaaaac

SEQ ID NO: 134265 - DNA, 634 bp, Cannabis sativa
ttattttataaaaaatgataatcataatctcttgattaacttttaagtttatgacaaaataatttttttataatggtagcctaacatttacccgtcattgccttcgccgtattcaatgtatacgagtttatcaaatatacatgaatgtatcaaataatatgagttatgtattacacttatctaagatgataatctaattgttggtaatataataagtttgtagtctctctcttttgagtgttttatgtatgaaaatatgatagtgtgagtgtccgtacgtcccttgcctttagtttgattgtgagtagtgtatttgatactgatagcttctaagattgttgtggtacgggttgtttggttcctgtgtggttgtatgtgctatggcttctagtagctatgttatgggtgatctggcagaccaatatgaggcttttcagattgatgatgaagaagagggagttcttattgaaggggatgcggatggcgatgaacagaccttcgatgatagatggtgtctcgtcgggaagtttcttacgggaagatctattgatttcgatgctatgcgacatctaatggcatctctatggcagcccggtaaaggtgtttatgttaaagaattggaagctaatttata

SEQ ID NO: 134266 - DNA, 1033 bp, Cannabis sativa
aagaacttgcccaatctgcagtcctgtaatctcagccatgacccgacccttatgatcccgaacaaccccaccaaaactatgcattccttcctcatcaaacagtgcaacatcaatattcaccttgagtttttcataacctaatttaaaccataactcaaccccatctgaaagataccaagtatcaatcgcaggaaacaaagtttctttcttgagctacactttgtttcctcacccaatcgtgagaaaaaaatgaagaaaatagtctccaaacgaccctgcatcaactagaatcatagggaaacccgctacttgtcaataattctgtgtaaaatctcaggcaactaaacaatgtaaaattgattcaactgccccatgactaattggacacaacaaagagacatccacatgtttagtcttcaactgaactctcgtaggaaaacacctactaactaccctccatacacaattctttgcctttggaggaagctttaattgccaaaacttcttccaaaataccacaacctctcggtccacattaccctcacggtttgcctgtaataatttaaacgaactcttaactgtatactcgccagaagattcaaactcctaatacattaccagtaatccttagttactgaattggaaaggtgaataccaaatatattgactatcacttcctcatcaaataaatctttgacaacatcaacatcccaagccttcttacccaccataaaaatgctactaacattttcattagccaaatataacttgaatcaaatcctctccattaccagttcccttccacgctcccttacgaatcaaatcctttaccgcaacaagatttctccaaatataacttgaattattatcaagttctgccgaaagaaagttcttatttttaaattactgagctttgtacactttagaaaccaatgaatcaggcttggttaggagcctccaagcttgtttacccaatatagccatattgaaatcatgaagagagaggaaccccaatcccccaacctccttacta

SEQ ID NO: 134267 - DNA, 559 bp, Cannabis sativa
atgaataaaaataataatcactttgtcctcaataaaaatcatattaagacttatcaattttccatttttcttatcaatatttaagtcggtaagaaaataatatttcaaaaaagaaaagagaacgtaaattaaagtatatagagagaatttagtaagtgataaaaaaaatgattattttttaattatcatataaaaaaattcaaaagccatgacatgatgttaaatttcaattatcaaatttttttaaaacatataatttttaatatcttaattaaaaaaaaaaatccaaaagtacaaaaatattatatctaaattttttggagttatcatttttttttctaaaaaatattattttcaaatatcttaattcaaaaaaaaaaaacaaaagaagaagttagaaatataaacaaaaaaatgcatcactcacgtgataaaaaaaagccaacaaactaaaaaaagttattatttttttaaaaaaatacaataaaaaatgagagaattttagaaataataaataaaatatacattttatatcaattaatatttatgaagctaataa

SEQ ID NO: 134268 - DNA, 745 bp, Cannabis sativa
tacttttttacagccctctcgaaagacctatccctactcccaagatggtcaatcaacacaggctcctgctaactcttccccacttccttaggtcgtgcgacttccttctaaatgaggccaatctgagatcggtggacctccttactaacacagagtatacttgtgattataaatttcccaagtattcttcttgtttcctaaggaggataaggcatgggatcgcctggctagggaaaaataccttcaaaatactgtccctcgagaagccggtgaaggagcatgttgtggtaatcaatgtggttgatcacccacagtacttagggctgagcgtaacatattagttacattccgagatatttgtcttaatttctatatttggaattcccttctcgtagaccgaatcgcccataggtttgacagctggtaccctagattccatgtccagattaattgtaatgagttatattatggtatagccgagcaatatggcaccatgagagatagggcaagtcatatagacggaagctagaatttagaaccaatcgagccctttgatatattcaagattacaggccgtagggattttagtgaatattatggtccttctaccccctcttctagtgatagctcgccttttagtggctttggtaaattccttaggtggaaaactatacttccccttcctatttcatctgcctttttaataattgtaacactttattttgtcttgcagacatgggttttg

SEQ ID NO: 134269 - DNA, 1050 bp, Cannabis sativa
tatatatatatatcatatttcagccacaaatagttttatctgtacttaatgtttagaatcttacatttattaatgcaaataaatgaattacgttatttattttttttttttttgagataaatgaattacgttattaatccctggtaaaataagaaggaaaaaactgacctaattacagttacacgtatcataattgccagcattgtcattgctgtgtcatgaacaagataaggttaaaatagattatttcagttacaattattcaatttatttgtaacttatgaatagtattacattaatttatataaatatataaaagagaacggtaaattaatgatgtggcacttttaaattagtttacagctatttatttattttttcaagagatggcatcatctccttctaatctattattatttttttttttttgtaatttatgatttttataattcttttgaacatttacattaatttcacataatttttttttgaaaggtaaaatcaacttttattaaccttccaaatcagtcaccaaaataggcaacaaatcagttggaatatttcccatactgaaaatacaatcaggataaaataaagatgctctaacaaactcataagcaactttattaggtgaccgcttaacaaaacaaaaataaacattatttaaactaaccaacatggctttgcactcctggatcacacatccaaaatgagaagacagaatagccgagttccacaaagcttgtacgaccactaagcaatccgtctcaacccaaattgaactgtatgtttggtctttaatccaacttaaagcttcctgaaagctcagtactcagcaatggactgagcaatataaccattatgtaacttagtagatgagcataccattgtggtcacgcaccaccaaagcacgtattgttataattattacttaggttttcatataattatgattagtataattatagaaaaagttcaaaagacatatacctttaacattagtatttttttattgttataaaaaaaatattagtatatatataatttgta

SEQ ID NO: 134270 - DNA, 873 bp, Cannabis sativa
atgccgcggcacctgggacaaaacccaggttccaccaagaggggcgggccacggcatgctccagagcatgtcgcggcgtctgggttccaaacccagattccagcagccagaacacgaaaactcagcaagaactccaatcttttcacttcaaattcacaaccaaacttcaaaattaacaagtaaggttgctagcaaacagcaaggagttaaaatccatgtttcaaacactaaatcccaacaataaactcacacttacagcttgtacaaaacacaagaattcatgccttaaactagctatacacaagctcaagaacttgagctataaatccttcaaacacaactaatttccagcaatcatatatcaaaataacataaatttcaagttagaaaaataacctagagtcacaatccaagctcacaaacatgaatcccaatcaaaccatgaaatttctcacttaattcatcaaaattaccacaacatctaagaacatgcaacctatcatcatcatcatcatattcatactttcaatcaaagaattcagcaagaaattaccaataaatcttacataaactcagcaagaagttacctaaactccaagctcaagaacccacaactcaaagcttcaatcaacaaccaatcttcaagcaattcttcaacaattcaagttgaaaaatcaaaagggttaaatgggagagaggggtttgggtttgagagaaaacacccagaaaattaattatcaattccctcaaaaatcactttttccaaacttaataattagaggtcaaatgaccaaaatcccttagggcccaaaacacacatattctcccactcgagggtaattttgtcatttcatactcaatttattcccaaat

SEQ ID NO: 134271 - DNA, 611 bp, Cannabis sativa
tagtacatatcaaaattcgggagataaaaatcttaattagcttatatattatacgaagaaaaataatattattacatgtatgaatatgaaattcttaaattcaattctcaactaaagcattagcttatattagttacatttatatacttaattaacttataatgataattaaattattcttgattaaaaaatatctatattaattagggtactttaacaatacactcccgaaaagaaaggtgcattatgcaccctttttgtattttctacatctagatttagtcatagtttgttttatgtaatagtgtacaacaaactgtttaaattttattcttgctattttttttttaatttcttaaaaatttacaaaatatcctaaaatgatcacgttatacacattcatataaaaatgtattgaaactaaaattatgtgaatgtcaaaaacactcttcgtataccataaaaatttctctagaatgttaatcataaattttttagccctcactacaagaaatccagcttttaccggcgcattgttgcgccggcaaaagtacactgactgcgccggtaaagctttgccggcgcagttgtgcgccggcaaagcttatctg

SEQ ID NO: 134272 - DNA, 730 bp, Cannabis sativa
actctacttatggctcagatcctacttcagaactctgcctatggcttagatcttgcattgaaactctacctacaacttggatcctacatacccctacctggtacttagccccttctaagagctctgtccggtatgtttcgggcttgaatcttcctgaccggtcattggcctttcataggctatccagttcatgattcttgactttatactttgtcgattaccctgtcttttgtcttagtctttggttgttcacctttctttgcctttttgagggatgaacccgcatgaattttgggcaggtgacaaccagaatgacaaagaattatcaagacttatcagtcttgacagctagtccttctgatacaactttgagctcgtcgacttcagttattattctgaagacatctgaggactttgttgtttgtttttatacttttattttgcatacttcatcttttgttcttgtatggcctttaggctctttactttcgatcatatgatatttttgttcttgtatggccttagggccctttacttttaagcaagtgaccaaccttacggtctttaatcctggttttaactttatttgctagacatgcagctgttcgtgcagcttaagtctaatctaaagtgtgccattcacacttacttagctttcaattttttgcttatcaaagctttaaattttgcttaagtttagttgggcttgttcgatgttatacggtgtggt

SEQ ID NO: 134273 - DNA, 1051 bp, Cannabis sativa
  modified_base (160)..(162): a, c, t, g, unknown or other
  modified_base (1011)..(1025): a, c, t, g, unknown or other
aaagaacacaaataatacagttaagccagaatctaacaatctcaagattaagatctattgatctaagatcaactaagtgatattgacttagagagttataacagtacgtttatgatatcttttctattgtcaatgtcggtccagtccgatgtatactccnnncatctgatactagtatactttactgatgctctggaaaggacataccacatatcaatgtataagtaagctttatcgttgattatcacgtcaatgcaaatccaatgcactgataaatcatgggacttaaagtctttgaagcatataatcacaattactttccactgtgatgacatcactgtaattgtgaataacaatatgttttggatttaatagaaattatatattaaaccataaacatgaaaacaacatgtaaacttaaatgacttctaatcttcaattgatagaaaataagattatattaaaataggtttttatttagggcataaaattctaacaacaagatcaataagtgttgaaagaagcaccacaacttagagaaatccaaacaatgcaggagactaatctcctccgcaggtggtggccctgacaagaccaaccgtaaccctactcggagcaatccaaaaaaatgcgagagaacgatctcctccgcatgattcttctcacatgtccaataattctaggcccctgtgaagccgtaagggggaagggacctgcagtcaaccttaggggagggacccagaggctctatcatgaaactaaatggaatgtgattcagagagtaaggaacaactaatcactccacactcggaagtattttcgtgatgaaagaggtgttttgtgtaggcacttttctcgcggtcctaatggcaagcaatatgagtacttccctcgagtgcttggagaagaaattagcctgagcaatcagtttagctctctccacacttgtgaccatgcagaagattattttgagggaaaatagccactatagttgttggaaatattttaccnnnnnnnnnnnnnnntaccatgtatgtttcattaacatcct

SEQ ID NO: 134274 - DNA, 845 bp, Cannabis sativa
acttggctaaatttggatttcagccattgttcatccacacatattttcctttttagggtttatgctattttgaactcaaatttcgtttcctatatatattttcgtttaaagggtttagcatattcccttacgagaaaactatatcaaaagcatattcatttacataacaaaaaagtacaaacgctaaagtatatttcttcctatgtagattattgtaacttgtaaggttgttttccaaatccgcctattttattcaggccttaggaagggctccttccattgttgtatcctacgccatgtggaatcggtcataggattttaagattcatgagcgtcacaactacatttggtggagtatcctttcgaatgctcttcacatggcagttattggaaaatgtatgcatattgaggatacttcatgttctatttgcagtaaccacgaagaatcaatgaaacaatttttcctccactgtaatcttgcttgtcacctttggagatctttcccatggggtatatttccaacactggaatccaaagcttgtatgtgggattgggtgaacttcttatggagcctgaaagaccaaggagtaaatgtacacgaaatgtattttatacttctattgtggttgatacgatttggcaagcctgtaatgataaggtccacaataataatctattcatcattcacattacattgatatgatttcttattattatgtagattatagtgcttctattctcccttgagattttgtgaattgctgagtgctctttgaacatgtattacttttgctgaatttttgtggaaattttactacagcaggcgtaatatcactcacattacg

SEQ ID NO: 134275 - DNA, 1620 bp, Cannabis sativa
tatttttcataaataaaatattaattaaaataaataaaattaatatatattcaaatttttttagaataatatatatattcatatttaacaatatacattatatataattaaaaaaaatacaaaaataaatgttaaatataaatatatttttttttgatgaattagagaagttgtattgctcacaaacaaagatttttacaatctaattgcaccctttaaaggccaagaataactatacatgtatcatttgtcaatattgttcttatttacaatcatttacaacttgtgaaaccaggctttgtcttcttcctttacccgttttggccaacaaagagtaatacgctgcttgattgaatgcttgagctgctgaatcaagaggtctgaatgcacctaactttgacaccagattttagcattttgagctctccatatcatgtacactagactagagatgcaagcagcaaaggtaagcttccgaaacttgctcatttttgctctcccaatccacctgagtaatcgaggaagatcagtagcagtagcatgccagttcagccatgcttttactgctaacaaacaccctgctgcaactgtacagtcaaaaaataaatggtgacatgtttctacatcctgacagcaaagaacacacattatatcttcagtgattcccatccgagctaacctgtcttttgtttttaatctctcctggattgtaactcatgttatgaaactgtgtttgggagtatttaatctcccccaaacctgttggctccagcacactttctcttgatttggcctcaacaaatgataacctttagcaacattataaggtgtatgaatagatacctggccagcacaagcttctttgaacatatctttcagcaaaacaagtcttctccaataccagctccctaccagctcccttggataggaggcttgtattgccaccaattttcatctcggatatacacacaatggatccatttcatccaaagactatcttctttgtttgagatggcccaaatgtacttccctatggctgctagattccattcatgaactcttttgaaccccagtcctccacaggttttagaatagcatagtttctcccaggctatcaaactagaacccgtggctttatcctgacctgtccataggaaattcctacatacagcttcaatatcatggacaattttctgaggcaaaatcattacctgagaccaatatgcatgtatagataagagtactgagtttatcaagacaactcggcctgcaaacgacaagtttctcgatctccaagttcggattcttgtggtcattttctccacaagtgtaaagcattcgttctttgagatctttttggcacaaataggtactcccaagtagtggaaaggcatctgtttttgactgaatcctgatgcatcaagaatcctagttacttcagagctagccatattgctgcaatagatggctggcttttaaggattaggctgaagtcccgatggttggctaaagagctttaggccttgcagaagataatacacactcttgaaatctccgttactgaagagaaggacatcatctgcaaaagcaagagtgaaaaaccgtgtttttgcaaatgtc

SEQ ID NO: 134276 - DNA, 1284 bp, Cannabis sativa
ttctttaatttttaattatatcactttaaaataacatagaaaaaaactagcataaaatttagtatacgtgcctcgcacgtagctttttactagtataaagatatagatgcacgttttatgcaaatttcataaactttgtgacagtttatggggaaaataaactttagcaccactatcgtatcccctacatatttaataccattggatcacagatcaagggacaaaaaaagtatctctaccatagtgacaaaaatgatgtctctatattagaattattatatatatatatatgcacgttttatgcacatttacataaatagagtatcaaactttgtcatgatgagtgaatgagactactcaacatcaccaattcaccaccattaatagattaggcaagtagtagtggtccaatttttattttggagtttttcctattttgagttaatattacttttaaatgaatatttatactactacaaacaaaaataaatatttatattatttattaattttaaatatactattttcaaacttttttattaataaaaatatggtatgaaaatacacttgactacaatatgtaaattacataggcttgaaaataactctaaaaaagtaaaaaaataccactaatgtataaaataaaataaatatgtgtgtatatatatatatatatatttatttttacttggttgaataactaaataacaacaaataaaaaagtgtataacaacttactataacgtgtaaattaaataggcatgacagttccacaaattgcatcaagtcaaagaaaatactatacaaataatctataaaataaatttaaaaataactacataatatttgtacactaactcaaaaatatatctacacattaaaaaaataaatatatacttattttgctcttggttaaacaacctaatagcaatgaataaacaacacaataacaattctattttaatacaaaaattaattggacatcaacacatgcatcaacttaaaaaataaaataaaacaacacacaaattaaaaaaatatatatgcatatatttatttttcttggttaaacaactaaataacaaaaaaaaattacataacaactccatttcaatatgtaaattacttaggcatgaaaataactccaagaaagtaaaaaataccactattatataaaataaaataaggtatttatacatgacattacttacactaccatttgtattgttttttacttttctattttcaaccttattatgcaatggtcttttttttttttttttt

SEQ ID NO: 134277 - DNA, 1267 bp, Cannabis sativa
  modified_base (369)..(372): a, c, t, g, unknown or other
agttatccatctactagtgccacaaactggacatgaatctttatttgcatgttcattgtaaaataaacagcaattatgcttgcacacatgaattgactcataccacagccctaatttcttcaatttttcttggcatcataatagtttgatggaattttattttcctttggaaaatctaattttaataacttcagtaactcatcaaatatgttgttaggaatctttcccctaactttcaaatgcaataactttgccaaaaaattaagagaagatatccaatcacaaccaggatacaactcggcctcaatctcttcaaataattcttcgcgccattgatttgcatcaagattatcatccatttcaaatgannnntgaaggaagtcatccactatcggaatcatctcatcaatttcagggtcatcatcagtgccatcatggtcattcattacattagtggcgctagattctgcttccccgtggtaagtctacttctcgtaaccagttaaaaaaccccaatcaaatatgtgtgcttttacaataggtaaagtttgaagcctattgttcacccatcttacacaaggttacctaattctaccatcacaatctttacatttcgaggccatctctaaaaatgcatttagaccattccaatattgtggacatctacgatttcgcaatgtggtacaagacttctcgattgtcatctaaaattttataaaggcatataagatttcatgttaatgacacaattttatgatatcttatttatatatcattttatgaaattaaaataaaatcatgtcatattgtttattttttaaaatagttcttcatcatttaagagttatcatattattaattaattatatgtatttaagttattattactttattttttatatttattaattttattattcaaaaaaataaattacttaattaattataaattattattttattaattaatcaaaattatttttattattattaattattacttcaaatgatatattaaatttttattattttaaaaaattaaattattatttataatattacttatttaatcatttataaaatattatattattaattaatcaaatctaattttttatatatattttttagtaattattacttttttatatatatatattacatttttttattcaaaaaattaataactaatttaatttattttttattttatttttaaaaatttattacttcaaatttgttatatatatattaatttttttatttt

SEQ ID NO: 134278 - DNA, 1251 bp, Cannabis sativa
aagtatgcaaagtagttggggctctgccagtgggttattcccggaacgatgtgatcctggacatcacctagaattgtctcaatggattccggatagaaaggagctgaagtcgggagccgctttttgaggtagcccggttctacttggctaagaaccggatacttctcgatgtttttgtagtaatcggcgatgaaatctatcaccatgtggccttgacgccggaactcctcagggtctagcgggttatcattgcttgcacgaccggctatgtttaaaagagcgttgctttggggaaactcaaagtcgccgagactacccatttgaatgaatataaaacgaattacttgttagtttcgtttgtatatgtaggtgtaggtgtgagagagagtggtgagatgaaagaagaatgaataatgaatatattggttgtgttgtgctagactagagctctcttctctgtttcttaggatacaagaaatggtttgtgatgtgagtatatttatatgcaggctagctacgaggagagggtaactgataataaggcatatataatatggtaggaagtttcagtctcttttcttggttagagttggtgatatagtggagatttgaccaagtgatgagtgggtgagtgttgaaacttcactcatatttttttatataaataaaataaaatatatattaccagaattttatataaataaggctgttgtgtcttcgacaagaaatgatgttagaaagttgtagccaataatatcgtcttattgaaaataaaaagaataaacaacacctctatatatagtattacaagtggactagttttgttataatattattagaactagtctatataatatatgtgcatgtgttctatataaaaatatatatatatatatatatatattattaaagtacgtgtttccaatgattgacgcgatatacaaattaagcatttgaaggacaaacaagaagatcacaatctataagagcatcattaactcatgttgctataaggacatggtcaacaaaaatagttgactcattagtttcattttatgtatttagccaattatatatattttttaatttttcaattcaaaatagagtaaatagcggtataagtatctaaagttttatgtttgttagcggcataaaccccatgtttatttgagcaatttgcggcgaaacccccttatgttttgatttttatacacttaacccccttatttttatttttggtggcaaaatccc

SEQ ID NO: 134279 - DNA, 799 bp, Cannabis sativa
tagctaatgggattttcccacatcttggtgtcgtaccttgacgttgatcttcgatcttctactggacccatctatttgcatttgtaagggcttctatccctctttcttcattctttttaaacaacacatttcgatgaatgggttgtgaacacttgaaagtcaatggactaagcaatatttagaggagataatggtaaatatgtttattgaaaacaaatgtcagttacattcaccccaagtgcgaagtgttgagatagaaagattgtgtttcactgagtgtagcatctaaagaaacatgcatgtgttattataccacatgtaacctttcttagtggactagtaacctagaaagacacatttagaagatctaagatcgaatttggtgcaattaaaccctaaggaatggacataagatgtacgacctaaggttttgaggggaatttgagagacagggtgagtattaggatagactttcaaaagtagggcaattagagcttgagattatagatccgtgaaggcatcctattgattactgtagttaaaatggcctgaaaatggcctcttcccagaattgataagaccacaaaccacttattgattactcataagaccttgaaccacctttagcagatgtcgatgcttgcattcgacaatcccattttgtgaataataccctgagatactagattatctttaagaatagaagtgttggggatcgctatgcaagaaagtgtggtggccttgtgtgctaatcagattggatgtgaagtagggaattggcctatgtcatatcttggaa

SEQ ID NO: 134280 - DNA, 1206 bp, Cannabis sativa
aatcactgaaccatgatgatctctcgctacaacagcgatacacatactctccaaacccactttcacgtcacaattaagcttaatccaatccagaggaggagtggaccaagtattcattgaaactggagtcggactggggagcaaggtatcatacatatctgcataagaagtacaaataatatcaaagcatttgttaaaatcaactgggcagttattatggaccttatcattacgcacccgccaaatagtatccacaataatagaggcatacaggaaaatatcatcaacattggctcctttgtatttaagatcccagatgaacttgacccaatcccaggcacgaatacccgtgtcacacataggatagataccccaaggagaagaacgccataaatgttgagctacatcacatgacaaaaaaagatgttcaacagattcatcacgcattccacaaagggggcagctagtgtcttctatttggaatctgcttccgataacagctctaaccgggagagcgttggacaaaatgctccaccacatgaccttgtgacgctccaaaattttgctattccacagtttgttccaaagctttggagcgacgtcacgatggggggctctatcaaaagcttgggctagataagcagatttacacgagaactggccattgttctccagcgtccaaacccatctatcgcggcctacaccaaaatatggatgaccactttgtttttataatttctcttttatttcattcttgaaattattttcactaaaattggacaccaaaatatgtcaaaatttttgcatatgcacataaccaaaattgatttagaatttgagttttaaatcaaataactaatcaacaatgtcttatcacattttgattaagtttgtggctcacccccacatttccaccataaagtgtatataaaatatcacttttgtatatttttctcttgaaataactctataaggtcactttgaaaatatcatttgacatttttagttttctcaacaaaattaaatatcaaactcacatcaccatttaaaaaataatgtgatgatttgttcccataattttaacattgtctcctcgttgagattagcccaaaattattccaaagttgacaaaattctcatcaattttattcaccactttagttatttaagattcaaaattacttttccaactttgttatcttttca

SEQ ID NO: 134281 - DNA, 607 bp, Cannabis sativa
tagggcataaaacccaacactccgtaccgccactgtactcgtgttggtagggtatgaaccgtaccccaaggaccactaagtattgtaccacatgcactccgtactgctactgtactagtgttggtaacaccgtactgtactctttaaatatcatacattataccaatgcactcagtaccactaccgtactagtgctggtagtgtacgaatcacaacaagcatgcatatatatcacacatatactcatttgcatatataatatgttttacgctattcttacctcatctctgaattcaagtgagtcggctgacctgaacggaaaaacttcgtgctggatggatgccttagtcacataacataaacgggtaaacaacatgccaaaaccctaattcgggaaactcaaacccccaacaagggttctgctattgtaactaatttaacaataccctaagtatcaaggaattaaccaaccaaggctctaaaagtaacatgaatcaacaaggcagcctatttgggaaacctgcctctgatccagttaaccagttctacaagacctgtcaaactcgttaaccgatttgcaccaggtttccccaaacaattctaaacc

SEQ ID NO: 134282 - DNA, 633 bp, Cannabis sativa
  modified_base (563)..(564): a, c, t, g, unknown or other
tgaactaactgagtaaattctttctaggtcattaccactaaattttgattgggataccctctcccaccaatgcaacatgtattccaactcttagaagataatattagtcaccaaattatttctagggattaccatatcactagaaattccattcatagtttctaattagtaatttgattcttcctaaaaagagaggtcattactttcaaagtttccatataataattccttcatgatatttgtttttttaaaacattttaaatccgattcttcttaattcgttaaattgaaattattttttaagttagattaattaatttttttttaatgattttttaaataagtatattacatggattaatgaaaatttaacgcgtgtacaagagtatacacgtgaatagtccaacataactttaaatagagaaatttggatagaaatgactaacagctaacaaaacacgagtttaaagggtcttgctgctaaaaaattggtttaggcaattaattgctagtgaggtaaaaattttaggaataattacataagacaccattttttgtaaaanntttacatttttacgttcaaataatgtttttttacatttttatggttttccaaaaaataacacgaaaaca

SEQ ID NO: 134283 - DNA, 847 bp, Cannabis sativa
ctatactcagtttcaacatatcccggtgtactgcagtccacccttcacattggcacttagggaaagggcccagaaaattctccatctaccggatgttgctcgaaatattactttgttgacctcagaggacaactttgtgaattacaagtcttatccggcagactttgtaccccagcctgtgaagaggaggaaaaagaagtccaggcctagctgggttgaggaagccgagcaggagaaggagcttattcaacttaagcgtgaggctaagttaaagggtgattctaaagccaagcagtatgctcaggaatattctgaacacgagaagcaggctcaagaatatttagagcaggagaggctgcccaagaagaagaaaacccttccaatagaacattctatccggatcagggaccctggcttgcctgctcagccatctactcctgtagagggaaaaggaaaagccatcctggaggagcaggaagactcttcagatgatgatgctccatctgtgcttgtcccagcacacgctcctaccagcgtgcagagtacttcaacttgcacttatttttcttgattttcatgccttcatatattttatttcttcttctaactgtattgtttttcccgtgcagaaaagtctcagaagaggattgagtctttgaagaggagagtagggggaagctcgggcttgacccctccggccaagaagtctaagggcggtgagactccgtcaaaggagaaggcactagttgaagaggtcattgacctccttgaggagcaacctactgtggatcctcctgccttgaaggtcgccaagtccaaaggttcccccgggggggggggagttcgg

SEQ ID NO: 134284 - DNA, 1060 bp, Cannabis sativa
atttgagctattgtgcggattggattggatccaaaaaatgaaatccgcacttagtgcggagtggatgttgtttgaccaaaaaagtgcggattggatatgatgaacaaccctaattttcagtgtgtatatatatttctgtatatttgttcattaatggatagttcaatgcttgattttatttttaattgttttaataaattttattattatgattatctatattcattacttctaatagttccaatacattaaagtaattatttttatatatatacgttcatattcatactgtactgtacataattttttgtctcttatgtttatatataatactcaatattttcataattttattgcatatattttattagaatattatattctatatatttatgatgtttttaagctatataaacattgtatatgagtgtatatatacgtgaaattttgtttcacgatcgatgttgtttgaaaaacattcctctttatttttctatgtgtttttcgaatctctttgctttcatacattcatataagctatagatttttttttttcatgaaaacgataagaaaattcttgaaaacttaaaaaaaattctagaaaaatccattcggacctgagaacactctttgaaattaaagtctaatttttatgtgttttcgatgcataaaatctatatgaatcttttaatttttgtgtttagattcatttggcatcaatttaggttgatttaatcgtcaaaattgtaaattctgttaagttttgggtcggattagtcggacctgagttgtagaaaaatgccttaaaaaacccagcttgaaggttgaagacaggaaaaacaacacatcatttttaataaattttcatttatttgacccagctgactcgtacaaagagcctaggacttcagctgtctaaatgatcattttttctatttctttcttttttgttcagccataaggccttttttaagacaaagtgaccgaccaagctatctttaaacttggaatttacttttcattttctagacaactagctaaccgggcagcctttaatccc

SEQ ID NO: 134285 - DNA, 779 bp, Cannabis sativa
  modified_base (715)..(739): a, c, t, g, unknown or other
tgaaccatagataaaaaaagaggtgtctaatctggaagcatgaaaaccccactgcagcaatgtatttcttagtttttcattctaagctctaagagcttgcttcaatccatagagagccttgtgaagatgacacacatgattaggtttatctagatatccttaaaaccttttggctgcctcatatatactgtctcatgaaaatcaccactcaaaaagccattactaacatgttttacaggccaatctaaagtgacaacaagagaaagaattgttctaacagtgacaggttttaccacagggctaaaggtctcctcataatcaatccaggtgtttgtaaataccctttagcaacttatctggacttgtaattatttagggacccatctgcattaagcttaattctgtacacccatttgttgtcatacatgcatatcaggatgatatggaacaagagtccaggtcttagactcggtgttttacctttgcatagactgaaaccattttggatccttgagagcttgctgaacagatcttggttcagttggaaaaagagattcctttaaaggatgtcttgtagattagtaagcctttggtttgtaaatgccactttgagacctagttttcatgtgatgaattcgagatataatgctagaagtaggaactttagtaggctgcactacaaactggaagcaattattgggttttgtgccctaannnnnnnnnnnnnnnnnnnnnnnnnatttacttattaataaagatcacaaataacattttatgtt

SEQ ID NO: 134286 - DNA, 681 bp, Cannabis sativa
tttagatgacaatggagctacctaatacctacttactacctaggcacagagaaatatgactcgactcaatacgattatttcaaagtatattataattaagtatgaaaattcaaaattttcatttattattggttattgataggtttaatattactaaaaattaatatttataattttttttgttagtaatgagaattgagaagtgtgtgtatatattgattaaaagacacatttttagctaacacaataaaataacattaaaaattaatttgcgataagttgaaatattatatattttgtattttaaagtgttttagttgttgggaatatggggttgtttgttagtagtgcagttactcattttgcacaatagttgagtgctcaaactacaatgttaaatgaacttgctacaacaatttctactgctgtgccttctgaacgatagatgaaaatgaatatatgtgttcttaaggttaactgtgatgctgcaatatttttcatcttatcttatttttagtttgtttatcaaatgacctaagaattagtcggttgattatttgactcgtttttctaattctaattcttgtcgtgtttccaacgacagagaagatgtcctgattatattgcagactattattttaattaattgctattaacaaaattgcatgatttattaaaaat

SEQ ID NO: 134287 - DNA, 641 bp, Cannabis sativa
ggtcccatcaaatcactcaaccgtcagttatgcctttttctgacagacgcgcctcagcatgcgcctaatgaatcaattagggcttttaatgtgccacatgatttccacgttagcatgctttaacatttcatctacccttgacggattacaactcacacaaaaaatgtgtctgcgactgtaataatcagtatgtgttagcagttagttccaaggaaaggttacaagctcctagatctcagaaagctccaaaagcttgagggttaactctatttggttgttgctcatatcctggttggccatacaagtagccgacctataaactctccttggccggccagacatggtggtacagctccttgacggcttgcttaactctatttgcttgttgcttgacgattttgtcataccttgtaaagagactttcttttgctattggcaaggctgtattccacatgtcctctgtcttagcttatgtggacatgcaacgtcatgtagacaaaatttgggatagcaataataaaaaaatatatattattaatatatatatgtatactatactaaccaaattatataccatagttaacatatatataccatgataacaaaattatataccaccattgtatataataaaataaaaa

SEQ ID NO: 134288 - DNA, 530 bp, Cannabis sativa
aaatatttttcataaataactaaatatgacataaaagttacaaaaatgcagatttataatttttttaatttttttttacgaatttgaactttttttttttacacaagtatagactgttgttttcttacattattcataacaacattatacaattgtttattatacttttattttattttatatttgcactatattgtttacaagttatttttaaattacttttacaagactccgtaagtatctaattaaaaaaaaaatcaatagaaaaataaaacttgttcgagaaatactttttctttttttatattcattaattaaaaatattcttatattgttttttttttattaaaatatatctacttttttgagtgggttacccaatactctcactctctaaaaatttgaaaaagtaaagtagttgtaaaatgtaattacacactataccttttttatattgtcctcttttatttttacttttttttttcaaagtatatcatttttacctcttttttttaaacattataccaatt

SEQ ID NO: 134289 - DNA, 571 bp, Cannabis sativa
tttttttatgatcgtatatgttgtcattttttaagattacctataaacttttaaaaaatttcgaatagtttattgatcgagaattttagcaactacttatgaaccatagaataatgtttaaactttaaagagatattttaacgtagttggggtactaacgaattttaatctacgagtcacttgtattgatgattgtaatcaagttcttacaaagagtttcttagagcttcatttttctcttttctgtttttttttttcattccctttttaagtggttttaccttttatttatattctgatgggaaaatacaatggcgtcccaatacattttcccctctaattgtagcctataaagatattcttctaaactaaaaaaaaaaacggtttaaaaaaatattgaaagtgattttatttttgtttttaaaagtttgattcttaattaaaagattaaaaagtgaaaataattttatagaacatgattttgaaaaatatttttacttttttaattttaaaaataaaaaactgatcaaaaaagtattacaaacggcactttaattaattaatttaacca

SEQ ID NO: 134290 - DNA, 684 bp, Cannabis sativa
atctctcttataatttatgagtataactttgtgatgaaaatacttagctcttaaaaataaataaaaggaaagaatttttcgaattaaatctgggttgagtcgtaggtcactttctttaagacatttgcggtagtagaagcagactatcagcctcgtcgttttcaggataaaatataattttattgcacgataaagaaccgtcaaaatactacacctaaaacccgtactactgctcaatatatataatataattgtatgaatttatcgtatatgtttttcagtgagaaaaaaaaaaatatttttctcccattatatcagcaatgctcatgagaaggtaataacgcgaagaaagacattactaaaaggaacgttagaacgtggaatagtgtgagatcgtaggaacaatgctaaaaaataaaaagtctctgtttaccaattaattaaacacttttgaaaactgttttaattaattaattaaataataataataatttaataaataaatttttttaaaaaaattaaatgataccacacccgtcaactcggcacgatcagttggacagcggaggcggtgcacgtacgcgtgtgtgagtcctcacccatgcgcacaaatctgggtatccattcggcccccaacccaagttccaaacttggatatatattatatacacttctaataaagta

SEQ ID NO: 134291 - DNA, 608 bp, Cannabis sativa
ttaaaggcatagaggcttgtgctataagggttagaccattttccactatgtgcctaagttttctttcatctatgccattttgttcatgtgttgttggacatggacgcctatgaactgtaccatgttggttaagatatggtgtgaaagatctgtactcaccccccagttactctgtaacactttgatttttttgcctagttggagctcagcttcagctttaaaaagttgaaaagtttttagagcatcaaatttatttttaaatatgtaaatccatgtaaatctggtgtaggcatctaggaaatgtatataatacttatatctattagcggatgttatgtaggatggaccccatctgtgacaacaagttgtaggggttcattatacacagtgttagaagagttgggaaaagggaacttgtgtatttttcctacacagcaagcattacaatgagagaattgatctttattgctaataggtatattgcaagagttgagtacagatttcacaactttttcactaggattttctagtctattatgccacatttggaactgggattggactgagtgacattctttattttctgaggtagagacataggcttgagc

SEQ ID NO: 134292 - DNA, 606 bp, Cannabis sativa
tttttaaaactaatattacgtggactataaaaaatttaccacgtgaacagtctattgtggcacttaactgtgatttttggacggaggggtacagagcaaaactgaaccaggtttagatagttatgccgccaaaattttggtttttgtagttgactgttacaaaccgtaaagttcaagtgatttaatcgtcaatatcccattttattttcaattttattgtcacatgcatttttttaccttttgtccaaattattatattgtacactgattttaaataattttttttatcattttattaagatcgtggcagctcatgtgtattataatacatttatcatttttaaaattttgttagaagtataatattattttttttttttgagaaaaatataattttaacgatgaaaagctcatataatttataatgcatgtgtgttgaacttttcatctcatttctctttttctctcctctcgtcttcattgtttattgatgatatatatttttttcactctcatcttcgttaagttctatctctccattaacatataattttttttttattttttcttcttaatcttcttttttttttttttcttttagttttt

SEQ ID NO: 134293 - DNA, 621 bp, Cannabis sativa
cttttttaaattcttttccgtttttacgctttattttcataaatatttttattttgtctttttaaattcatttttacgtcttcttccgtaatttatctatttcaaacaaactatcaaattccaactctggtttttaatcttcttcttcctctgcaacgtcggtgcctatggtgttcatttagctctgcgatttcgtccaacggcggcttcgacgggctctttcttttaagggtatcggcacacctcgacgacttcgacgacttcgggatgattgcaacggagctctgtttcgttttcttcttttttttgttcaggataagcgatgatttggggacgggtcgatcgattggcgcagctccaaaaacggcgttaatggaggttttcttcgagctctgtttcattttctttttttggttcagtatacgatatacatttaaaggtagagaagaaagcctaaccacatatttttgcaaaatatattctaattgtggttagttttcaatattaacgtatttttgaaaataagattgattaaaaatacaaaactgaaaaacaccttatttttttttttttttttatatttatacaaattttcggtttgaaattatactgtttttattt

SEQ ID NO: 134294 - DNA, 1138 bp, Cannabis sativa
  modified_base (1015)..(1049): a, c, t, g, unknown or other
  modified_base (1098)..(1111): a, c, t, g, unknown or other
cttgaacacataaccctaaatctcaatatattcatatattcaatatggcatagcatttacacaacatatatcactagggtaataaccctaatcccaactactaattactcacatatatcctttccaatataagcaccactgcacataactctacgtgctaactattgtcttacctgatgtcttgcaatagtaaaaattccaaatctccgggtgctcctgatcaggtgccggtaatcctagtcacaatattgggatttacacaaatagggttagcccctgattccacattcataaaatacatacatggcattaaaaatatagataatcatatagagctcggaatgagctttccaatggtatatagaactcccaaaacggagttcggatcacaaagttatgcattttcaaagtcaacacatgaatttgcccaaaaactcgagggccgaccgtggcatgcaaaagccatgtcgtggcacctgggacaaactcccaggtctcaccaacaggggcgggccgcggcatgctataagccatgccgtggcacctgggtttcaaacccagaaaccagcaagcaaaccttcaaattttagcttttaaacacattcaaaccaatccaaaacttaaccaaaactcccaaatcaacaaacatatttttaatcatcaatcaaggagttaaaaatagcatttcatgcattaaaatccagcaataaatcccataacttcagattgcatcaatacacaaaatcaagcttcaatcttgaacattacttaaccaaaagctataacttctaagctagcttaaccttgattttctagcaacaaacactaacaataacctaaattcaagacatgagaaataccctaaaattccatctagagctcaacaaacaacaaccaagatttagacatgcaatttaagcaaaaacttaccaaaatcaaagataattcttcctacatgcattaaaggtaacacaaggcataaactccaccaatttaatgttggaaatattttacnnnnnnnnnnnnnnnnnnnnnnnnnnnnnnnnnnnacatcctaatatgaatttctaaagtaatgaaataaacacataagggttnnnnnnnnnnnnnnattgggtgcaacagaatataatgactc

SEQ ID NO: 134295 - DNA, 1232 bp, Cannabis sativa
acggtgggctttgcccgccaagagtgcctctaataatgaaaggctgggaccgccgagatagattcaccaccaatctcggcattaaaatttacggcgggtctagatagctcaataacggggtgccaggcccgccaagatagacttattttttttatggtgagagcaatctgatttagaaaaaaagtattttcacaccaaaacaagaaacaataattttgaaaataccacacaataaatttaaaaatactcccatttttaattttgtcaattttaacaaatatgtcaataatgtattttagagaaattgaatatttatagattacttttggtgtcccaaagattctaaacggggctcacttagaccaagtgaaaagaaagtggaaatagaatgtaccctattgacatctctcacataccaaaaagagaagaagaagaagaagattaaggagagtgtggtattattcctttaacccccaacaaccaagattcggttagttagttagtctttaactaacttaactatcaaaaaagacaacttacatattgggtcccttggctatataaagagaactactcctctcatttcataataaggaaaaagagaataagtcaaacacaagagagagacacaataccacagagagagaagttagagtgagaaatagagagagatatctaagagagagagagggctgggattgggaaattatattgagcaacattgttgattatgttggctcgggttagtgagttaatgtgtattgaaggattacaccatggatgacttgctgtgattatttccttgtagctcctgagattgatatctcttattctattctcattatcaataaagattggtggcattgctttcaaactagagtatgaccaagttcacatagaacttaggatcggaaccagtataaatctctgtgttattgtgtttgacaaccatttagattcatctgtgttatatttttctaatttatgtgtttgctggtttttgctcttgatttgtttgttttgatttaacttttgtgtctttaagtgtgatcttgactctggaattacagagtttaattcctatgtatcaaagctaaatttcctacaaatcagagcttggttcatcgattaataagggagattcaaagatcacttgctttcgcaccaagaactcatcaagaattcatcaaggaattctacaagaacacagattgaaggagaatgtcgatggc

SEQ ID NO: 134296 - DNA, 699 bp, Cannabis sativa
  modified_base (616)..(646): a, c, t, g, unknown or other
catggtaatgatttacttacatgtaatatgcatttaaaacgatgaatattgtttgtgtgttgatttagatgtgttcatgttgatttatgtgtttcttgatgaatgtatgtgaattacaaaaattttcaatgagaataattttattttcgttctgaaaatattttatttgcgttccttgtgaaaaattaagcaattttcatttttacggaactcaattccgatgaaaaacgaagaagttatgaagttttgaaatttcgggtgcatatggtcgaggacaaggcatgcagggattcagactagatgatccgcacgcggataacttagacagacctttgtctgatgcgcacgatcacctgccttcagacacgatgccgcccacgtgaccctgcagatgccctggtccctcgcccacctgatgctacacacgctgaggaaacttgatagatcaggctgcaaatcagtgcgcatgcggactggactgcttgtagccagtctagactgcccgtgcagccttgctggcagccacaccccaaactcaatttttgtgggatttttcccaaaattttgatttttttcaattttcaactccagaaatcaaaataaaatattatttttnnnnnnnnnnnnnnnnnnnnnnnnnnnnnnnttaataatatttaatttttaatagattattattaatttctcatattttgatgt

SEQ ID NO: 134297 - DNA, 699 bp, Cannabis sativa
ataagggaaaaaaaagaactttaaaaaaaacaattaaaacaaagccaaattacgtattaactataatgacatacagttctactatatcacgtctgactttttggtatcacaacaacatcaccatacaaacacacactcataaacagtgtaaaggttgtttggactatattttgaatttttgagtgttttgtttttaatttattaatattacttaatgttagttgatgtgaatattttagtgttgtagaaatctgtattgggaacgcgtgggaattgggtggtattggtatacaatattagtcaaccaagaaaaaattgcatatgatgtgaagtgtggtaggaaatagcagtagtttatttatttatttctattattttttttatttgggggaaaatagcagtagtttaattgcttgtgaacattcttccattaaaatatgctgtaatattttaatctatctttatgttttttttcttttcaatgaacttcacttgtatggattattttgtccatcttttaaaaattatgaaattattataagtacattgctattaagtactatggtgtttaacacatttcggttagtgatcgtttagtctagaataatagttgactctgaagtcaactatattctattagtagttagtgttgggttttatgttctaaataaaactccatttcaatgtaatccattttat

SEQ ID NO: 134298 - DNA, 1006 bp, Cannabis sativa
gaccactaactgtgaatcactgaagacttctacctttgtagcccccatagctttggtcaatcttagtgctacaattagtgcttcgtattgggcttcgttgttggaagttggaaatgcgaaccatagggtggcctggccggagtccgtctggcaatatcattgctatcccagcactgtatcctttttcatttgacgccccatcaacatacactttccatgccgacaatcgcgaggttggaatataggagctggcctttgcttcattacatttcgttatgaagttcaccaaggcttgtccttttatggagatgcgcgggacgtagtgtatatctaactggctcaattccatggcccattttaggagacttcctaaggcttcaggtttctacaagacttgccaaagaaggtgatttgtaagtaccttaatgggatgggcctggaaatagggtcttagtttccttgaagtcatcaagaggcaaaaaactaatttctcgattaggggataccacgtctcagctcctatcatgcgcttcctgacatagtacactggatgttggaccttgtcctcttcccagactagggtcgcacttacaacattctcgaagacggctaagtataacagcaaagtcctctccgtgaaccggttttgaaagtatcggtggtttgaccatgtgctcttttagttttctgaatgcttccttgcattctttagtcaactcaaatttttgacattttttcaaaatattgaagaaagggatgcacttgttggtagactaggaaataaatcgtcttaatgcggcaaccttcccagtcaagctttgcacatccttatgtttctttgggggagtcatgctcagtgttacgtgcagtctatgatggcacgttacaagctaagagatgccaacaagtcggccaagtggtggtcaagtggtggcgcatgttgtggtgcatgcaggtggcatgctgatgcttagtttgtatgcagtggcattttcgtaaatatctt

SEQ ID NO: 134299 - DNA, 930 bp, Cannabis sativa
tattaaacaataaacatgtaacatacatgtaaacataaatcacttcaaaaatctaaattgataactattcagattgtaatgggttttatttggggcacaaaacccaacaacctcctacagcattcttccccgcagggactgctttgactaagtaaaagtaggctatcgccaaaggagtggggcactcccattctaaaatatggtattggaccttcaagctcgcaaggatcctatacgatatggggtttagctgaaatggggcaaccccgaggtagttacagtactccttaaaataatccataaagggaaggaccaccccagccttgatgtgctcgaggctccacactccaatgctcaaggaattactcgtgctaggcccattgcactcttcgcatattgccttgtctggaggaaaacagctaaattccccaggggccacggaccttatgacacaacctttcctctatttgatgccacaagactttaagatgccaccaacgtaggccccgatcgacctgaccttggatttgatgagctcagcctcgatagtgacactaggatccagtgcggtctttgatttgcgaggcttagtagatataatgtcaaactcacggtcatttggttcaaaagcaacagtgacttcgggtaaaaatagtggtcttgcgagtggaatagaagctaatattgtgggtttaggccagcctgcgtcttgaaaaaaatgacgtttgcccttagaaatctcttgtaggaatcgcctataacatctggcaatttcttcttggttcgacttaattaaatggtctctaattttggcatcattcacttcccattttgaccgaggttggaaatttttgggtttatatgggaaggctaattgtttaggatattctgttcctaaaaattctagagaataaacttttgaaccagatt

SEQ ID NO: 134300 - DNA, 565 bp, Cannabis sativa
tagagacactagagaattgagggttagttgcaaaaacttggccacttaagaaggttatgccacaaataactctatataatttgattttgatgagattaatttgaagagaaagaaaaaacatggtgtaatttctaaagaaaattaattaaatgtcaaattagatgttaaatcaacaccaaaataataaaattttaataataattttttttaatcataatcataatactaaaaattacactaaaattatatttttattattatattattttattaaattataaataaaaacaaataatatttattcaaaaagtttacttataaatatattatttgtaataaaaaaatttgatatagtttatagtgtcctactaatattagtatgacattatagacaatattatatttaaaataaaatttagggtgtagttaaaatgaatttaatgccaaatctcaatgaattaacattttaacattttattataattggtcaaagttaataaataatgaaataaaacttattaaaaaaaaaaagaaataaaacagtaaaaaaaaataattttttttt

SEQ ID NO: 134301 - DNA, 666 bp, Cannabis sativa
taatatgacgaaacataacaaaaggactaaatttttatgaatgtaatagttcagaggaaatttttagtaagctttatattttaggggcaggatgaaatattgtcaaaaattcagggtgcaaaattacttattattctaaagcaaatgtttattattactgatttttttaagcaaaaaaaatgttattagtgttaggaaaagagtaggttttataagagtttgggcatttttttagggttatcacaataatttgtattgatttctctttaaaattagtatacaactataaaattagtgagaataataataaaaataatagttaatacataattaattaataatttcaattaaattatatttttttgtatgtatctaagagaaataatgtaatttttttttttaaaaaaaaagaaatagtgtaaattaatactcacaatattaattaataacattatttaaatcacatatgttaataatttataagtattgatctcggttctagtcaacgacaatgagttaaaaataaaacgattaaataagataagtaaaaaaagcaaaaacaaaaaaataaagtgaacaccagattttaaagagatttgggcctgtaagtatggtaatagcctactccccttgttagggttgtacatcggtcggtttgggcggttt

SEQ ID NO: 134302 - DNA, 1325 bp, Cannabis sativa
gtgtcttattattgttttattatatatttgttactacatatcgttttatcgcttataaaatagactcattgtcgttggctaaaagcgaagtcaacaaatttaaataaaattagaattttttttttttgtattttaaaggattaattaaaaagttttgttttataacattatatgtatgatatatattgttataaattaatgttatcctcgttttcgacagtggacacgtggaatccaaatcagcattcaaggcccatcagtgggtccctcaatgaaggtaaagtgggccaagctcatttagacaagtccttccaggaatgtatcccagcgcagtaaccatagagccttccactattggcgaagtggtcccaaaagttcgatactatgagaccggaagagtgagacaacgtgttctcggaagactcttctagttttccttttttattcctgcaacaaataaggaaataattgatgtccagattttgacagagcatcgtaccagattaaatgtggaaacttcttaaaatgaatatcaagcaattaattcacagtttattgtccacaatcaaagcacatggtgttgactaaatcaagccaaatctgatctacctagttaataaatcctctccttcgtgggctagacttcacaagacagcccaagtgtgttattcattgtaaactctccaattgagagaaaagggaaagtaaatgttattctaaaactacattaaatacccatcaaatcctataaattaagggttgagttctcttgcaacacttgctcaggaaaatttgaggacatatattctttttattcctaaaggcttttcaacctaagaactactgaataacactgactcgtggactaaggctaattaacgctccaaccacgtaaaaaactatttgtctctttttactttctctcttttaattattttatttccttagttctaattatttaattagtttttaaaaatttcgataaatattttggtgctttcattgagagctgaaggaagcagtgagaccacttataaattatattcaagtaatcatggccctcacccgaacaaagtctggtcctcgttttactgatcctaacaccaaagcaggggactccaatgatctacatgaggtgagtagacatcacaaaggttgccaacataaagatcaaaattgagatgataccatcatcaaagatgcaaagtcttggtaaaacaatgaataatttatagcgtatctatagaggatctttgattatttaaattaaaacaatgaataatttatagtgtatctattcttgacgaatagagcgttctatgtaa

SEQ ID NO: 134303 - DNA, 765 bp, Cannabis sativa
ttttaggtgtgttctgacaggttgacgcgatatagtcacaaccgggtatttcgggccgaaccaggttcgggctcgaaatgcaaatggaatttatttgttggcattttatttgttaagtgataatctgaaatttatttggaattatttgggtatgaaatgacaatattgtccttggaagtgagtatgtatgctaagtgaattttgagaaaaacaaaaaaggaaaattctggtttcactctctcttggccgaccctctccctctctcaaaccctctcaattttttcaacttgaatttggtgaaaagctagcttgaattaaagaggtgttgattgaaaaattgtgttgaggacttgggatagcttgtgcaaggaattgaggtagtttcttgctgaaattatttgaaattgcttgttgaattcttgctgaatttattggggttaagcatgttttaagttatggtgttgtgttgttgcatgttcatggttttggtgttgattttggtgaattggatgagagattgtgtgattcatgtttgtggagcttggattgtgatttttagggtattttctagcttgaattcatactattttgatttatagctgttggaaaatatttgtcagtattgggtttttagctcaaagttctggagcttgagtattgctagttcgaagcatgagttttgtgtgtcatgcaatctgaatattggttttgttatgggattttgatgcatgagatatgtgttttagaccctataatatttgctag

SEQ ID NO: 134304 - DNA, 2130 bp, Cannabis sativa
  modified_base (188)..(188): a, c, t, g, unknown or other
tgaggtgagttgtctaagcccaaaaagcttagagaaacaatagagtaaattactaatggcctttcgtttttctttcttttgactcgtcaactttgttgggtttcatagcaccgtattcaatatcacacaagaagtcctccacatcatcaacaacatccagaagatcgtccagccacttctccacagcngggtttttgattctcttgttctccacctcgaagcgaattgcggcaagagaattgaaggttgacttcaacttgaaaagcctctcagaaacaacaacaaaataagtttcatttttttctcttaaataagaattcctcaacataaggagaagcaatcttttccagcaaaaaatcaaaggaagcagagagaaaagctccaatcaaaagttcagccatggttttaattcacttcagtagctcagttgttgcagtacttttactataagaattcaataaaagcttagagagaaaatgattatagtatcaaatgttattgtacgatcatcaatacttgattgtaaaattgaataatatacagagtgaatttgtgaggaaaagttaaagcaaataaaagtaatattgtcagacaaacttttggtctcatcaaatactttttcttttttggtctcatcaaacactttttctctggtcacaagtaattagtttggtaggccatttaatacaaaacagctcactcaatctcatttagctgtgcttaatctcaccttagtttttatactttatcactagtaaagtgaaaacacataatgtatacattttattgaggaataacacttctgcatattttgaattgaaagaaagaaaaacaagaaaaacatctcaacagattacaagtatctcctatcacacataatttttccttcttccttctgatgtggattttcaaagatcaaattttgagtggcaacttggatttttaagtcgaaaggattgagggactttcttttgaggtctcattctatatgaagataatcttaggcttatagactttagtgcataaatcagagtctgatattaatttataggatgattgatcaatccagtgtaatgggaatgatttgatcttctcgttgtgtagataatataatttattataaagagactcattcattgcatgcacctttaatccattttaccatcatttttatcaacattgagttacaatataatccttccattttttaaaagcagttttaatcaatgacttaaaatcagtttttaacacccagtttttgaacaaccaaatgaggtgaaaacttaggatttttgtatttataaaataacagtacaaaagagttgctttacataaaaaaaaactatctgctggtcctgcaattaaaccatttaagtatataggaagagaagagatgagatgaaggtgacatgtccatgtgatagccctcacttaattaaatatggcggaggtgaaaaacatgatcaacaacagcttctcactactattattctaatttatatgataacaaaattgttattattattattattaaaagctagaaaagtaaaaaagcttcaactgaaaaaatggtgtaaattgtaatatttagaagcaagacagcagaaacagatattgtgaagttggaacatcgatgaaataaacaaatcattagataataaaaccaaacaaaattaaaaaactgtaaaacaggggactcttctaataaaacctgtcaaaacaaattgaccaatgactaattaacacttgttcatacatatatatgtataaagttttaatatttaatttattaaaatcagagattcattgcaaaaaaagaaggtaccgtcaaaagcatctctacagatttaggagcaaagcagagattatatgtcctatattattacacatacataaataaataaattaaatggaagaagaataagtcaatcaaacaaacctgagattatatgtcctaaatgcaacctcaattaccaaaatatgacattgggtatgtgagtaatcttgttccagtactcctcattcccactctccttctgagagtactttttcttaactagaggacaattgtctatgattaaagaggtgagggaggttggaaacccttcttctgacaatgtctccaactca

SEQ ID NO: 134305 - DNA, 756 bp, Cannabis sativa
  modified_base (47)..(55): a, c, t, g, unknown or other
ttccccacttccccaacacctccccacatctttttattttttcttgnnnnnnnnnagaacccgaaccctcccaacacccttgtactaactgcttgcataatggctctctaatccaggcattttcaaagcgaaaagaattaaaagaaccaggaggagacacacctttaaacaccaagagaatggtgcagtggtccgatgttgaaacttccaggttgtaaagggtcggctgtggaaataaggacagccatgtgtgcgtcactaacgccttgtcgagtctttcttcaacctagttatcaccattccttcctttctcccaagtaaaagggtaacccaccaaaggcagttcggttaagttgcactcgtccaaagcttctataaatccatcaatgagtcggtccgggtacggcctgcctcctcttttttcatcatgagaacttaagttgttcatgtctcccatgagacaccaagggagagtgcttgcatctttaatagaacgaaagagatttcaagtgttagaccgaagctctcttttaggctccccataaacccctgtaaatctccattgaacacagtgttgcaattggacagtagcatcaatatgattaaaggaatacccttgaattgccacatcactagactcattccataacaaagccaaaccaccactatgtccacgggcctcaactacaaaacaactatcaaagcccaaatggactctaataaactccatacttgtcttattacacaaagtctcac

SEQ ID NO: 134306 - DNA, 732 bp, Cannabis sativa
ggtaaaataaattccaacagagtggaggtatgggctttcgaaacttgagggacttcaacttagctcttttgggtaaacaaggttggcggcttctaacttggggtaactctcttgctgaccgtgtttttaaagcaaggtactatccccatggttctttcttggatgcgtctctaggtaataatcctagttttatatggagaagcattatggaagctcaacatcttgttaaaatgggggttcgatggtgtgttggtgatgggagtcttataaatgttttatctcaaccatggcttcccgatcctgggcacccttacgtgaattcctcacacccggcccttcaaacagctatggttggtaacctgatgagggtagatgggggcggttaggatgtggaaattctcaatgatttatttgatgagcgtgatcgtggcttgatactcagcattccgactaatcttactcaaacaattgatcattttgtttggtcttgtgaggtctcgggtatgtatagtgtcaaaagtgcttataatcttcttcagcagcagcgtgaagagtgggatgattccataagttctttgttttggaagaaactttggagtttaaaagttcctccaaaagttaagaatttgctctggagggctggtatggcatgtcttccaactttgacacagttgaggactaagcatgtggatgtctcctctctttgtcctctttgtcctctttgtcctcttt

SEQ ID NO: 134307 - DNA, 528 bp, Cannabis sativa
atgtgaataaatttaaaattttaaaatctttcattgtttggtaacacattcacatttgtattacctcatttgaaatgataattatgtcatgagttcaccctaaaataaataaaaacattaaaagataatgtaatgagctagtgaggtcaacggggacaaataggagttttctttagattttttttcttaaatacctaagaattataaaattattacaaaaatatatatatatttataattttttttatgtatatttttaccaatttgaagtcttttttcttacaaaactatgggtactgtcacaacaatattataatatttgttatttgtgtttctagacgaaagacatgtagcaaaaaataaaaggtactaatttgaacgattattgtttgagtatctttgggctcgtttggaacgccgtattaagccgtattgtattgtattgtattatattaaattgcattttatacaatatttttatgtaaaactatatgtggtattaaatttgatggacacctaaatatataa

SEQ ID NO: 134308 - DNA, 869 bp, Cannabis sativa
aacgcgggtgagggcacttaactcgttaaaattgcactcgcaccacactgaaaagatcttctatcttttaaatgagcaacctgtcagatagtcagaggtatgactctggagagggggccttcacggatgaatcagaaaggaacgacaacttcatcccaacctcgatgtctgaggatgaagctcctgtagctagagctcgcgagggcttgttatctacaaacaagatagacaatggttcaggaattagcggaaccagtgacattagaagtgtgcgatagcaagtctacaatattagcccaaggttatctcatccatttgcgacatgccccagacaccgaagtcgaagaaatggtgaggacttcgagttaccagacagtgaaataaaggaaaaggaggaagttgaaggtagcaagatagattctgttgacaacgctcacctaattgaacctttctcctacaaggatctagtctcccgggtcaagaaatctgatttgtcaacatatgtgaggttaaatttggttcacatggctacttccaagcctttgccaacataatggcctcatcttcccttcacgaatcatgcgatcatcccaacacagaacatagtggctttaattcatattcttcaatccggggtgacactgcccttccatcctttcgtgaaggacattctttcttgttgtgacgtctctcctttccagcttaccccaaatagctactgcataatcctagggttttatgcgatgtatatggagtacacgcgaggatagccaataatcaaagatttgttggaaatattttactaggatctagatttaccaccaagtatgtttgattaacatcctaatatgaattctaaaacagtgaaa

SEQ ID NO: 134309 - DNA, 566 bp, Cannabis sativa
ggctatgcacgtgcccccaccacctgtttttttaaagagtcgtacgacatgtcgttttggaaaaaggacatgggtttggtggaaacaacgtgcagtagggtcaacaaacaaatcatcattcgtattgtaaggggctaaaccagaaaagggaacaacatgtcgtttttgcctgatagaggcaaaacaacatgttgtttttgccgtccctatcacccaaaaatttccccacaggtctacgggtctacaatttggattggcgcgacccgatttctgacccggtcggatagaccatctctggccacaaaattcagtgttgtttgagggattttgttctatttttaatcctctatcactttccaatactcatttaattcaaaaaaaaatacaaataatagtcaaagtattatgaaccataaatggattttcctccattaatggattctataaaaatttggtatttcacaataaaaccatactgtaaccatcttaaaaatcaagaaaaaactcattctaaaacatttaatctcatattacccattaacaacatataaatctgaaaaaaaaaa

SEQ ID NO: 134310 - DNA, 623 bp, Cannabis sativa
  modified_base (574)..(574): a, c, t, g, unknown or other
tatttttgaaaaaaattccgtgtaacagtatttttgtaaaagttaacccaaattccaatatttttgtaagttttcctttcatttttataaaaaaagcatgtccgtgaaagtgtttacacatttatagacgctttaaaagtgtgtgttattttttaaacttttatagatcagctgaaagcgaattaagatttcttttaaaaattggtatctcatattgtgttaaacctattaaaatttgactcatcaactaatctaaattatattaaatatattaactattttttagagatttaattttcttataaataaaaaattaattgatgtgttaaattttaattggtttaacttaatttgctgagagccccacaaaagtatgactacatttatgaacgttttctagcgcttgtaaaactaatcattcttgtagtgtatataacaacttctctattctatttttaaaatagagttactaaattttttttttttttttaattttacattataccatatactaatttcctcaaaatacatcactaaattttttttttcaattttaatatattttatttatttnaaatatataatattaatatatatacatatcctcatacaaaaatagttat

SEQ ID NO: 134311 - DNA, 584 bp, Cannabis sativa
cggttggttattattacacactttgtcatcaatactaaactcctctgcttcctctgttctcttgatttgttcccaagctttccaaattcagttctcaaatttagtaattactatcatgaatctctcatcttgatttttgttaagggtgttaatactgttgaagttggttgaaacagttgtgattctgttagactgtcaatatcagttttttatcttgtttgtagcaactctaaccgattccttatcttgtatataagctggtgtactatctttgttctgtaatgaattcactctttctcaaattctttctttctctctgtttctctgtctttctctttctttttctctttcatttcctttgtttctttcaatggctaagagaactaacaattttgtttcattcgtttttgacatttatgatcaattatttatggtttgcattatgtagatcgaagtagaagtgtacatctcaattgggctcaacgcttcaacattattcatggaattgctagaggtcttgtatatcttcatcgtgattcatgtttaagagtgatacatcgagatttgaaagtaagcaatattct

SEQ ID NO: 134312 - DNA, 1248 bp, Cannabis sativa
  modified_base (295)..(300): a, c, t, g, unknown or other
aacaactttttttatttttatttttctttttcaattttaattttaaatttaaaaaaaaaaaaagaaaaaataaaagttgtgttctgttctgtaaagttcattttcatttttatttgttgattttatttgtgtcgggtctaggtttggggtgagattcgggttcggatcagaagtcgggttcagcgcctgggccgtggggaggaaatttggtccgagtctagtcgtaatccaaaaagattgattacgaaaaaaactgtttaaaaaaattattgaaagtgattttttttttttgttnnnnnnattttgatttctaattataaaattaaaaagtaaaaacagtttatagaacatatttttaaaaatattttcactttttcacttttgaaaacagaaaactgatttaaaaagtgttatcaaacgccacctaagttaaactcaggtcacaatactattaatgtcatgaaaatgttaacatcttagaacaaaaacatgttttctttagagatgactcaagaaaacaaacaactttggaaaactatattttcaaagtaaaatatcataattacactactacaaaagaagcttttcccaacggttaataagggagtccattatataaaccgttagaaaaagtaaatggaagtttttcctaacgactgatgagaactgaagcaaattaactgttgggaaaaactaatgccaacggtcttggagaaccgtggctaatactaaatggaattaaaaaaaaaacaataaatgttaacaaaacgttgggtatacttagtattcccaacggttataaaatgttagatacacatagtattcccaacagttataaactatagggaaatttttttttaacatgtcattttattatgagactttactttatttaaataataaataataaaataattaattggagtgaaattaaataggggaattctatttgcacctcataaaatgataagtacaccccattattaaaaaaatatatatatagttaaataatttttaaaaattactcttaataatttttaaaaatatatatagttaaataatttttaaaaatatatattttttttgaaattttttcttcacattatttttgttaatttcaatacttattttgattttattttcatatttttttctttctaaatcatgtattgttgaccgaggtttcggcaaccaataaaataataagagtttaaagagctgtaagaaattaagagaaggatttttacg

SEQ ID NO: 134313 - DNA, 595 bp, Cannabis sativa
ccagccaatataactaacctagtgagttgctatataaattaatgagtgctttttgcatattatttactgttatttcttatataaatgtagggcctcaccagtcaatgttgggattgtagtttctctttgcaagctctactagctgcaaatattagtgaagaaattggagatgtgctaaagaaagcacatgagttcttgaagcaatcacaaattagggttgatgttccaaactattcaaaatattttcgacatatttctaaagggggatggactttttgtgatcgtgatcatggatggcaagtttctgattgtactgcagaagcattaaaggtacgtacatatattatcacaataaattttatgactaaagtaaaaatattgtgactaaaaatatatcattcagtgtatatgttatcactaacaaaatttgataacaacttgttgtaactaaatatatatcaaccacatcactcgtgatgttaccactaaatctataaaggtaataatttttagtcgaaatataatttttttgtgactaaatgtaacttttaatcacaataaaaaattatttatggtatttagatacaagttgtta

SEQ ID NO: 134314 - DNA, 584 bp, Cannabis sativa
atttgttaacgtttaatgttagcattctgttaagctaatcgtgtaaggctaaataataataaaaaaagaatcgttaaaaaaaatttaaaaccaacaaatgaccttagatagacaatttttatatataaagaagataaagaagatatgctaattgtgtctcacgtgtgtgagctgcaaaagaatcgtgtcattttaaaatttgaagttggacttttctacattgggctttttttctaagttggtcttctcttatcaattttggagttccaagcttcaataaggtaaatttttttcaaatttggagaaaaataacaaaaagttaaattaaattaaatatttccaatcgaaataattttgtaataaaaattatgaaaatatttaatttaaattgatttatatacacaattaaaggctcgagatatacaaatttgaaacttaatcataattctcaactagcttattgctagtctctagcaattcaagcgaaaaataataatgttaacacgattgtaacaccctaactaacataggcgtattacgtgatttttaaacatactgtgcagctcgttgctaatctacgaggt

SEQ ID NO: 134315 - DNA, 697 bp, Cannabis sativa
ggtgtggtggtggcatgcgatgttgggggtgtgagtgtagtggtggtatggtgcggtggttcaaacttgttgattttagatttaaatggttgttcaaatgtatatacatgtggtggtgtgggatctataatagtgtggtggtgagatggttttgatttttttttttttaaaaaaaaaaatcttttacttcggttcataaccgaagcaaaaaaccaattagcgtcggtacacttattttttgcttcagttatgaaccgaagtaaaacctttttttgcttcgattcatgactgaagcaaaaaaacatttagggtcagttcgaaattgaagcaaaaaaaattaatatttgcgtctacataacgtcagttacacaaactgaagcaaactgtttatgtgtcactttaaaaccaaagaaaaatgcccttttgtagtagtggataatactcccaccttttatgccaagcaatattggagaaaaaaaactagcctaaaaataactgaacatacaaggctcccaacttctgagccttcaccctcgtctcaagaagcccaactaaactgaccttatgattagagatcaagagcttgacctcattctattttttttagctattgagcccctcgacattccatgttaatattttatccattaagtaaaggaggagctccccctccttcaatgttatcctctgtatctag

SEQ ID NO: 134316 - DNA, 687 bp, Cannabis sativa
gtctcaaataaggccctataggcttgccaaggtgtgcaatggatcaaaaaaattatttttcaaagactcgaatgtgttcttcgtgactcaaagagtcaaaaatcaaaacaaagctcaaaaattgaatctttttcatcagaaaatcatgcattatgaatcctaaagctatcatgcagatcataatgcaaaaaagattacaatctaacgtgagaatcaatattgtaaaaaccttgaaaaggcttaacacaacaatggtagatttaggataacaaatagagagtgatatttgaaagcttacccactaatgaagtccactaaggatgcctgtggaaagcttggatcatcaaaacggagcaaaaatctcgtgatgtggagacttggtggcgtcgggttcttagggaaatgtagagccttttttctttcttctcagtaggaatttgaaaagagagtgagagaggaaatagtaatgtgggaatgaggcatggccaagtgaaccttatataggtctatttttgtgggctgttggattgattttgcaactgagaatgagccattgtccgtccagggtgaaagctacggaaacaccaattgtggctttcataagagaagctggccggcctaccccttattatgggttggtcggcacatgatactccttggctgactaggggtggtgttacgaaaatt

SEQ ID NO: 134317 - DNA, 833 bp, Cannabis sativa
aatattgtattatattttttatatcgtaatatatgtgataatattccccacacggtgcttaaaagttgagcaataaaaacagtaggatcccaactaaaataattacagcacctttatttttaacagaaaatgacacataaaacttaaaactgatagagatgaaaagtgtcttttatgttactgctgcttgtcaacggcagaaatgccaaagtgaccttgggtcattacaaaatgatgtatatatggggccaaggagaaggcagtccatgaaataaagtaggccgaaaaatagtgggccatcaaatactaatatgggccagctaattctaataccacctctcaagatgatacatatatattttttaagttcatctttgttacaatagtgtgaaaatagcctggaaaaagaggcttggtaaggatgttagcaatgctgtttttggtggtgacatgaatcagctttagtgtgccctcttggatcttatctcgaacaacatggcagtcaatctcgatatgctttgtgcgttcgtggaatacagggctttcagagatgtcgatggcggcactgttgtcacaataaaagatagcaagatctttgtgatggatgacaaagtctcgaagtagtgccaaaagccaggtgatctcacaagtggtataagccatagcccggtattcaacttcagcggaagaacgagaaacagtggactgcttttttgatttccaagagataagtgatctgccaaggaaaacagagtagcccgaaacggaccttctagtgttaatgcaggaagcccaatcagcatctgaaatttttttaagatgaaagtctatgt

SEQ ID NO: 134318 - DNA, 588 bp, Cannabis sativa
  modified_base (535)..(537): a, c, t, g, unknown or other
tagcctggcattcatatggcacatcacttaatcaggtgagattctatatcacattgtctaatcaggcaagctcataccataatcttgcactcatatatcacatcacctaatcatgtgagattgtatatcacattacctaatcatgcaagcccaaaccataatctggcattcatatatcatatcacctaatcaggtgagattgtatatcgcatttgcattatcattacctaattagatagttgataattacgaaacttgttatgccataaggtacattatatttttcttacttttgatccagattcatacatgtcggctaatccaagtggataaatatctccaatgatcttgaccctgtgtcacaacaacggtaaaccaataagtatatatcccaaaatactgtttaatagttgcagaggacaacctaaagttttctaccaaaccctatagtataaatacactaaaataaaacttatattttggctctaagacatagatcatattgtagagcttgtctcaagcttcgaaacagtannnagaatgtccaaaacggacacccgagtaaaaagttatgacaaaaatatgatt

SEQ ID NO: 134319 - DNA, 997 bp, Cannabis sativa
tgttcttatatttattcctttaaatgtttatcttaattaatttgtgcaattattgtaatatagttcaatttgatcagttatgtaatattaatgtgaatctactttctacataaaagggtgattcaaatcaaatagacgaagttgaaattattacaagagtgaactaagcagatcgaactctgactgaaccactattatttattttattttttttttctgttcctatttttgtctattttataacctaaactttgagcactcacgagtattctaaatgaatatttgcataactgtaaatagatattcttgctttattcgaatactcacattttttttttcgtattagtccaaattcttctaataacactagagtatttagatcacatactatttataatttaaagttataatggaatcattttgatttgtgggtgctcttattatattatatagataaatataaaactaaaaagtaattattaatacgtttaatatctctctttcaaatataaaatatcctgccgacgtttgttttcattttgacaataattcacaagtaaactttgataatatatatggacttgtttggtactttcgtattgtataaaaatgtcatttttgttagtatatttttgtgttggtaagaaattggtattgcagcaaaacaaaatctagctacttttgatgtatcgacaaaaagggttagtaaatatgaacgttggtattagaacttttatcggcgcaaaataaaaaacgctagcaaaaattattttttccagtacgtaaatacgctagtaaaagttagacttttactactgtaaatgtgcgctggtaaaattttaacttttttgccagtacagtttgcaagatgcactggtaaaaattacctttatcagcacagtaacaaactgctaacaaaagtgatatttcttgtagtgattatattgtattgtatgaaattaaattatatatcatatatttatataatattatatta

SEQ ID NO: 134320 - DNA, 572 bp, Cannabis sativa
gattcctccctcagcccacacatcggacagctcatatcctcaatctgaaacctgcttccgattactgctctaacagggagagcattggataggatacaccaccaaaaaatcttatggcgctccaaaattttgttattccaaagcgatggagacaccttgcagtgaggagctctttccaaagcttgggttaaataagtcgatttgtaggagaatttcccattactctctaaggtccaaatccatctatccttgccctgacccgaaggattgccaccctttaaaattgtagaaacaatcttatgatcaaaaggttgtttaacttgggaacatcccatttaccacatgtcatcaagagatcggccacaatgttgtgacttgaagtaccaccaccaatcgttttcaaaatgaaacctttaaaatgaggaatccaaggatccctccaaatgctagtatctgtaccatcagcaaccgatttacaggccccttttctaaagattgcattggctttcacaatatttttctaaaaccaggaatcagagtctttataactgcaactgagaaaatcctttcct

SEQ ID NO: 134321 - DNA, 632 bp, Cannabis sativa
taaatctaatttctactaattttaataatgtacattgctttattttgtaagttagcaaaatctttgtaaatccaaaaaagatggcgactactctttgcactgtttttaggatttagcccatgtctttcttatattacgatttcccataaacgctaattgacggctactctttgcactgtcccattagctgcgaagaggtcaggtcttgtctcactaaattcctacttcgaagcctactcaatgcatataaaataaatattatttcctacaactagaaaaaagacctcatggagcctagagataaagggaggacatatcaatcactttaaaaatctccatttttttttgtctataaatagaaaaataatgtaagaggaaaagaggggtcgaagtttagaaataaaaagaactcagaaaccataagagagggtattttctactgtaataacaatactacacacattaatataagtggctagtgaattaaagttaattaacatccaaacaatgtaaaaatatttttctctacttataattaatatttataaaattaaattaaataattgtcgaaaatttcggtaactattttttattattttaataattaaaataactatttataatatcctaaa

SEQ ID NO: 134322 - DNA, 863 bp, Cannabis sativa
gaggttaactggattagttatccagacttgtaacatgctcaaacactggattggacaaattagcctgtctaatccaatccagtcctgcgtaccaaacgagccctcttagtataacaaaaatgcataagttaatcactgacatcgttcataatcattccaataataccacaattttgtttggtccatccaaaccacttaataaatatcttggatggattaaaaattattctaaactgcttaattaataaactaaattatataatatattacataaattaactattttatatttaatgtttaaaatttatagtgtttaacttaaaatttaaactataactaataatttttattatatttagatattgaagttaaaatttaaaattaatactatatgattacttctttctttctttttattttttaatgaatatttatttaatattttaatgtttaatgaattaatattagtcttatgttaaagttaaaattaagaataattagtattttttttcctgaatttatgatactaccagaccgtgccccttaaaatatacaacttaatatgtctcctcgaacttttatatttataaaaggaatattggcggctaaaccacttgaactttacggtttgttaacacttaaccacaaaaactgaaattttggcggctaaactacccaaaccctggttccgtcttgctctgcacacctccgtccaaaaatcacagttaagtgccacagtggactgtccacgtgtacacacgtgtactcgtggcaattttttagtggtccgcgtaacattaatattaaaaaataattataaatattaaaaaaattaaaaatcagaaaaaaaaaaatatatatat

SEQ ID NO: 134323 - DNA, 655 bp, Cannabis sativa
ccattcccatgattgatgagctccttgatgcgctacatagggctaaggtcttttcgaaactggatctcaagtcgggataccactagatcagaatggcgacacaagatgtagagaagattgcttttttcgtacccatgaaggacactgtgagttcctcgtaatgccattgataagccttttatattgataggccacctattacctttgtgtactcccgaaggtctaggaaaggggctgtgagtcatgctggagagaattagtgctgatgtggcaagtaagtattggtgaggtggtttttgctttgtgcgtgttttgtttgaataaaagttaggaagttagcctttggggggaattatgatatttttgagtaattgtaaccatttgggagagaaccaggctctcgaagtcctggaaatttaatacaaaggcactgccaattttcatccaaattcctctctgttatattttgttctttcttttctgcaattagcgtcaatttgattgggagatcctatcatatacattgtggatataatagaaggacacataagctaggatagagggcttttgttttaaaggattgttttgtcttatttttatcatggtacccaaggacgttgaagaaaatgggttcgataatgaaacgaaggatgac

SEQ ID NO: 134324 - DNA, 756 bp, Cannabis sativa
gggacgagattaataaactcatgccttggaaataattgcacctatgttgcatcagctcaaaatcaagatcaccttaatcatgatcaagttttgtagtttctcaagggattgaacaaatcttatcacgccattcgtgattaaatcttgcttatcaatccttgtcctccccttaacaaagtgttttcaatgtttattcaccaagaaacacaaagaactttgggacatcgcattacacctccacctgttgttactacaaaaactcctactacaacagctactatccttgatgtcaatcccactgctaatcaaacttcaagaaacaaaagacctcgtccttattgtactcactgctaaaagtcaagtcattaatataaggataaatgctacttttttcacaactttttacctggttatgacaaaccaagatcaaatgagccttctccttcgaataatcaaaaactagagactagatccacatctcgcaatgccccacagaatttacaagtctctattccaccaagagatcaaaacactcctcaattaactcctgatcaatgtcagcaattaatgtccatgatcaatcaacaactacaacctagtcatgatgcttcaactttagatggtccaaccattaacaatttttttggtatccttgaccctttctctcctacttcttggattatagatagtggtaatactcaccacgtttgttgtaatattagatgtttttcctcaatacacaaatccactacacat

SEQ ID NO: 134325 - DNA, 1026 bp, Cannabis sativa
aattattgagtgatttttttttttaaaaaaaaaaaaataaataataacaaattattagatgttgtctcctaaagggtcagcatcgatgtagttagttaaacttgaatataattaatccacctaaactattgcaattaataataaatttgtgatcatattgttttttttttattaaaaattattttcaaaattttgatatttagaattagttaaattttaaattaaatttgaatgttttgatagtttaactagatgaatattttcattatttgcgaagataaatttgacaaataataatcttttttaattactattacaaagtataatagcgatttttgtttttatttaaatcactattatgctttcaaatttcaatgattatcactatattgaatattattaattttaaaaccatgatattaaaaaaaattaaaaattaaaataaaattaacatacgtgacttgacacgtaacatctatctagtatatattatacctaacaaaaatatatacataggacatggattagctatttaggtgactaattattaatggaccaccatttcacaagtttaattaagacaataatgatattgtcaaagtcaaatttacactagagctttataatttgacaaagttaataaattaatgagaaattattcatgcataagtgtttgtatttttttttattattatttgaaaattaattaattaatcccacgagctctattatgtatcactgaatttatttaactttgtggattgtaattattattttgaataactgagttatgaaatccaattcccaagacaatagaaaataatagtaataaggtatgcaaatgatatatcctcttgatcatgtggtaattaattaattaattttttcatgaaattttacaatattactttatttaatccgcgcttcgcgcggtattacccaacatttgtaatctttttattgagaaaatttttatttttatgatttttttttaccaaaatttatagaaggctaattagcaatttt

SEQ ID NO: 134326 - DNA, 945 bp, Cannabis sativa
atgatctagttaatgggatggacaataaaagtttcaaataattttatgggtagaatacccaattattatctagatttctaagaagtttcaaatagtttcatgaaataattttccgttttttgttgtttttgttttgatttaattaacctaatgattggttttaatttgtagtttttgatctagatgtgttcttcttgttactcaattgtcagtattaataatggtggttctcggcgtttgggtctgtttctcgtaagtcgtatgtgatctactaaacatgaaagctagacttcataaagaagtcgtatttttgtaataaaaataatgggtcatataaaattgaaaaacccgtatcactgtatatgtgtaattcttcaggtggtattgggctataactgaaaaagttttgaaaggaaaaaaaaaagcactagtacaagatattaatctaaacctttcacaaatacatgaatgtatgaatttttttttttttttttgaaaagataactatgttattataaattattgagggtaatcatttacaataacagagtagatcgaaggaggaaaattctccaactaagagatagtctcatccacccctagtgcatattttgctaaacaatcagcaactgcattcgccatacgcttaacatgagtaacaactatgttagggaaaaaggataagagactagtaatgtctaaaattaaatcattaaaagagaaaacagccggcacatttgtattcaaagcatttgagaccataagtgcatccgtttccactattgatataggcagctgaagttgcatgacccagttaagactgagaaacatttctttagcctccatttcgtgtgatgaaaaatgaccaacagtaggcattgaaaaagcagccacggcatgacctgaagaagtcctcacaacagccccaacaccaataatatgtcg

SEQ ID NO: 134327 - DNA, 608 bp, Cannabis sativa
  modified_base (530)..(536): a, c, t, g, unknown or other
ttcttaaagttatctttaccatgaaaatacttacatagatgtgtaaagtttcttgaatgctcatgtaacatatggattttgcataccataacataacctatgcactccacaagtgaggaaagaagtgccttcattggtcgcttgccataccaaatcctcctgagctttcttgatcttaactcttaggagactattacacatgtgagaatcctctacttattcgaagatttgtgagttggaagtattgaactcactaaataaaaaattgaagttgtctcaagaccaactccacaagctttacccaacactcgagagcgtcgttaggtctgtgagctgtaattgattaatattaatgaagtaccaaaaaaaactttattcaacatttttattcatcaatgaagtacaattacattaattataatattatgttaattttctaatatattttctctatttttaggtgtgtttgttggagtaaagctaggattaaattaaagataatatgaagaatttgttgggttttgtgcccnnnnnnnaacctatttcaatataatcagattcactaattattaaagatcagaaattgcattttatgttgcatagttcac

SEQ ID NO: 134328 - DNA, 540 bp, Cannabis sativa
acacttataattatatgtaatatgtttatctatagaattgaatcttgttgttgcatattttatgagtgatatagaaactaacacaatgaccaccttcttgatcttaatgatgaaactttacttgcttgccatatggattaagtaatagggtccagtttaggctaagatgaattaaaattgtgcttaggacccactcaattcagagacaaaaaaaacatagttatcctttaaaaatatatatatatttttttagtagttttttaaaatattacatattttttaaatgaaaggctcaataatttttatttttcaaaggcccactcaatctcggaatcgactttgtcaagtagtataaaaaccgagcgggaacatggcggtttgtaagtttatggcttgatgaatgacacaacaaaagcaactttgttttgcttgatgtgaataggcactacaagaaatgtcacatttgccagcacattttggtgctggcaaaagttggtattgcgctggcaaaatagaatttacctatgatgtgttggcaaa

SEQ ID NO: 134329 - DNA, 631 bp, Cannabis sativa
  modified_base (145)..(146): a, c, t, g, unknown or other
atatgaattaaaacgataatttgtgttgatttggatggtttcatgttggtttatgtgcttatgagatgaatgtatgtgttgtacgaatttttcccataaaaaatatcttttctgtttctcaaaatattttatttggattccttgnnaaaaattaagcaattttggttttcacggaactcgattccgataaaaattgcaaaagttatgaattttggaaaaattgggttgaaggggtgtcgagtgggtgcatcgagtgcaccaggcactcggacaacactccatccgcgcgcgtactcatacaatttttttgtctgaagcctcggtcacggacgctgcagctgaccgaggtttctcggttagggatgctgcatccgccgaggtttcttggcgtgtctccttcctgcgcgcgcgtaagcctctgtttgcagcctcctggggctacagcgtgcaacctactgccatcttcaccctaattttcgatttttgcatgattttttcccaatttttggatttttctaattttcaaaccccaaatttaaaataaatttttattttttaatatatttgaacttaaatatcatttttttaatttaataatatttttttttcaatagattattattaattttga

SEQ ID NO: 134330 - DNA, 557 bp, Cannabis sativa
  modified_base (47)..(48): a, c, t, g, unknown or other
aagttcatatttaggatgttaaagacatacttgttagtaaatctagnncctggtaaaataaattctaacaccccattattttttatctcatttcttaccttccaaaccgtaacattcatctcttccaaaactcaaagctctcttttcttagcattctccttccacggcttcctcatccaatccagcctcaagggctaaaatgaaattggctacagctcaataacaaagggagctaagggcaaaagcaaagcaagaacccactttgttctatgatcaagaggactaccaacgttatgtcaacgatttctcctttaggaagaccttcaaaggtaaaatatgtgatctccctagccttgattatgttgattttagccaccactttgatattttaggttggacctcttttatcaatatcaagacacccttatatcctaggcttgtactaggtttttatgcttacatcaaaccatgctatgcacctttatgtgttaaaaggacacttagaggggtagctttcaattataccgtttgtaacgttcctgcttcaagcctccatt

SEQ ID NO: 134331 - DNA, 760 bp, Cannabis sativa
  modified_base (78)..(80): a, c, t, g, unknown or other
aacaaattaaaagaaataaaattataaataataaattcaaaggaaaaaatttgtatgtataaaaaaatatttaatttnnntttaaattgtatgtagaaaaaaagtatataaaaatagaatatacctgtgatttattaagttttgaaatataattgtattatatgtattagacctttaaattactattttccttacattaatatattatttgtatatacaatttttaattttttttataaatatgtgtggattgaattggatcagttacttttacatgtcaatcaacatctaatccgcaagtacggatatccgcacttatgtggattatattatattgaattggatcatgcaaattatattggatcaactattttatgaatacctctagtcgtagattatttaaaataaattttaggtataacattgaaaaaacccatatatgtatcattgttaaaaagacaattgttggcgtttgataacacttttattttttaaaaattttttaatcacaagaaagaaagtagaatttttatttttgaaaaatgaaaatgtgttttataatcacttttgtcttttaattttaaaacaaaaaacaaaagtgcgttatgtaaagttcatttttattttttgattttaagtcagatccgggtcgagtctggggccgagccgaggtttgggatcgggaccaggttcggggctaaagttcaagtcggagctctaggtttggattcggggtctaggttagggtctctgtccgtgg

SEQ ID NO: 134332 - DNA, 584 bp, Cannabis sativa
attttacaatctaaatatttttatcttggattagcttatgatactttgagtttcatgcatctccaatgtcattctctttgcaatatacaagtaattaataatctaccatgtcttttgcgagcagtttttcatctgccttgttatacgcgtgcagttgatgatctcctacacattttttagagcaaacttaaaatattttaaataatttaccttaggaactattttgaatttcctttgattgctcatatgaatagttaatcatctatttatatttttaggtcaagtattatttttcaaggcacatttgtgtctcgtttataatacatgccaaaaccatgtgagccgttacatattcagctcacatatagctttttattgttttatgagacaatctcatttacaactgttattttgatttttttttcttttaaagaaaaggtttttcaatttcttgactttatattgtcaaaagacagttttaatcaattatcctttcctttgtagaaatttttaataaatttttaggtttgtaatacaatatatatttctaggtggactctagttattatacacatatatatgcc

SEQ ID NO: 134333 - DNA, 843 bp, Cannabis sativa
attaagctttccagattcatttttgaaatcatataccagtttgtattttttgtcaaattaataaaataatcacaaaccaactaatcatagttgcatttttttttcaattaataaagttatcattttaaattaaaaggagtgagcatttcaaaaacaaaaactaaaaggagtgatagacattgtcacgtcttaaattcatattgaaattgtaatgactttttattgattagcgcttctaaatttcatcaaacgtgctaactcatctactatattgtgtaaataaatttgtattttttaacaaaactagatttgtcttttagcaacaaaaatacactaaaaataaatttttttttaaagaaaaattacagtataaatacatatgtagttcaatttaatgcctatataaattacctttataaaaaaaaaaaaaaaaaaagaaagaattattctattttaagttaaaattacttaaaataaataattatatcaacccaaagaaaaataaatacttatactatttattaattacaaaaataatatttataatgtttttttattacaaaaatacaatcatgagataaatttcaagtgcaaaaggagaaagtgcgatatacatgtggataggataagtgagtgagattcacacgcgagtggggagggtaaaatcatttactgatgcgcgtagaactgcaaaatcaaaatgtggcaggggctttgcggttgctacatggtagtgtggacaagtgagcttgggtgtgcagggctattttttcttaatgcaacaattatacaaaaataactaattagcaacacaaaaacaacttaaaaacaatcaaacttcaa

SEQ ID NO: 134334 - DNA, 718 bp, Cannabis sativa
tatgtacccttttacataaagctcatgatgagattggagaaaaaacataataatgaaaataaaaatagaaaaataattgtaataatcttttagtacaacagatctacaattttatttttcatataaacacaccataaatactatttacaattttataataattaaaattttaaaatttagatgacatattagatattattattacagtaattaattctagttagaaattacttttttaaaagatcatctttaataaaagtcgttgagtataggcaacgatttaaaacagtacttactaaattgaaactttacacttttaaaatagaatctttgacggattacaaacattggctatactatagccaatgcttttaaatcatcgactatagtgtagctaacgtttaaaaactatggaagattttgttagcccaagatatgttttcaagagaggagtaaattagaaatttaagctagtttcggtaaattaaaacttttagcacaaaactatacaattaaacacttaatcaaataaatgcaagtaatatgacaagcaataatgtatagcaaataatcaaacttgtaaagtaaagagtttaagggtaagaatttgcaaactcttgattcttacaaagttgggtagaggtaaccacctatgtccttggtcttcaaagctatggacctagttttgagttccaatatcgagccaagttaacgggct

SEQ ID NO: 134335 - DNA, 593 bp, Cannabis sativa
taaataaaatcataaaaatcgttaaaatgtttaaaattccgtaaaaccgtatttttgttattttttttgtttttgtgcatttatgaaattaaccctataaagaataccgctataaaaataataaataaaaaaaaatctagcgtatgattttggatgtggaggctgtaatatagaatattataattagtatcactattgacaacaaataaaaattttactacatgcatgtccattttattatgttattatacagctttagtaaaattttattgttatatcacttcaaaataaatcactcaaacttttttttttttgttttacataacatttttactttatatatatcaacaattttaaaatgcatcaccaaaagttctttgtttttttttttttttttcaaattttaatatattttactcattttaaaaatattattaataaatatacatatttacgtatataaaaaacattacaaaaaatagctatagtgataactttttagtcacataattttttgtaagtagatgtcacgttttgtcataatattagatacaagttgttactagtttagttttagtcacaacaagtattgt

SEQ ID NO: 134336 - DNA, 642 bp, Cannabis sativa
  modified_base (337)..(341): a, c, t, g, unknown or other
  modified_base (537)..(570): a, c, t, g, unknown or other
aaagtattgggggttttgccgccatttaccctataaaatatggtatttgaaaactttattacaaaactatggcatagaaaatcccataaaaatgtaaaaagaacaaaaagtctataaccccaataaattaaaaaagagattatttgacaattatacaaaaacaataaaaaaaattacaaaaatacggttttacggaattttaagtatttttacaattttttgatttatttatagaaaatacgatctttttatgttgtactcttgttaatttattgttgatttttttttatctgtatgttattttttcttataattttaatgttattttcatgttacnnnnntgtagttttttttgttgtttttgtgttatttttataaaaaaccgtaaaaatatatatataaaaaatttaaacgtaaaaatgtaatttttttacaaaaaaaaatagtacatttatgtaattattccataaacaaatatgcatgaaaaagtaaagtttaaatttttaattatgtacggtgccgtttggtaacactttnnnnnnnnnnnnnnnnnnnnnnnnnnnnnnnnnnaaatttttgtttttaaaaaaaataattttttaaaaacaaaaatgcgttttataaccacttttgtttttcaat

SEQ ID NO: 134337 - DNA, 718 bp, Cannabis sativa
atagcaagcatttctctggtttatggttgagattttagattacttttagaattagatcacttagtattgagccttgttttgagtgtgatttgagggatattaaagggattgcctattcttgaaatagcttccctcatgtgagatctttgtaattacattgtttgatatacaaggcttgattgtaagcattacagctgtgatcatttctaattgaattcatcaataaagattgtcatttaatcagctaagttcttgttttcttacaccttcttcagattagtttaattggcattattttagttctgtgatttgttaatgtaatgctcatttagtttgtcatctgaattcttgttcctacatgttcttctctggtttgttactggtttgatctcagttcttgcacaacatatattttgtaaatttataatttagaaaccataaatataatagtttgtcttgttagtgattgtgatattattgtacttctcctctctcatagtaaagaggttttacactcttttcttctataatatttgtattagattgtgttagattgatgattgtatattaaattaggaatcattaatctattatattttattttatgctattttaagaaaaattaccttatatactatttttttattttttatttttttaaatttacggcttgagtttctaaagtagttgcagtgctagttgcaataaaagtttctgt

SEQ ID NO: 134338 - DNA, 815 bp, Cannabis sativa
actaactattttgccaaacaagatattaggaattcatatgtaattaccacctcatattcaaacacaccttgcattttaaattatagtgtaattactaaactgcataattaccaccctaataattaccctacctagtaattacctagttacttccaaataactatcactctattagtatgttcttctctctcccttcgtgaatgacttaataaaataaaagttacaaatttctaccattgctattaaaatagggaagaaaatataatagaaaattttgaaaatcttgcttgtaaatcgtatacttaggttgacatttataacagaaagagaaataaaacaatcttaagaaagattttaaaatctggtgagataaataaaaaattataaaaaaatatattttaagttaattagttatggttattttggcttatttttattgtagacgatgattgaggtgtggtcaatacaaaaaaaaaaaaaaaaattatatttagtgacgacttttcagtcacaaaaaaaaaaattgtgactaaattaatgtgacttttagtcacaactaaaaaattacttgtgactaaatatagtatttacatgcatatgttacattgtctaattcggcaagctcagcctatgtcatagcttagcactatatcacctaatcatgtgtatttatatatcatattgcctaatcaggtaaactaatttcacaatttaaaatccattcatcatatcaactaatcaggtgaagtacgttgtatgtcacattcatattatgtaatgaccgctctagtaatgtggattagtaaaggcaatta

SEQ ID NO: 134339 - DNA, 1161 bp, Cannabis sativa
tcttcaattctcacatacttccatgtaaattaggtataattcaggggcgagcctgacgctaggcgggctaagcgtgcgcttcaggcccctgaacactcagagcctcgaaattgtgaaaaaaatattagtatatagataaaatattaaataagaaaaaaatataataaaaattgtttggtatagtgataaaaggttttactttaatttaagagataatgggatcaattcccaatcttaccattacactaagcactagaactattattttcataatagttaaactatatataggggcccaaaatttaatttcgccttaggccccatataccttaggaccagccctggtataattacactatgtaattactcaaaactttagatgatgtttagttcaccgtaatagtaaattagaaattatgattttataaaattagaaattattcttaaatagactatatttttggaataaaaaatttactctctgggataatattaaaaaaaaaatatcagattataattctttttgagtattataaattaaaaacagccccacttaaggactttaatctatataagataaagatatgatatattttcatgtggcatatggttttgttttgatgaggtttcaaattgaatgggatagaagaaaaaggagagcaatacaataaattcttcatctacctagcacatggcaatatggcatatatatcaaagaatatattgctattgaatattaatggtgtctaatacctttatgttattttatgattgactagcgatactttctaaaaattattatattaaattaattacataaactcaatacttaattaaactaataacaatatcaaaacaaaaaaaaaaaaaaaaaaatactaaacacaactaccaccggtctctttttgaatttctcttctttaaatgatatttatgctaataataataataataatacttggaaatggcatatatatatagcttcagctgccacaccatcatatatatgtcacgtctttttcttctttgttcatttagatttacatatttttggacccccaaataattatacttctatttatgtgtaatagaaatttataaataattaagcattaattccaacactctttttcaacgtgatccataaataatatccacatc

SEQ ID NO: 134340 - DNA, 574 bp, Cannabis sativa
  modified_base (321)..(321): a, c, t, g, unknown or other
  modified_base (503)..(513): a, c, t, g, unknown or other
  modified_base (544)..(546): a, c, t, g, unknown or other
aggcttggacccgacccatagttggtgtctaaatctggaaattggacctggacttggacccagacttggaccagaaactgaacccgtactaaaactcgaaatagacttgacatgaggttggtgtatggattttccaccaagactcggacctgaagccaaacacggacctagacccagacccacactcgaaccttaaattgcaccctgtgacttgaaatcggaaccagaactggaagcagacccataaacagtaaaccttaaaccttaaaccctagatcctaagctatttacactcacccctaaaccctaagccctaaaccntaaaccctaaatccctaaacacttaacccaataccctaaacctcaaaccctaacctagacacgggcccacacccatacctataccgagatcagaacccaagaccaagacccagacccaaatctagacccgaacctagacccagactcatgacttgaacctagtgttggaaatattttaccannnnnnnnnnntactaccatgtatgttttattaacatcctannntgaattctaaaataatgaaataaagaca

SEQ ID NO: 134341 - DNA, 879 bp, Cannabis sativa
gttaatgaaacatacttgttagttaatctagatcctggtaaaatatatccaacacttagaggaacacttcaagaaaggcccacctcggaggtacttggcacttaagactttatagcacagagattgatcttcattaatgagagcccaaccctatttagctaataagggataatttatttccatagtctttcagaagcccagcccaccccgggacttggagaggcacaactgatcccaggcctttaagtagatatcccggtttccttgttcacaaccctaccaaaagtccctaaccatgccatcaattttggaggttaatttattcgacaacttcatagtctacacggtgtaagttggtaaggaaaggccaatcaacttgatcggagtaacacgaccagccttagacaaggatttcaacttccaaccatgcagcttcgagataagattctctataatgaaattaaaattcgtattcttattccgagtcctaaacatccttattgttagtatatatttttaagtgaatggtatatatattttttattatacggtaaattatttttttgaaaataatatttaagttctattttctattgtacttttgtttacgtgataaataattttattagcatgctatatatatttttattttcatttgttgttattatatatataattctattgtaaggtatatatattttattatataatatagataagttttattgtataatatatcattttattttaattcatgaatgcttagtttttattttattataaaaaggtgatatataattttgtaagtatggtataattattttatggttgtatataattttattaatatggtatatacaatttttttaataatattat

SEQ ID NO: 134342 - DNA, 623 bp, Cannabis sativa
  modified_base (589)..(592): a, c, t, g, unknown or other
ctgaggtggcgtctaccatttgatcgatcctcggcaaagggaaacaatcctttggacaagctttgttaagatcagtgaagtctatgcaaactcgccaagtcccatttgttttatgtaccagaaccgggttggccaaccactcttggtagtacacgtcccaaatgaggatgttagataataatttatccacctccttttccagggtatcagcctttaccgggtttagtgggcgtcttttttattgtacaagaggcttatctgggttgatgttcaggacatgggtgatcacgtggggacttattctagtcatatccgcatggcaccaagcaaagacgttcgtagctggatttatggtgtctatgattttactctgctcctctagttcaaggtttttccctagatgaataactttggatgggtcgaggtcacataccctcacttcctcgatatcctccatgggctctaacaccgcttcagacccaacacgagggtccaactggtcctattcttctaccgaaactagtcctgactcccgtaccatcaggaccgacaaatatactacgacgttgttgttgggttttatgccctnnnnaaaactctatttcaatgtaatccagattatt

SEQ ID NO: 134343 - DNA, 670 bp, Cannabis sativa
gaatttaatctttgttttattattcccactttatgcaatgcaatctctttgtaatcatattattagaattattagagctgcttgattagtagtaaatctaaagtgctgctagtctacaaagaggagccaaagtgaaaacttctgctgtgtctcttaatatctttttccaaacttttcggtcaatgtgtgtcagttttcagtgttgggatcttttaacttgttttaaaatctctaaatttctcgattatgccttgtgtgattctttcaaatgtcacgttttgttctttggtctcttaaaagttgttcattatacgtatactttgagttagtctcacattatactaatttataaaaataaaataccatatatatataagatgaatgaactccttttattattgtaaattaattttaaaatgaaactccaggctactcttttcactacaaattaattttaaaatgaaacttcattcatcttagcaccttttattccaaattgtaacagatatttatactataaataaactagtcttgtgcgattctttcaaatgtcacgttctgcctgtagtctcttaaaagttgttttttttttttttgaaaataaaagttgttcgttatacctatactttaaattagtctcacattactaatttataaaaataaaatacca

SEQ ID NO: 134344 - DNA, 910 bp, Cannabis sativa
taacttagttaccaaatttagggccattttgcatcttaatatattgtactcttttttctttagctcaggttttgtcccactgagttttcctgacatgattctaacaaggcaactttttttttttaaagtggtaactttaaattatgataacatacttgtactttatgtagcaagtagagaatttgtgagattgagatcatgacatacatatttggaaaatatatggattacactcaataaagaagtatcaataccagcaattctctatgaagatatatcatactgcttgcattactcaactaaaaggaggatacagtgaaggagatataattgaaacacattttactaaattcttcttaatacattacaagagaatgcatattggtgtccaacatattcaatcaagtatcaatcatgcatacttatgtacaaaattattaccaacatcaacgtttgagaagacgacatataagattataattcatcaattaaaaaatcttcacgaatacctaattaaggaggagttcattcaaactgtactcttttccttttaaccaaattttttaattaatatggcagatattatgaacattcaagtgggagtgtcataaaatattatatatatgaatgtactaatcaccaaaatcaatgtattaactatcatcataaatgtttgagtgtatttttctttattttattaatttaatttctcattataatacttatatttttatatttttgtatgaatagaacttcatcccattacaataaactaataaaaaaattctagttcaatttctttttctctccttatcatcttttcttcttttcttcttttctttctttatttgtttgtcttctaaaatggatcattctctccatgtttgaaaaaaagaagaaaaaactgaac

SEQ ID NO: 134345 - DNA, 1390 bp, Cannabis sativa
ctagtacaagcaacttactttagtaagatgctggtgcatttttttaatggctaaatctataggaagcttcttgaaaagactgcttaactttaaaatttggaaattagcagattaatatggtttaattatgaaacttgtatattagttatgatttagtattttacagagatttatttgaattcagaatgcagtacatatgtcatatatgaaatttcatattcttgcatatttttgtgcccgataatattggaactcgtcgtttggtcattagaatcacattttagtatttttagtatagcagggtaatattgttagacattgtaaatgtcatgaatagttgagattttagaattgaccaaaatacccctaggtggtaaggttgcttttggtgtaaacaagggcaaaatggtcttttcgccaattgggatttttgtcctttagtgagaatttattaagttatgtaatctgaatttttggtaattcattttattagataagatttaaaatattttactaaattagaaattagagaaaaaccaaacacaccttctccttcatctctctccttctctcgagctctctttgaaaccagcagaacttagggttttagcagtgtaattcaagggatcctagctaactcttgatgtgtccattgaaggtaatagctttagcacttctccctttaattttcttatgtttttagttaggtattttatggttttctttgagattaggagttgtagatgctattgttatttgttgatgctttctgtagttaatttgagattatttatgttaaattgaggtggatttaggggctgttgtgatgtttgagaaagctttgagtttaagaactcaagcttggctctttaatggtagattctgattctgagcttgtttagttgttttgttgcttggaatatgtttagtatgatatatttagtaggtctggaaagttttgtacagtttggggatgaattgaagttgtaatggaattttgagtgattcctgcattgaactggaattttggttcagtgggacctgtaggaactggaatttcggttgattccctagaaaccccacagaactggaattccgattgaggaaccagtctacgggttgggacagttttggaaaccctagtttttcccgttttgcaaaatttagggtatttccgtgttatttatcgataggcaaacttttagtttcaagtttaagtccccgaaaagtgatttatcgtgtcactcattagtctcatgaataatgtgatttagggcctataattcgtcgagcagctgttccactcaggttggccgacacacctgaatttggaaacaaggtaagattagtataacgatatgcatatacatttacatgtttagtgtgcatg

SEQ ID NO: 134346 - DNA, 740 bp, Cannabis sativa
ttgatattttttggttttttaattttttttctagtgtaattctatttagttatatctttccaattagaatataatttacttaatccaagtgtaatcttgaatagatgttctactctatttctttgttttgtaagattaatttatatagtgtgaacacttaagttatactctgagttgtgataaaaatactttttgttaggagtttgagacatttgtagttatctgactgttaagtgttaagtcaatactcacgtgacactttgtgattggttttttatttttaattttaaaaatcatttaaaatataaataaaaattaaaaaaaatgttttttttttctataatagtttttctaaaacagaatatattaaaaatcagtaaaaaaaaaataaagaaatattaataataaaagtctaatttggtgaaaaaaaaactaaagtctgataaatatttgctacctctagctctaacatcgacaaactttttaaatttgaaatttgctacctcagctcaagtcaaagaacaaactcttaagtctgagaaatatttttttcttcttcaaacaacttaactttttttctaataaaaatctccataaacctagaaataaggatacctccctcaaattttaatctaaaacaactccatccattttgtcttacattttggccataagaacaacctttcagatttaagaaaaagaatcccggcaaactatttgttttttggtttttttttttt

SEQ ID NO: 134347 - DNA, 1289 bp, Cannabis sativa
aagatcacaaaggaaacacaacaaaacagggtctcattatctcaagcttcgacaaccataaagttgaggctctagcaaccacccacagcaaaagccccccacgaccatcgacctgcataggagaaagggagagcgagatagaattgtttagaaaaaacaaacaaccaacgtttacctgggctttgaggtgattcctttttttgtcttatactcttgggttgatcttcgttaggtcaggaagacaattgatccaacaggtaaaatttaaaaaaggaagtggaaaagatagttattaaatgctgatgtgcatcaaaaccagaaaactaccaaaatcagagggcatgcatttttttaaaaggaattatgacagaaataccctctgtaatcatgtaaaatgcacttttcattaaaaagaattttttaagggacaatcattatacccaaaatttggctggtacttcagaggaggacacatgtcaaccagggagaatacaaatcaacaatataatggcaattatattaaagaatattaaaatgaaataactcattaaatctggagctgatagagtatattataacttgttgaatgtaaagtcttaagcgcgataaggatatacaaactattgcctcatgcgttgacgaaaaaccattctgcgttagaagacacaatcataaggatggcatctgtgatacaaagcgaggcatcaacctcgctaggaataaaaaagatgaagatgggacatgtcaactgttagaatatgtagcaaataatatacattatacaaaataaatataacagttggatgaatctggacaatgagtagcgagacatccatctcgctataggaaggtatactcatggtacctttactaatcagctccagacatctttcaatgagatccactgcttcgtcgagtcagctctctcagatagaagttgacattcaaatggtgttggctgctgaagtttacctagtcaccaagaacattaattgttagatggagcattatgtcctcaatagcataaacaatggtattcacattttcaacctcggaaagacatgggaaaagctccatctcgctgtcagggttgttgttgctatcccagcgatatacactttgcagcctatctaaatccacgtcaaccttgacccggtaaaagcggataaatcacagctgtgtgattttcaaataataaactgtatttattttacgtgggacgtaatcgaatcccatactttctgggaaatatttttgtgggatattaatctgattgtaattaactgcct

SEQ ID NO: 134348 - DNA, 905 bp, Cannabis sativa
tcgatagtatatcgatggtttgtcaatgattctaccttatgtgattaatttttctatattttgtccaggatcgaaatagtatcgatataccatcaaaaaagtgtcaaaaattatcatcccttaccttcttactctaattatcgagaagatattgatatataatcgaaaaagcatcgataatcaattaaaaatcctagtttagcgagaaaaccagatctcgccatttcgatgaaaaaaccaacaaaacaacaagcacacaaatctatcgaaaataaactacatgctactctaaatatttaagaattttttgggacaatatctaccaattattgaggttaatgagtatgatttttttcaatgatgaggtccggccattcaccaagataggtaaagattgagaaggagtgagctaagatagagagtgttacagagagaaaaatagtaagtgacagagagtatgagagccaagtgatatatatatatagagagagagagagctagttgatagagagagtatgtgtgattagttcaattttttttaataaccaaggataaaatggagaaaatatataaataaaaagaattattttatataaattagttgagaatctaaattttgatacgaggtaattttttaagaatacaaaataaattttttcaaaataaattaaataaaatagggtaaatattattttagaccctgtgttttgcaaaagttgctaattagattttttattttgttaaatgataaaataaaccctatatttttcaaaatagtaaaaatatgactctaaacttaattttcgataattttattttttaatataaccaatttgatggtaatttttaacacgagcagataactaatttattataatacttttagatcaaattattattaagtt

SEQ ID NO: 134349 - DNA, 979 bp, Cannabis sativa
  modified_base (910)..(922): a, c, t, g, unknown or other
attttttaacatttttcattattaataatatgatttgaagaggttagaatgtgagtatctgtatgtcccaagagagagtaacaaagtagggtaaggagagtttgatatgttgattgttgagtgggtagaggaaactcccacgtgagattgcttcccattttacccactttatacattcataattcattgcaaacatgcaacctctcactctctcactctatgggaaaagtcatattcaaattttaaacaaagtgataatgctttaaaatagaatttttttaaaatatttaaaacaaaataaattaaaaatacgttacattatattctaaattcttctattttaaaacttttttaaaatttactattcatgctctacatttataaaatactattcattcctctaaacatattttactaattattccaagttttaattttgcttattatatggggatatgtaaaaatattgatagaatatatttgaatgaatagaatatattaaattaaaaaaagtagaattttagtaaattttaaagaaattaatgcatggtgtgatataaaatttgaggtaatatagagaaagtaattttagagcatctctaatggagatgtaaataagtggtgaaaagctaaaatatagctcatttaacaaaaaaatgtgctctaatggtgtgccaaaaagtgatgtaaatttgacacatagaaaattttgtgccaaatttggcataatatttgctatgatgtaaaatttacattacaataaacgcattactttttcatttacattcatgttatttttattattttattagtcttaaaagtaataaaaatttaattttaaagtttatttaaaagctgtatatttttatggaataattacataagacactattttttgtaaaatatttannnnnnnnnnnnnaaagaatgtttttttacatttttacggttttccaaaaataacacgaaaacaacataa

SEQ ID NO: 134350 - DNA, 519 bp, Cannabis sativa
aaattgtggcagccatgtcatctttctttgacggtattctacctccattactggctgaagcaaaggccttgctttgggctgtgagttggtgcatggcagtaaggtttcccttagattgcattgcaagtgactgtttacttctagtgaaaagagtgaagcattgttggaaggataactctgttttctcagacttggtggatcaaattttatcttgtctctcttgttttcctaatgcagcggttattcatgagtcaaggaaccacaatgttctatcccacaatttggctaaggctgctgttaggcttgagagggagggtctttggaatggctcaattcaagagtttctatgactttattgtaaccttgtactgctttgtatcttttccttgtggttgcaattcaagttctttcaaaaaaaaaaaaaaaattagtggcattgtacctctatcataattttttcacatgaaaaaaactaatacataaattaatattaaaaaaacactaaagtttaagaaaata

SEQ ID NO: 134351 - DNA, 656 bp, Cannabis sativa
  modified_base (450)..(458): a, c, t, g, unknown or other
tttaggacataaaacccaacattatcaccatagatgcttgtaacttaacaatagtgtcatttaaggaacaagtgtctggatgttgagagttatgaaaataccaggatcttgctcttcataattccactcatataatggattatagtcgtactcaggcttccaactataatcatcaagattagtgtgattaaacctagtaactttctcttcacaattccactcatataatgaattatagtcgtactcaggcttccaactataatcatcaggactattcttatagtaagaattacaggattgttcttccacttcatcataaagatgtgcaccagatggtgtaagttcacaacaacgtggtcgatgagactcataccaagcttttcacttttttggaactctcacccttgtaaaaaattggaaagcttcctctccgtcactaaattctggttnnnnnnnnntactagtaccttcagtagcactagaattttcattgtttaatgaagcaagatataatggataaaaatattcaaatcgacgacgatcttcttcattgatgtttttttgttaaaaaaaatagtataaagttcaactatgtaataattcaagggtatatatatgagatattcccaggccgattgggaaggttgtcaaggtac

SEQ ID NO: 134352 - DNA, 1762 bp, Cannabis sativa
  modified_base (182)..(183): a, c, t, g, unknown or other
tagggttatggttcggtgtatgggcgcctgattataactcgggttagtagtatgttattacttatgcttttcttactgagtatgttgactcacagttattgtttctatgtgtaggtaagggcaaggctaaagctgggcagccgtgagagcgagcaaatggaggttgtacatgtcggggcggnnaggcctggagcgtacgatctttgaaacatcagggctttttgctgtatagtcgctaggcgacaaaactttagtatatgaatagcaaacttttgtaaatgtattttgtaacgggatcccggaattttataaatgcattactttaagtttctattaaataagcaaattttgattaatcacgttttttattaatctcgctgattagcaatgagctgcacagtacgttaaaaatcatgctaacacgcatatattagttagagtgttacaaaagaagaagatgatcaacttattgcatacataagggatcacggcgagaattgttggcgctcactacctaaggtgtggcaagagttgtaggcttcgtttgattaattacttcagacctgacctcaaatgtaaaaactttatagaagaagaagacgaactcatcatcaatcttgtacgatttttgctttacgattgcatccttctcattacacagcttgtacgatttttttcaaactagaaatagtgtcttggttgaaaacaaaaatggaggagatggaaaaattttattgcggttggaaataggggtattcatccaatctaattcgcactattttgctcatagtgcatccgatctgcactaagtgcggatttcatattttagatccaatccaatccgcacaatagctcaaatccaatccaatctaatccgcaaaagtacggattggatcggttattttggattggttactatttattattagattatttaatatttatgaaaaaaaaaatattttttttcatataactagcaataaaataaaataaattataataattttatgtccccaacaatacattaaaataaataaaataacaaataacaaattcaaaagaagaaaaaaaatgtatgtataaagaaaggtttacttttattttaaattgtatttgaaaagaattatatataagaatagggaggaggttttaatgattacatttttattgtaaccatcatagttacattttttttagccattagattactattaaatggttgtgattaatttggtttttaaataaaactaaataaaaaatgacatgtaacttgaaaataaccttataatttattttcttataaaactttaattaagattaattttattcaaaattaaattaattataattattaatatattttttttgtaatttgttactaaacaaaattattttagcaattcatttttttcacataaatttttgaaattattaaatatataatcttataattttaaattatttcacatataatcttatcaatttgaaatttaataaacacaaaaataaattaattaaaaaaacaattataaaactaacttataatctaagaatgacctaagattcaacacatcattattttatatcttccaaaaatcaacaacttctctattaattcacttaggagtattccttacttttttttatacataaataatatcttgtatgtttttgtgttgcaactcttgttagtttgatcatattattaagaaaaaaattataaattctttagtttttattagataaataaatcaattcaata

SEQ ID NO: 134353 - DNA, 581 bp, Cannabis sativa
aaaataatattttattttgattttggggtttgaaaattgcaaaaattcgaaatttggagaaaaattccacaaaaatcggattttgggtgaaaacttggttgctgcccaggacaggctccgtacagcccacgaaaggctggaaacacccacattcgcacgcggaatgaaggtgatgcagggtctccagccgagaattctcggcacctgcagggtgcgcatgggcggatgcacagggtgctgggcgagtggagcatgtctgaacgcatgagtagtccttgtcttcaaacagcatccgcgctcgtatcaccttgtatgaaggactggtgggcgtgcgactgagccatgtgcaaccgatttttaaactttcataactctctcaatttttatcggaatcgatttccgtaaaaaataaaattgcttaatttttcacaagaaatccaaataaaatattttcagaaagaaaataattttttttttatggaaaaatttcgtaatgcacattcaattctcaaataacacataaaccaacataaacacatccaaatcaacacaaaaaccatattcatcgttttaaatccata

SEQ ID NO: 134354 - DNA, 756 bp, Cannabis sativa
tttaatttattgtgttggcatgaaattaaactaatgatcctgattaattaacgttttttcagttaaatttatttttggaaatcccctcatgtgtgggatattttgagatatgagtgagtgagagagatatgatgaattgggctagaaggcaccaaattattaagcggtctatttttcatattttaatatcgttattagtataatttaatatcgagtcatggtacgtatttattttactttaataaatattataaaaaaaattgctaactaattataaaataacactttatcgtagtaataaatacaccgccagaaattaattccatttaattttttacttgttttgtgttaccgtgatatgataattaatagaagaataaattttatttttatcctaaatttttatattgtgccccttataaattatgatatagaacatgtaaataatatctttccaaatataatttttacagccattctattatattttattcaatttaaaattaaagtaacgaaatgtaagccctaaaaatttacactagtatactatctatgaacgggtaatattaaaaaaaaaattaagtttttatgcttaatttttctatttaattagaaaaatctcttatttttttttattatataggctgaaggttattctatcggttgaaaaaataataataataaaaaaattcaacacaaaaataataaaaaaaaatacagaattttacttaaatatttttatataaatttattttt

SEQ ID NO: 134355 - DNA, 718 bp, Cannabis sativa
tattttcacttttttaattttaaatacagaaaactgattaaaaaagtgttattaaacgttaccttactaaaacaaactaataacttagaaaacataagactctttctgcaattggtactgtataaaaccccttatgaaatgcccttatgaaatgtgttgagtattaaaagaaatttttttaataataaataaactccttcaaagtaaaaattttgagtctgtcactaagtagatgatagaaaatctataagtgattatgttttttttttttcagagagaaatatcttgtatcttagtttgcaaagaagcaacaagctgttgtataatacagcacaaaacgtgagtctaaggccttagcaaatgctgctactaaactaaaatagttggtctccttacacactgaattaaaggtcacattgtctcattgtccagtaatttgggtagataactaaagtgctgcaatattggctactaactccatattttatgctcattcgaagtatattgaaatcgatctacactttgtcagagatcagattattgccaaaaaatttcaatgagcaattgaccaagtagcaggcgtccttactaagtctttgtccactgataggttctcttatttcaagtccaaactcaaaatggctacaacctcttttcgtttgagagagatataaaccgacaaactaattagctgtgttagttaatttggcctaagtga

SEQ ID NO: 134356 - DNA, 546 bp, Cannabis sativa
  modified_base (82)..(86): a, c, t, g, unknown or other
tataaatagtggcagacaagatcagaaaaagggggacgaaaaactcttatacaagaggccttgaaaaaaatactcagaaatnnnnntaagattgactcgtggactatgaaaaattttaactgcaaaccacgtaaaaaacccggtgttcatattttatttttatatagcttttattatttctgtgttgaataatcatcgtgaagctcaaatttggttaacaaaaatctgcgttaacagattatataatataattaactgtatgaaggaaataaagagtaaccatatattgcatttcttaatcaggcaagcttgtgccatagtcaggcacccatacatcgcatcaccacatcaccgcatcacataatctggtgagcccgtgccataacctcatactcatgtatcgcatcgcctaattaggcgagcccgtgccctatcctggtaccaatacatcgcatcacctaattatcacatcataattgaaaataaaaataatttatggtattcacatttaaatttatacacaataaattaaaaggtaattttaca

SEQ ID NO: 134357 - DNA, 735 bp, Cannabis sativa
aatcatggaagctttggctttgatctatagcttgcaatggcttaaagatactcaaataccagtccattatatagagacagattccttattggtggtcaacggagtgcaagcttctcaaaggcatatttctgattttcattgtttgttgaataatatttctcttttagtttccaatttccctggagctctcacatttatagatctgctaataatgcggctcatttgttagccaaagatgctctctcggttgatactaaatgtagatggtggaaggaattacctccccccaattaagcccattgtattataacttggttattaataaattggcttttatctcaaaaaaaaaaaaagagtaatgattatttaaaagaataaaaataaagaagagaagatcaaaaaaaattagaattgaaaaagaaaaaatcggaactgaaaaaaaaaaatatacaaggaagttaattggacagttattagattgggtgtattaattttccttttaagagaggtgttaaaaataatttgattataggaaatattatgaaggagaatatgattatagagaaatgtgtaaactgtgtttggttgtgtaggtaatgtgtaatcatattctctttaattgaattacactctttggttgagtacatgaatcttatatattattttaaaaaaattaaaattaaaatattttcttattgtatctatataatactaattatacataaaaataaaata

SEQ ID NO: 134358 - DNA, 645 bp, Cannabis sativa
agcctttcgtttctaagtatttgggagtcctccaatgctttggtcgatccaaaacatcttcctttcactatattcttcagagggccagtgctaagcttcaggtttggaaccataaatttttctcaaaagctggtaaggagactcttattaaagcggttatccaagcaattccttcgtatgccatgtcatgttttcgactccctctttccatttgtaagaaccttgacaaacttattgctcaattttggtgggggtcaactgttaacaaggctaagacacattagaaaatttggacatcctttccaagttccatgggggtttaggcttccaaaactttgttcttcataatcaagcccttcttgcaaaacaagcttggtgtatatttatgaatcctaactccttggtttctagacttctcaaggccaagtattttacacataatgatttcctttcggccactaagggtcacatgccttcctactcttggagtagtattttatggggccaggacttactttctcaggggctcatttggagaattggtaatggtaaatttgtttcagctcttcatcattattcgatttcagggttcaaaacaattaattttaaaaccaatgttcctcgtcctgattccactgtgtcttt

SEQ ID NO: 134359 - DNA, 790 bp, Cannabis sativa
  modified_base (309)..(320): a, c, t, g, unknown or other
atagggtcaccctactatagggtaggcacataccttgtcttaattaagataaggatggtgtcttttgtcttgataacttttatcttaacaatttttgtcttgataaattttatattttccctattttattaatttgaaaaataatttatcaaaaaaataaataattactattttgccaatacaaaatagattttttagagcaatattatacaactctttatccctacccttgacagtattttaaggtggcgatttagggaccatagacctataattctaagctctaatgtaaagaccgcttagctttannnnnnnnnnnngcagataattagggtttaattattaaacttgcatattagtcttgaattagtaatttatgatgatttatttgaattcagaatgcaatttatatgtcatatatagaatttcataattttgcatgttttgtgcccgacaacattgaaatgtggtgtttggctattaaaatcacatcctagaattataagtatagcgcgacagtatagttagataatggaaatgtcgagaatagtcgaaaatctagaagtgaccaaaatacccttaagtgatttttatgttttaagtgtgggcaagggcaaaatggtcattttgcctaagtttatattttgtcctctagtagacattagtagaagtaatatgctgattgttagatggtattattttattaaaatcattttatttaattcattttttaacaaaataccaaaattatcaaaaaatcacattttctctcaattctctctctctctct

SEQ ID NO: 134360 - DNA, 532 bp, Cannabis sativa
cattttagcatacttatatatatagatttcagaatatatctgatattttaataaaaaaaaagaaaataataataatacagtagtaataattagaataataataaaagagcacgcatttcaaaaaaataaaataataaaagaggttatcttgtatttttttttatctcggtatcattattaattataaatagtgaaacataaaacaaaacaaattacataacatgctgtagcaaaaaaaacattacgagaacaattaaatgttgtacaaaaacaaattgatcagtacgaattattgcgtattaattaactcagctaccaagaatcaagaaagaaaattacaatttttctaaaaataaataaataagtaaatattactattacactgtcgaagaccaattataccaatttattttaataaataattttaacttctcagaaaatcgaaaacaaactactccattatcatggaaagcatatctaagctagaaattataaggtcaaatggtataaatgaatatcgttgcttgctact

SEQ ID NO: 134361 - DNA, 871 bp, Cannabis sativa
tttaattaatgaataataatttatctttctacaaaataacttaaaagtatattattttatacaaaaaatttaaaaattatttcaattaatgaaaataatttacttgttattttattaaataaaaaatctctctagtatttattctgtaataatattttccttagaaacttgaaaaatgatttaagttgaataatccattaatatttcaactaactataatttctaatcatgagttttgtctataactggtttattagttaaggttattctttattatgatatattatttcatttatacttattactattatttctgtatacggtcacgtggcattatgaagaaagtggatcaagagtggatattccttagcaataaactttatacccaattaaaattcttcttcgttacttcctttagcaaagtggtggcgtgctttgtggcctctaaaaattccccgaaaaattaagcacttcgcttggcgtgtgtatcatgatattcttcccactggctcagcgcttctatctcatcatgttccgttttctgaaagctgctttttttgtggctggcaatttgacaatgttttacatgctattttcctttgccctctctcagttcaagtttagaagctttcagatttttagaatttcgtcaaacctagtcgctcttcgaaaatcatcgacattcttaattatctcatgtcagtattttccccacatcagttttgtgtcttcattacaatggcttggtgcatttggactgaatgtaataaggaaaaacatggtaccccaattaggaatgctcctgcaattttgagttgggcacttcaatattatgatagttggtttcaggctcagaaatcacataagtata

SEQ ID NO: 134362 - DNA, 560 bp, Cannabis sativa
  modified_base (26)..(48): a, c, t, g, unknown or other
  modified_base (365)..(376): a, c, t, g, unknown or other
ctctttctctcttcatcttcttcttnnnnnnnnnnnnnnnnnnnnnnntattttatattattttataacattgtttttataaacaatatttatactttggggaaaaaaacaaaatttacatatttgtaaataagtaaacatctattatgtttgaaaataatgtgtataaaactatacaatatatttatttaattattttttttattataaaaaatgaattattttctccaaaactgttccaaatataatatttttttaatttcaatttaattttaaaatatagtaacgtgaaatgtacataaaattatattaaagcatttcaattatattctattttaaatagtatttaattattttaataatannnnnnnnnnnnaatttattaaatataaattaatttctaaaataataaaaaaataatattgcttttacttaaaataatattaaaaatgtgtaaaaataataaggagctccctacatttaaatagctctctatctattttttttttattatagtagaatttttattcataaattatattttaattaaaataatataa

SEQ ID NO: 134363 - DNA, 532 bp, Cannabis sativa
accctatcattattgctgaattttgttgttgtaaatatagttggattggatgatgtaaatattgccttatatttcctaaaacaaagtttatatacgatatattattattattattattattaatgttcttttaatatttattaagaatatagaaataataataatttttctttatattttattgatgatagataaagttaataacaaaataataaagtaattttaatattcaattttaatgtgataactaaataataaaataatgaaaaccgtataaaagtaaactaaaaagagtagcatttaaattatggtgatacttaatatgcatttgtgttaaatttgacacaatttttgataaaatattttttgaaaatgaattatatttcaacaatatatcgctaatttagaatttcattggagatgtaacaacaccatctctaataaaaggtgtaaacattatattatatttacgacaaacatttgatactgaattatgatgctccaatgcaaaataaaaaaaattaattaaaaa

SEQ ID NO: 134364 - DNA, 673 bp, Cannabis sativa
ctcctccatctaacggctgtcgtatataacggaatacattccgtgaaagtacatcacgggacaaaatcgtatccctatatttttatctattttggtatttaataagaaaattttttaaggtattttttttattattatgtacgttgcagttatttaagatattctacaatatttttagaaatctaaaagaatttaacatactgaaaacaatattgttcaaataatctattgaacttatgactcttttattatatacacgcgtgaaataaattatttgaacattactttttatattgtaaattattttaaaattttcaaaattttataagtagtcttaaaaaattataacataaacgactataaaaaaatttgactaaaaaattctcttaaaaaccaaaacaatattgatagatttttgtataagagtgcattataaaatcaccaatatataaatgtatgtatataaacttattaaaagtaactattatttttatgtatgatctatatgtgcacattacttatatatatataggacaagattatggtaggaaatatcaaaagttccctatcgataggaatttttttttatactattgattttaaatcatgtggttattatgatgtaaggtgtatactcttacgataagattgcttgtatacaattaaaatttta

SEQ ID NO: 134365 - DNA, 531 bp, Cannabis sativa
aacaaggaatgtctctttgttgtttgttaaacaataaactattgtgattgttcatcgttttgttaaagcttctacattgtatcctaattgtagttttaatttgaaatctgttacaacttattgttactttatttgataactggagtttatagttaataaaatacattttccattaaaaagaagtctgacaaatttcactttgaaaaagtgtaaaaaaaatattaaaaaacaaaaaacttattaatattaaaaacattaattagaatcaaaaggataaataaaaaatcacattagaaatgtaatttttagtataattttaaatatatattttgtaacacaattggaaatctattttttaaaaggatacgttaaattatatctattctatataaagtgtgtctatataactaaaattcttggtttatgagaaatttatgggtgactttttatttttaataataaaatattatttatatataataaaataataaaaaaataaaccctattaatatttgaattgatatttagtat

SEQ ID NO: 134366 - DNA, 1778 bp, Cannabis sativa
  modified_base (27)..(28): a, c, t, g, unknown or other
  modified_base (102)..(104): a, c, t, g, unknown or other
tatacattaaacaatcatgaaataaannatgtgaaccatgcaacaaaaatgtgatttctgatctttattaattagtaaacctgattatattgaaatgggttnnntttagggcacaaatcccaacaaatctatgattattaatcttctcaaaaagataataccacataaacaatagaatttaaattctatgtttacgaataattgtccattcttaaacaattattaggatttttttaatagaagatcttatgatctgttaggggtggaagaagttactgatatatgcagctaaaggatcttgatatcgaactcccaattaaattcaaaacaccacagagcctctataacacatatgggtggaagaagttattgatatatgtagttcaaacatcttttacattgaactctagattatattcaaaacactacgaaatctttatgtcacatatattttgattaaacatagatataatataataaacaaactagcaaactagtagaacttattcttgaccatgtatgtgttccaatttatgttacaatagaaatagatgccactgaagtcattgacacaaaattatagtaccttatcttagtggaaggattttagaaattccagccccttattatttggatgatactagtgataactgcaataatatgttcaagaaaggaactttaaaataaaacaaaagaaaatttaatctaacagttcacatggatagtaataacttatcagaattatgaggataagataggaaactttgcaatgaccatttgaaagactcaagcaaaattcctggtccttatgaaatgttttatggtatctctagtgattacttaatcttaattaagcaagtattttatactaaaatgctatgttgatgacttagtctggaagaaatttattattccagataaaagataaaatgtcacaacaagatgtccctaagtaccaatagtaagagatttaatgcacacctgggtatgtattaaaccagactcctactgttgagtgggagccatcaaagatataatcaaacaaggaatattaggagacaatcagaaaagaatctctaaaagtgacttatatgttagatgataggggtgtgtttagaatccttatatctacaccaacttagaacttgatatctgagatggtggttactctgggggtggaggaattattgtagaagggtgtaaaaacccatctataataatttagttctaccagtgaagctaaataacttagttacttttagaaggcactagaaagttattcaaattgaagaaagttcttcactattttttatctctattccatcggatagaaatagagatgtgtcctctgtatattcagatgcactaatcaaccagtatagaattcagtatccctagaagagtaatacatgtagaaaaaatgatgctctataatgttttatgaacacaaaaagaagtaatgatagagaaagctattgcatgttacaattttacagttcttgttacttgggtatagtcaaatacactacacttgatatgaatatcaagacaatagattaattgaaatgcactcctagttttatgttagtgcaagtgggagtttattggtgttaacgcagattttcgttaaccaaattaaatagcctattcgtaataaattcactatagaaataaataaataataaatgataagataacactagatattttacgtgattttgtagttaaaatctacatactccacgagtccttactattagggatattttttgagtaca

SEQ ID NO: 134367 - DNA, 645 bp, Cannabis sativa
aggggtctagtggacggtgtgatatgcacgagtagcttgtctcttgtgattatttgtggtctctctgttttgtttatacataatgatctgatgagatatgttttattttaaaagctaaccatactgagatttttataaaattactggtcctttgatattagttactttctaactaaactttataagctcacctcctatattttttttttccaaaaactcaatttggtacttgcaaataagggagaattgttgatggagaacgataagattaaattagtcatatcttaattattaattaaatcttcttttaaatgttaaatatgtatctaattattattggatgatcaatatcatttaaatagctatggacagttagggatgaggaatatgatgaatatttagtattattttagcgttttacaaattataaaatctaatcatttggtgactacatatctgtgagaatattattgttaacaattatgttctatttaatacaagagatattattttagcgttctatatatatatattaacgaatgatcctattttattacaattatattctatttaatacatttaattttattattttaaatatatattttatatgattaaaataatataaattaaaggatcattcgt

SEQ ID NO: 134368 - DNA, 616 bp, Cannabis sativa
ttatacatcaaatataatcatgaaataaatcatgtgaactatgcaatataaaataatttatgatcttttattaattagtaaatttaattatattgaaacatattttatttagggcagacaacccaacagctaatgaatgcatacgccctaccataagcaaggaagtgccccacgcgtacatgtactcatgaggaggagaaaagctacgctcattgggagtcggacctctacgtagcagtctatcaccgaagctgagatcgttagctctaaggcaatcactgacttggaacatactttcgaaggaagaggcgatgtggctcacctcaaaatacactccgtagattgggacctagtcctattccattgagcgggtctactggtactaggagaggggtgactggtagcagattcttctacatccacgggatcattatgagacgacatagttttgggtcccacaactctccttttgttcctgaaaaagttaacaaaaacaaaaaggaggttaggacccgaggaagaaattatggcaagaaggagattacttatttttttcttggaaaaagagacatggtctattaaactaagagaagacaaaataaaaaaaataaaaaaa

SEQ ID NO: 134369 - DNA, 761 bp, Cannabis sativa
ttgtgattaaaaaattagaaaataaaagtgttaccaaacggcaccatagatttttagttacaattttttagtcacaacaaaaataatttataacttaatatgtatttctgtaacaatttacgacaagtaatatttaagttacaataaattatttatgataattttaaatttttatattttataatttataaaacgtcacaattaaatgttgtgactaaaaatatatttagtcataattatataattttatggctaaaatctgtgactaattattatttatagttactaatttcataggttatcactaataattctttttttagtcacatctatttattttgcagactcgttagtgttgacggtgagaactcatcaaccaacttgtagccaaaaaattaaattatgcttgaagatcacaaatgagatgaagaaaaagatgaaatgtaaactcaaatcgctatcttgaaatagagagaataatggagaaatatctattgctctcaatatggtgttacaagtatgattttctaacccctccacacatctgaaaaagggatatttataggctctaatggcctgaggtacaaagtggtcccaacagaatgacaaaacacccctctcatgctgcatctcgcatgtgtagaaggtggcattgcacctcgtacccttgtctggtgtcaggtggtccccggttgcaaggggtggtccccggttgcaaggggtggtccccggttgctggcatgttgttgggttttatgccc

SEQ ID NO: 134370 - DNA, 511 bp, Cannabis sativa
aggtcctgatccacgagagtaccttcagaccaattatttccattagtaaaattggcagaagacctgttctgttgagtacctggtttattcggagtttctttaggaaatctgccatacaaccgatggcctggtggataaccgtgcaccctgtaacacttcgcaacagtatgaccaggtactccacagtgagtacagacaggcctatttcctccattgttcttatttgcaggattattgccagaaaattgtccagaaaattggcctgaattctcactagaagagttagcattttcagactgaggtatgatgatacctctttgcttctattcttgaatcacagctgcataagctttgttaacatttggtaatggatcttgtaacaagatttgagaacgaacattgatatatgattcatttaagccaattaaaaattcaagaactctatcctcatcaagatactcttgtatagttttcatagcaccacaagtgcaaacaggttgtggtctatatt

SEQ ID NO: 134371 - DNA, 773 bp, Cannabis sativa
tttaactaaaaggacattttgttaatttttttaaaaaagggacatttattaacttaattgttagatttagggtcattttccatcttggcccaattaattacacatatgcagggccggttaggtggactaggcctgcgcctagggcccatttgttttaggggctcaaataaaaaaaaatactttttaaaaaatatacatattttttctaataatttttcaaagtattatttatctttgcagtaagggcctaattggcctaattttatttttttttacctatgacccatttcaacttaggatcgaccctacacatatgttagtgttatctattttcttctcccacttttttattcaatcatggcaggtatttttttttaaatctctcttacttaaaaaaaataaaaacaaaataatagtgattaattgaatcactagattgaaccaaggagatgagggattactttaattttaaaaatattaaactataaatttttaatttaataacaaaacaaattgatttttatacttaatttaagtacttattaagaaaaatatataaaaaaaatatcttttcttacactatcaaaaatatatttatatacaaaatattaaacaatttttttttttttttccaaaagatttttttcttaattttttttaaatgaagaataacctcaactcatataatgtaaaaataaaaaatttctaattagataaaaaatttaaatataaaaactaaaattttcttaatactatctatacataatgaatcg

SEQ ID NO: 134372 - DNA, 620 bp, Cannabis sativa
gataatgcccattctaatgtcactgatgatgtatcactccccgctactagtacgccctgaaaagcaaaacgaaattttaggctataattttggttaattagtaatcatctaataattaagatccccatattaaaactcttttaattcacagatatattactagtatgaacaaatatgcacatgtcacaattataatataaagataaatatatttaattatcacagacgtagcaatcataaagtgaattattaagtgagatcgctacttcaaatatttataataaagactaattacccatcataataaccatatacaaattgttttatattaattagcattccatttataatagatactaaaaaaatatatactttaatattaatttttttttaaaaacatgtaataattagcgtgacatattcttgtagaatataatataattttataatcattaatcagatgttaacagccaatctattaaaatgatatatttttttgtcacttctaaaatgaatgtaagtatatatatttagggacccgattttgtcccgtgataataaataagggaatacaatccgtgattgtatagtagccttaggattgtattgttgcatgatct

SEQ ID NO: 134373 - DNA, 898 bp, Cannabis sativa
  modified_base (863)..(872): a, c, t, g, unknown or other
tcttctcttcattcttattctcaatatagtattagagtagcttttatcttcttctttctctccattctctattcatttctgcttgcttcagtggccgctccaacaacttcaacgttcaatcatgttgtttttactaatgtatttgtgaagcttgatgagaataattttcttttttcgcatcctcaaattctctcattcattcgtggtcatcgacttcatgacttcatttccaattatgttcaacctccacgcaagtttttcactcaagcagatgaagtccctgaatagattaatcgatcccagattttaagaatgggagtgtaatgaccgcatgttagattataaattaataaagacaattcgtattaattattgatattttataactatatatgattttatatttgttgtggacactaattttaaaaatagacattagagttataatttctcaattttagaaattttattaaactctaaggatattatttatactaaatatgaattatgcactttttattatgatttttgctcggcgataatagaaaatacgatggatggtcgttagagtcacatgagtaagtttagaacctatatctcagtgggataaacttaagaaatatttagaatgtcggatataagcagggttatagctttggactattttacccctaggcttataattgcttaatttagaagtcaaagggcattttgggtatttggcattagagggattaggactgaacattttgaccgggtttgacccggacccagccaactcgccatacccgacattcaacttgtaaaattaaaaaagctgttttgttcaggcaggtcgggtcgtgtaaagaccgcttagtttnnnnnnnnnnttagcagttaatcatgtttaattaag

SEQ ID NO: 134374 - DNA, 702 bp, Cannabis sativa
tccttacgccctcagctgtaagggctagttcaaccacctgaccatagaactggacaacttccagttgtttaaccactatatccacattccgagcaatatactctttccaccttcgattggatttggccttgctagcggccttagcagcaaattcattaaaacaaaactttgacaatcggtctagcttagtgtcattctccatcactgcacttcccgggatcaaccatgcaaaatctactaccttacaactcaagtaatgtcttactgcataacatgcatattctcccactcttatggtagtggaagattcatacccacactaccaaccccgagcctggtaagctcgcaattattcttactagatcaccccaggtacaccttttagtacactcgcgaccattcccttttcatggtcaaaatctttccaacaagaattaatgctaataagcattaccacacatgcataaacatactaaacaatttgatatcaaacttatcatgcttctctaatagcttacaaaattcaaataagcaagcaattcaaacaatcaacaaataagctattattcaactaacaattagtacttactatgccatgagtcagacaagtcttcgcaaccaatctacaaatcaagccagtcttcaggattttaaagcttggtcgctctaataccatgttgtaatgccctgacccttagggac

SEQ ID NO: 134375 - DNA, 717 bp, Cannabis sativa
acttttttttgtcctcaccggcaccacagagcacccatgagtcaaaaggactcaagaaaagtaatataggtgaatacatgaaataactaattatccatttcaccattataaaataattaaataataacattcaaaaagtatataatataaccaaatgtatgtatgaaaataggaagaaaccatatattgtattgtctaatcagacaagcccgtgcataatttgataccatacatcatatcactgtatcacctaatcaagtgagctcgtgccataacttggcaccgatatgacacatcgcataaccaggcgagctcatgccataacctgccactaatatatcgtatcacctatgtcacgagcccgtaccatagcctggcacatgtcactgtcgctacctaaacaggatcaccgacaggaagaaacctaacaacaatttcaatttagagtcatgactttatcatggttacctcacattgcataatcaggcaagcccatgccatagcctgacattcatatatcacaccacctaatcaggtgagcttgtatatcacattgcctaatcaggcaagcctgtgccataacctggcaccattatatcgcctcacctatcaggtgagcccatatatcacattcacattgtcattgcctaatcagataatcgacaattatgaaacctgtcattccatgtggtacattatacttttcttaccttaagt

SEQ ID NO: 134376 - DNA, 901 bp, Cannabis sativa
atttacaatttttttaatataactaactggaaaacaattcctagtacgaacagatgtacaaaatgtaactagttttatcataacacctctaaatcagattattatttaattttattttgataaaaaatcagtttagagtcctgtttgtatgattttgaaaaatatataatcgattttgttatttaataatataaaaagtctaattaataatttttgtaaaatatataatctaaaataatatttatcccttattatagtataaagtaagttgtacgaatgaatatgaatttgacattagaaagttaagtatgatatgtgtaaatcactagatgaaatataatgcataattaaacaaatgttttgattagagttggtttaaggcaaataagtcttatcttgttacaactaggacaattatagtgggaccccttaatcaaacatgaatgtcaaaaaaggtcatttcaaatagtgttttctttattttaaaagttaaaatagattgtgggataatgttgttttcatttccattatactcataatttcaatatagatatttggggtagtttgtggtagttgattaagttgggttgcctactttctccacctttcttcatctcatcctcaagctctttttgtttctaattaataataaataaataataataataaaaacaagaaaatgactttgaaagagtatatctatatgtatagttatagggtgtgattatatagttgggacaccaattttctcttcattaatagatgtgtttattatcaactttataacttaatttgaatataacagtgtcctatagttataacatatatttcactaattttttaaaaaattcaaaaaatttaagattcttttttatttatacacttaaaaatagtttttttt

SEQ ID NO: 134377 - DNA, 606 bp, Cannabis sativa
cttgatgtagtggtaaaatattttaaagctcttaaaagttacaagcttcaatcctccatatgaacacatttaataaatctaaaaataaaaataaaaagtggatgtaaggaattgatccctaacctcttactttaaaatgatactctttaccattatgttaaacactatattgatatattcttttattatttaatattttaatactatatactaataaattttttttttcacaattttggaaccttaaacgttccggggcccaaggcgcacgcgttgctcgcctcacctcaaggtcgaccatgtaaatagataatttcattaacattgtaagagctttttcggtcaagtcatgaataatcgaattatatacattacatttactaaatgtctacccgtacatgtaatccgaatcaaaattacatgtcactattatttagtgcttagtgaactgtacttgacaattctataaagattacatattttaatacattaccaactcgttttattcataataatatggtcttaattcttttgtactcttacaaacataaaccctaacatggaccacacgtgtaccccattcctagatatatatatatatatata

SEQ ID NO: 134378 - DNA, 916 bp, Cannabis sativa
taaagcactatttttttaaaaaatgaagaggttaaacctcataaagacacctataagccacataatatataaaaacctataattaatgtctatatttttaaatcaaggcagtattactgccaaataattaattaaaaaaaaaaaacagtaaaaatgttatattgagcgtgtcatagtataattgtaagattattaaaaaagttagtaaatgatgtaaatttcccttagagtaaggcccaaaataacatagtttttttttcaaaaaaaaaaaaattacaataatatacattttttttatctaatttacactaataatcttactactattactaatatgtcacgccagtcaaatctgatgcatctaacattttttgatgtttttctgtttttttttatttattttcttgcatttttaagtaattttattttattactaatagtgttgataagaaattaattagttacctatttataatttttttttttaattttatatcatataatttgaaatacattttagttacctctaaaacttgtttgtattaattaattagctatttttaaattatgttatgatagattataatttaaatacatttagataattttaaaaattatttttgatactaataagtcaccatgtaaatactaattattttatatcttttgttattttgaaagctaattagttattgtataatataatataatttaattgacaaaattctaaaatgaatattaactaaaaaaaagtataaaatagtaaataattactatattaatcactaaatagttttttttttggaaatagtaaaaaaatatatgagcttgtttggttgtgttttcaattttcagtttttaaaattgtgtttttagaagtgagaatagaaaacaattttttgtcattttaaaaatt

SEQ ID NO: 134379 - DNA, 1143 bp, Cannabis sativa
ttttgtaaccaaacaattataacatcaaatagtgcacgcacccaagaagagccatagataagctgcacacatacacaacaattaacatcacaacataataataataaactaaagataaaagacagaaaaaaaagacattattgaattctaaaaaaattaaaaaaaaaaatacaactcatattctttctaaaagtgtgtgattatagttttgtaacatttgtaatatcatgacttttagcgtagcctacatagagtctttgctctagagtttataattaacatctccctatatgataggatttgaagatgattgatatatgtaaatatatatacatataattttttttttctattggcataaggatatatatataaattaagtggagtattgaagagtataataaataattgtgtacaatatattactattattaatattattactatcatttttttaatatttcatttatatatatattgagatttataaatttttatatacacttttttattattttttatacatgtttccctttctttatcatttatttcttttgacagttagctattatattagattattattattaaatagtaaaataataattaattaattattatatatatgttataataaataatattgtcattacaaatttttaagtttatacatgtttccctttctttatcatttatttcttttgacaaattaattaattattatatatatatgctataataaataatattgtcattacaaatttttaaattacttattaaaaattattattatttatagatagaaggttaaaggagaagaagcacttcataaatgatgccacatcatcttgaaactaacaaaaatctaagaaaatatgaaaaaattagagagcaaagaaatgaaaaaaagctcatagaagatccacatcacctccctaacaatagaattatataaatatatagatatagatttgctttttaatgtaatagtcttctaaaaaaaaaaactccaactttcatgtaaatttttattggttttctgaaaaagggggtttagttttcaaatgtatcatagataaggaaatccatatctatctattttcgaacccaacttaattgtttcttgagaaattaaaatatagt

SEQ ID NO: 134380 - DNA, 739 bp, Cannabis sativa
aattagactaaaaaatttttttggatgccgaaacaaatagaaggtacattaatacattcattttaagggggtgcattgtagaatcaccctataatatattattttatttttactatgaagaaaatatataaataatataatagaaatataaagaagatagaggcagagtggtaccttttgatcgtctcttttgccagcagtatataaaaattaaaaagagaactagtatcgcaaaagaagtcaacccaattcccagcttcccaattttggttatggaaatacttttggacttctttaaatatttagctgcaatattattaataaaaaaaataattgtcaattaacttcaaaaggatttataacgatgttatagtaagaaaaattagcaacattaaatataaacgtgtgtttgctttattaaaagtaacaaaaatataggttattaaatctacaaggaaaacaaatagaaataaactttgacataagtaaaaatatatatattcataatgtatactttacttgacgttcttcttaaataaaataataactataagattttcatttatataagtaacaatatcaaatataaagtaagcattcaaaaaaaaaaatcaaatataaagtgatgttttttttttttaagaaatataaagtgatgtttgaagaaaagaaaaacattaaaatttatagatataggcagccgattttgtactcatatgtgcaaaacacggattggaat

SEQ ID NO: 134381 - DNA, 1416 bp, Cannabis sativa
  modified_base (1080)..(1082): a, c, t, g, unknown or other
aaccgggacaaaggtttaaaaccaaaacttaacctactttaacttaatacaacaataacacaaataagtgactcgctaaatcacaactgggacttaggcttaaaccaaaaacctagctactgcaacttaatatggcaataccctaaactagtagggaattaaccaactagaaacctgaaactaacacgaatcaacaagctgaatttttcgagattcccagctgcaaaaatcggttaacaagttttataggcacctgtaaaaccggttacccagttttcccaagaaaacaaacaaaaatttgaagcttcaccaaaacgattccaaactcaaccaaactttccagaccaacatattataccccaataaaccatttccaaacaataaaacaactacccaagcttagaattgaaaaacacaattaaagcttcaagttttagttctaaaactcaaaacttgataaacctactaacaaccataaaatcatgctcaaaacaacctatcaaaacataatttaactcctggaaacaatatcaaacaactacaaccataacagtagccaaaatcatcaattcatgcaagaaccccttttcttatacttcaagaaaacaaagaggaggatactagagacttacctagagcttgagaccacctaatccttgctgtaactagcttcaaatggaaaaaattcagaccaaaccctagttggttctagggatttagagagagagagagagagagagagagtttgaaagagaatgactttttcttattttttccaattttgagtaaatgatattaaaaatcttatgttattaaacatatctcaaccattttattatctaaaatcagcttattaaatttaaatcaaattctaaaggacaaattacaaatggcaaaaagaccatttttccccttccttactaaaagggcaaaagaatgcacttaggggtattttggaaaattctaaaatcccgactaatcccaacattcccaatgtctaactttattgtcccgctatacttaaaaatactaggatgtgagtctaatagccaaacactgcgttctaatgttgtcgggcannnaacatgcaaaattatgaaatttcaatatatgatatataaaatgcattctgaattcaaataaatcatcataaataatcaattcaatgctaataaataattttcatcattaagccctaattatctgctaatttccaaattaaagctaagtagtctttacaattatcccccctgaaaaggatttcgtcctcgaaatctaacctgaaaaactctggataatgagctctcatgtctaattccaactcccaggtgacttcctccaccttgctgtttatcaagagtactttgaccaaagctatggtcttgttccgaaggaccttatccttcctgtcaagga

SEQ ID NO: 134382 - DNA, 731 bp, Cannabis sativa
tcacctcactcttcggtttggaaccttcaaacgcactatccagattccgaacaatattagatctgagtattgggggagaaggattctttccaatacttacctcgtgagtaactttgtttgcaacatcaagccaagctaaaaactcttgttgaaattcaattcgaattgtatcagtcgcaccaggtgaagagtagtgctcatggcactgttccattgaatctgctatctctggtatttctaattcctgaactccaagaattgtatccataaatctagtcttgatgaccctatccgaggataaaggccctgttttcttccccttagctttaactttcccagccagtttcacccttttcgccatggctccggtgactcaccaaaagagagagagagaagctgagagagttttttaattgttattagttgagaattcgagaaataggtatttccagtttagttgtgggtacctggtatgagcagtgttgtctctactgtataggtttaatcaaattactttataatggtggttaatcgtaaatgattgaaaaaaaaattaattaaaagttgtgtcaattcaagggaaattgatacgagtgaaaataattgaagatgtacaagatttaagttgacaataagatgggaattcctcgagtttaagtgaacaaaaaccgatgaggaattgcaagaggtttatgaagggagtgatagcaattgaattttattaatgaaag

SEQ ID NO: 134383 - DNA, 761 bp, Cannabis sativa
ccaccccttgtgggaaagagcttcttgaactaatcttggttcagtcaagtagtgttcccattttgcctgtccagtgaacacccctgattttgatcttgtaaccatgggatgactagctcttgaagatgtttcaagtatttgacattgttctcgaactgttgcactatgttgagcatctgcaacatgagtgttagcagtaattcgggcgagatccaaatcgacaaataagttgttagaaatatcaatctgatctgtgtgtgacgaacctgaattgtcaagaagtgatgttgcttgagtttgctctggatggtttgaaacagttggagagtcatgactagaaccaggcattgagtgttcaggagaagaagagtgagtgggatgagctgagtttgactggctaggttgagtaaaatttgaatgttgcacaggaagttcaaaccagtcatttggaaactgaactatgacttcaggctctttttggtaattgttaaggaatccatttttaaaaggaaactccttctcattaaacaccacatgtcgagttatagaaactcttcctgtagggctcaagcacttataacctttatggaattcactatatcctagattgacacatttgatggaatggtgttggaatttatgtgactggtagggcctaaggcaggggtaacaagctgaaccatattttaagatagttgtaattgggcttttttgttgggttttatgccctaaataaaactcattacaatataatcagattt

SEQ ID NO: 134384 - DNA, 547 bp, Cannabis sativa
tgatctcaatacaaaatttaaaaaagtgggtattaagaatgctctaatttaataaacataagtttcgacacaaaacgagagtatttgtttgacttgtgtagttttttggttatatgcattaattgtttaattattttagagatgtagtaattatccttgcaagttgcaatttagtaccttgatgtctgaaaaaaatcttagtgaatttataaggaaaatttgactttcgatgcatttattagattaaaattattttcctaaacctaagttaacctatatcgttagaataggttaacatttcataaaaaccaattttgcttctcccatttcaaacacacgatcctctctcttcctcctttctctctctttctctctaaactcacctcaaggacttgacccacaaccttggtactctctctccacgaccactgtgaccataaacccaacaacccatggacccaatgaccaacgcagatccaacgactttaccatctaccatagcttctccatcgtcaatgttgtcaaaggaataaattgtatgattaat

SEQ ID NO: 134385 - DNA, 1605 bp, Cannabis sativa
  modified_base (53)..(53): a, c, t, g, unknown or other
ctcatatatgaataaagaattttccgatatttaatataaattattcaataatnaatattaataatttaacattcaataataatttaagtataaaaaatgtctttacaggctttttagggcataaatcctaacattgtttggatgacacatgtcttacattttacaacctctagtggataattttactcctagcaacccgcaaggattaatatgaagattcaagttatatgtacatagcaggatgaccgagcagagtcattaacgaacatcataccaactcgatcttggatcaactcgcatgtaccgaccaggggttgtgagttgacaatttcataagtgatcaatactatcttcaaacttgcatgtcacgaaacaatccctacttttgtgagattaattcataccttcaaagaataaaggaaataagcataaatttgcccaattttctcattgtagttatggaaacatgttaatttcctattttatttcttatagattaagggaaattattcctacgtaattaacccttataaatagtatcctcatctcactattcaggggacaaaattaattagagagaacactcaagagagagattacgatctaagagtaaattacttagaggtttttgtcagagcttccgagaaggaatatttcattctttgtctcacaagttaatacatttgaaaggggagtaggctattaccactatcacgaggtcaaacctctataaatttttgtattttctttacttatgattttttgttttctattatttatttaatttaatcgctttaattaagactcactgttgttggctaaaagcgaagttaacagatcatcattatgatatgaattaggtttttatagtaaacgataagtttgataaagataacttcattcatattggtcattgtcatatataatctctattatatacaatactttcacttagatatcatgctacatcagtattccgaatcgagattacttgcaccaaataacgagtatcaatcaaccatactagtaactattgttaaaagatttccaaactttaatatgatgttgattattttattcatggtcaagcgatattaattctctgtacaactacaagtcataacctcatatatgaatattttttttatatttatatatgtaaattgttcaatattaaatatggataatttaatattgggataattacataagcactattttttgtaaaaaaaattacatctttacgtttaaagaatttttttttatatatttttacagtttttcatataaacaacacaaatataacaagaaaatcacataaaagtaacatgaaaataacatcaaaaaaacaacaaaaaaataacatacaaataataaaaaatcaacaataaattaacaagagtataacataaaatgaccgtattttctgtcaataaaattaaaaaaatcgtaaaaatatgtaactccataaaatcgtatttttgtaattttttttgttgttttggtgtatttgtgaaataatccctttaatatttatgtaaaaggggtatttacataaatataggaaaaataaagctagtctacataaatatggtaaggaaactt

SEQ ID NO: 134386 - DNA, 2128 bp, Cannabis sativa
  modified_base (2063)..(2067): a, c, t, g, unknown or other
cttgcttgacctgggggtaatttcaggacgggtgacctcctgggaagttttcccaagaagcatgcgagtaaggacaaaggatgcgggaaacactcgtgttggtttgtagggttaaacatcagtccatgaagcagccagagtgacgtacttgtgtataaaaaccattattccgtgggtgtaagcgcccaatggaggcttgaagcggggacattacagattaggtcattaaatgaaaatctttccaaaaagaaaattcaaaatctatttaaacagacagtcagttcgttcaaacatatacagtgaacctagatagtttttagcaaagtttccataaataaataagacaactttgactgcattaatactcatagttgtgcatgatttcttggtcaagaaattagatcaaaagaaataaaatatgaataagtttttccataaaaagcaaagtataaaatcaaataatttataaaggaaaattcatatttaaaagataataagtcaaaagaatataagatctgattttgaaagccttttcacataagaaaaggaaactagatttttgaaaataatgaataaaataataaagacaattttgaaaataccacaaacaatatttttgtctattttatcaaatatgacaataaaagattttacaatcgctccctttggcaatttgatagataaaaataaaacaaaaaacctgcaacatacctgttagaaataagaaaagagaagaacgccccctacaagcatgcatagcttataacaaacatgaaaatgaaactaaaaacttaactccccctcaaaataagaaggtccagagttacgcaaatcaaaatataataggtttttgagtctactctctccctttgtgtcaaagtagctaaagtatcaaaaaaaaaacaaaaaaacaaaacaaatatgccaaacctaagactaaagaaagtatcaatgttcttaggaatggagacaaaaaagaaaaggacaagaaaaactaagcttctgaggccttagacaaggctttgaaaacatccagaactaaatattggagtcccttaagagtcattacacgaccagtcaaggcatcaagggaagctcgaacaccagagagttctacagagacagatgctgaagcagttggaacaggagcttctgcaggaaggtcatctgaagcaaacaccaaagatttaggcttggattacttagatgatgaggcttcaacaatatcaggaattggagtagaagccttgtaagatgcagcagtggaaggagccaccaaatccttttgctctgtcttgagatcacttttctgcatacttaaaatcttgtaaataactagaggaaaaggaagatttagatttttcttgttaccttttcaaaaacaaatgatttggtcatagatgacaatggccaaatcaacatcacatccagttccgaccttgtacaagaaagaagccatatcaaaggagttggttgcagtgtgagaagtcagttttcaatttgttgtagcaaacttgtgaagtatggcatacatgttagtgagattggtggtcgagataatagaattttgaggccacaccatcctttgacccacagtcttagagagaacctcattcttgtcaagtggttcactctcctcttcatttggaatagctagagagagaagatgcaatgcttttgctacatcttggggagagagaaaaccaatgacctctcacaaacactttacaaaatatagtagagttagaatcaacaatttcattattgagattagcatagaactcttttatctcttgaagaatgttaagaacaccatatggatgatgatcactcaaaatataatttctttcaacaagaaattttctttgtgcataaataaccatgtcacgaacattattattgtagcaaaataaaggagaatgagttttaaagtgtacacctttcatccttggagaagatataggttcaatgactggtttcttgcctttaccctttgaggacaatggtgaagtgactagtgcaggggtagacactgttgggaatattttaccaggatctaaatnnnnnaacaagtatgttgaattaacatcttacatatgaattctctaaaacaataaaataagcacat

SEQ ID NO: 134387 - DNA, 695 bp, Cannabis sativa
gataatattccagtcttcccccggcagccgagcaagtttttgagctctattccaaagagcaagagtgaggggaggacggtgatatgtcagaatctgctggaaccgagtctgagtaattccggcacctttcaccatgaagtactcatcagcaaaatgccctatcttgctgatggccttgtcattcgtgcccgtcaaccacttgaagcctagttgagagaaatagaagtaccccgacctgccttgcttgggagtggacttcaaatcaaagaaccaggcaacttcgtgaggagaaagagtaccccactcctgggaagcataaaggacgaagagggctaataaatacttaatgcccttaggagtgaactgcgccggggaaagagaccaaagaagtctgccacatccttgaagaatttatgcaaaggcatcaacgctccttactggccatggggacccgaccaagcgcacatcctcttcttagggtttgtggcacgattatcatgggcgggaatgtaacagtacagcttcccaggtatccgccctggtcaagagttcgaaggcgcgactccgtgatcttggatggaggacttaccgacctggcgcccaaggttccctaccttctatgtggaaccgtcgcagcaagctcctcactgacgtagtccacgccctcaaccaggatgtctccgtcagcatcgact

SEQ ID NO: 134388 - DNA, 1500 bp, Cannabis sativa
atgttaccactagctcctgtgccactagtggttaaccaggggtttgtatcgccgcgtagagattcagtgtttgagcagttcgtgaagctacaacctttgatgtttttgggaggtactgatataatcaaagctaaacaatggatgagtaatgtcacccgcatccttgctaacgtgaggtgaaaggaatagagaaagtgaattgcgctgcctttatgttacaagatcatgcccgcattttgtggtatatagtgagacagactcgagatataagttgatgacttggagagagttcaagagtctgtttgagggaaaaatttataacatcgctgtgaggattgaatgccacaattagtcgggacttgatgattgccactgctcacgacatcttatataggaaagtggacatactagccttaattgttgaggagactgatcaacaagcaataaagaagcagattgtgcaggatgccgccatggcatcgaatcctcttattagtggtaatatcagtaaggggccgacagtggcaaccctgatcacaaacggaaggtagaagcttccgaaacatcagggagtattagaaagttttgggtaaatagaggtggccgtcaaggtcacggatcctctttcagatcatatctagaatgtccgacatgcaagaaataccatcagagtgaatgtcgggccaaggctgcgtaccatatttggtatggattatatgaatcggatgttccaggattaccttgacagatgtgtgattgtgtttattgatgacatattgatttattctaaatcagaagaggaatatgagttgcatctcagatcagtattgcagcgattacgagatcacaagttgtacgctaagttcaaaaagtgcaaattttggttatctcgtgtctctttcttagggaacatattggataaagatgggatcatggtagatacggccaaatatgtggtcattgaacataatctgtcaagggggagattgtaaggatcattattttgacagattatattaatagtgagtccagtcgtatctgtggttttaatttgttatgactgcataccagctttctgttaaagtccgtgtgggtttgttatgttttaactgttggcattaattgttcttaggtcggttgaactattgtctataaatagctagtttcattctgtaaatgagttagctatctaattgatatttttggttagttctgataaatcgtgtgaatttgttggattgttcgttgttgtctttcaggtctgattgcagagcttggagatggagatccatagtagaaagatcagagcctagtgttgctgagttcagactgaagggagttcagtgtcattttcgtcatcagatctgaagggattttagattgaagaaaagtgtcgaagacgaacttagcttctgcaaaagggattttgtgcatacaatcaagattcttgattgttgttggtaattcattactaattgttgtaaagattgtattaaattc

SEQ ID NO: 134389 - DNA, 633 bp, Cannabis sativa
gccaaaatgtagtcaaaggaaaacccaacctctttccaaataggtttagcatgcttacaagaaaacaaggaatgtcctatggattcccaggcattggaacataagcagcaagttgcagagtttaacaccttgcgataaaaaagggaatttgcaactggaaaggtttcaaccatgatgattgacttctagagcttgaaaactgatcttgttcttccaaagtgtatgcaaaatagtagcatgaatgtactttgtactcaccggattcattaaaatgtcaaatccacttatcatcactaacaagataagatagtagaatggtaagaatatgatccacatcagcaggagaaaagtctaattactaatgctccaaattccattctcgattgacagtgatataatctggaacattgttcataacatcaccttgataatgcgaaggagtgaaaatggtgataccatggatccatgggtccaaaccacacatgatattagaaccagaaccaaccttcaatcttagacgtttatccaacaaatctcgtacccatctaataccctgccatgtcatagacgacatacctccaagagcagcatccaaaaagtcattattatgaaagtaacgactctttaagactc

SEQ ID NO: 134390 - DNA, 584 bp, Cannabis sativa
agtggtctaatgtattctactagtctggttggttcacttgagggcctgcccacatgcatagaaacatggtgccttaagaattagaccatgaatgtatagaagtccttgggccataagggagattgttcaaagtatcgaacggggcatgactatgcattggcaatttggcacgtcaactaattaatgttggcatttgaccacacatgttaccttggtcacaagtgactaagtgggcgatagtgtttggattttctctaccatagtgggaacctacagacaatgtgagtatcttggctagagagcttatacatggatacactcatggatgcttgcgagcatgacatggtggagttgttcaagggacgaaagtgtgtacgaaacacactgtcgtgcaaaaaaatgaacaccattgttattcaaatggttagaatactggccttatcttagaaaaatcaaaatatcacgcaagtattttactgtttaaaaaggtgagcccgtaacactccatcattgttattattacagtagaacctctatttaagaatacacttgggaccaaataaattatattctaattgagaggt

SEQ ID NO: 134391 - DNA, 841 bp, Cannabis sativa
tgatttaaaaaactaataactaattattgtatatgtaaattggtatgatattgagcatcttaaggtaccatgtaataataatagtataaataatcatttataaaaaaatagtataaaaatcattcataaaaaataaaaaaataaataaaaattacacaaaagataaaaaaaattaacacaaaagacaaaaaaaaaaaaaaaatactaacctcatcacattaatcattagtgagaatagaggtaaaaaaattttacttaccaaaaaatttaaagaaggagaaagagtaagttctttttttgttaacatccatttatatatgatatatgttagttgttagttgtccttagtccactattatctccattaattagaactcaagtaaagtgtgtatgcaccaccaatggcaccaaattatagagtggggcggtgatgatttatttatttataatatataattaggcattatgtctattgtgtgtctttatatacgtgcttgcttggtcccaacaaaaactcaaagcagtagaaatgaaacttttgttttggattaataatgtcatacaatacaaaaaatgatgtactactcatcgcccatagcccactcagtttgatttgaaccatctttatcttattgcaacatctttgttatattattatttctaataaataatataatatatgggagatcagcaactttgtacataaatattgctatttatttagaataattacataaagtactacattttataaaaaaaattatatttttacgtttaataattttttttttttttttttacatttttacagtttcttgtaaaaataacacgaaaacaataa

SEQ ID NO: 134392 - DNA, 765 bp, Cannabis sativa
taataaaggtcttccttcgtagtagatactagatagcctttttattaatagcaattttgccaatgatttttctccttaattagtattgttattagaaaccatttcaaacaaatattgtgtcacgtcatgtaaatagttaatcattataaattaaaatatgtagaattcattgctctttagtttttatttatatatttactaatttatttttgagtttatacgtgtttcttatttatccaatatcaatcaatagaaccaatcaatatataaatcaatatatattaattaagaaacaaactgaacttcgcatcgtgcgattgtattttagttaaattagtaattttaattaaatatacatattaatattaaaatatatattaaataaaaatacaattttttttttaaataataagttttattttgaggatattcgatctccattattaattctacatagttcttgttttaatgagattcatccataataaatattgtacgtcttttattcttagtaacgattaccccaatagtgattgctaagagtagggcttacaaagtatgaaacaatggtacaagctcatgaaatagaatgaccttgactctcgcttaaacgagacaacgtcagattctcatttcgattgaataaaaggttgctaaaatggtgtccattttagacgagttgacaatgataacacttgactgtgttagttatgttagttaatactgttgtgtaccgttaggtagttgttagttacattcttggtt

SEQ ID NO: 134393 - DNA, 554 bp, Cannabis sativa
  modified_base (410)..(412): a, c, t, g, unknown or other
ctaggttcaaagtataaaacagtaaagaatccatttttcaccattttcttcttttaaaaaactcaagctttttgagaattttcatcccaccttgcctgaaaccttccatgccatctttatcttttctattctttctgcgaatttactcgaatttgatttttgacctcaggtgttcaaagaattcatcacgtcgttcatcctaactccgtttgcaggattttccaccactcaactttttgacttctaacagtaagtatctcatccttctcccgccccccttttttttatctgtgttatgattatcttgcatcttgtcactctgtttgttttaataacttgggtttacgttttctgagtaatttttagggtttaggcatgatttagatttatcatattctttaagcctttgnnntaataaatttcatccaggaattgggattgttcctttttgtagaaatgttccaatttggctcggaactttattctccagaatttttagaaacagattatcctaaacaattagccttcctatataaacccaaaaatttccaacc

SEQ ID NO: 134394 - DNA, 694 bp, Cannabis sativa
ccaagtcgtgggtcaccaactatgcaaaaacttcacaagccataacctatggttcaaaccacaactaagccttcctaccacacaaagaagccaaacaaaaacacctagctgttttcgcacccaatatgtcatcgcacccatccaaccaatagatccagaaatcttgtactttgattcccagggaaagccaatttatgcttttgaatcctcaaacagacaaaaatacttggatgtctgtaactgtaaaagttgtttaaaagatgatgagccctcacgaagtcccactctaggaaagcgactcaagcaaagggtagaaaaaggcaacaaaaatatcaatttattaggtcaaccatctagaaaattcgactatatagtcaaatactccacaccaaagagctacaatcagcctgccataaactaccggatggcaatcggatgattctttaaaagattcacagccacagattgtctttccttgttacaaaagataagcaaaatggatgaagaagcatggaaaaaaatttctagcaccaactgttcaaccattagttcaatcacttcctgacgcaaacatgatcacctctagcgcatccattaattatgatgcacatttccctcatctcaagaggttcgaaaagactgaagagcaaggtaccacttcccaccatccaaaaatacaaaatcctacaactag

SEQ ID NO: 134395 - DNA, 1079 bp, Cannabis sativa
ttgttgcataaggcatgtgaatttgctctggattgctaagtgaagcatgttgattagaagaagatgatggggtgttggagtgagaagactcagagtgttgtggcaaacaatcaaagttgaaagtgggagtatggggagtgtgactagcagatttggggatgacaatagaggtaagagaatctaaattgtaatttattggaggagaattgttagaaatagttgcagcatctagaaaagaggtttcatcaaaagattatatctcgagatatgtacaaccttccatttgagtcaagacatttattccccttatgattcaaactatacccagaaagatacaagaagatgacctaaattcaaactcatgtttgttatagtgtcttatattgggaaagcaagcacaaccaaaggttctaagagcttgataatctggttttttatcaaagataacctgtagaggtgatttgttgcttaaaagaggtgtaggcattgtgaaggtagacaattgtcctaaaagctttaaaatcttgaaacacttttaaggcatctaacttattcttaagtagatacaaccaagtgaacctagaatacacatctacaaaataaacatagtatttatatccatttgaggaaagagtatgggaaggatcctataaatcaaagaaaactaactgtaagagtgcactatactcagtgagagaagcttttgggaaggtaatttatgaattttaccaaggcaacaagctgagcaacctttgttgttattattctctcaaatatgcttgttacaataagagagaacagattgaacaaccctgacaaaggggtggcctagtctattgtgccaaattacaaaatcatagaatttattggtatagtttgagcaagtgttagcttcagctcgagcaacatgagtactaatagtgttgggacaggaactggatctgagaggtatcaaatgaataatataagtcattctgatgtgtccccatcagtagagtataggggtgtgcataaatcgatccaatccaatgacaatcgaccgatccaattacaactgaccgccaaacattagatatcca

SEQ ID NO: 134396 - DNA, 849 bp, Cannabis sativa
  modified_base (172)..(187): a, c, t, g, unknown or other
tttatttcattgttttaaaaaattcatatttaggatgttaattcaacatacttcgttagtaaatctagatcttattaaaatattcacaacaactggcctcatagtcatggtaataatttactttcatgtaatatggatttaaaacggtgaatactgtttgtgtgttgatttnnnnnnnnnnnnnnnngtttatgtgttatttgatgattgaatgtgttttacgaaagttttccatgaaaataattttatttcattctgaaaatattttacttggattccttctaaaaaattaagcaattttggtctttacgaaactaaatttcgataaaaattgagaaagttatggaagtttaaaaaaatcgggttcaatggtgtcgagggtggtgcctcgaagacttcgtgtctgaaactcgttcacacacctgttcagacaagcacagaccctacacctcacccacgaagaccctgcacacgcccatgtttgccacacattgtaccctgcccttccctacgtctgcgcgcgcccaaggctacgtgcagccttcttgggctacacgtgcaaccacctcgatagccactcccttttgcgattttcttgagattttttcattttttttctgaatttttctaatttaaaaccccaaaaatcaaaataaaatattattttaataaatttaaacttaaatatcgattttaaattaataatatttaatttttttaatagattattattaattttatatattttaaggtttaaaatttaaaaattaattattttattttaaattattgtcatattttaaaaaattgttaatttctttaatatttatatatattatttaattataa

SEQ ID NO: 134397 - DNA, 515 bp, Cannabis sativa
ttaattttctgaaataacgaaggaagtatggaattttgtcacgtgactactttataatacaatctgtttctaatatactccatgtagtaaagaaaattatatttctttttctcttttgaaattaaattcttattatgtactattaaaaacatatctctcttcaaactttactataagagaaatatgctgtcaaatctttttatattttaatttgtatatacataatttctttttttttttttgtagtaacacccctttagttcagttcttctgtttgcaaatccacagttaaattttttaattaagtgccaattaggactgtcaatgtgtgcatactcttatttaagacaaatattattaattattttaataacttttaaatattttaaaattacaaaaataattgaaaaaaaaaatagaaagtctattaggactaccgtcaacatactaattcataatttacctaccattttcacaaggaatttttacataaaatccctttttttttttttttt

SEQ ID NO: 134398 - DNA, 1019 bp, Cannabis sativa
  modified_base (759)..(765): a, c, t, g, unknown or other
aacatctattaaggataaatctcattaaaacaagaactatgtagaaccaacaatggagatcgaatgttcttatatttaaagctcattatttgagaaaatttatttttatttaaccatttataatctatatattttaataataaaaattacttaatttaagttggttattcactaaaaagattaattttcaactttaatttaacttttaatgtaaatttcaaaaatctttatatatatgatattatgtataatttcgaaattaaactaaaatataataaaataaatacctgaaaatatttaatttaagttgttctaaaataactaaattttaacttaaaaataatttcaaaatttaattaaataacaaattaagtatcttgaactaatcaatttaatttgaaaaatattctaatttaagttgatctgaaattaatttttaacataaatctattttcaaaaaatatctgaataactaattatctagaaaaatctacttaattatcattttcaaaaaatattttaatttcagttggtctaaaattaatttttaacttaaatatattttttaagaaattttaaataattaagtattttgaaaaatctaattagatacaacttcttcatttaattaaaaatacgtataatttatcttgaattaatttcattaaattaagtgtgtttttcttaaattaatttcaaaataatatgatgaaaaataaatttcatatattttgaaaattaattatgttgctaatcaannnnnnntaggttaaactaatataattagcctaatgcaatcatttaaataaggcaaatgagttgtaactctcacacaaggttcaaaagagagtaatttaaccttaattaaataattattattaattgaataagttcgatactaaatgggcttaaataaaacaatcaaagtaatcattttatttgggaaatttacacccactactgatttttcccattttattacatttatactgttccacggcaaaaacaacatttatact

SEQ ID NO: 134399 - DNA, 536 bp, Cannabis sativa
  modified_base (467)..(467): a, c, t, g, unknown or other
ttttgtaatgaacattgacaaaatatgtgggacttctgggctggaaaatcacaaccatttattctttaactgtgtgttcaataaactgatcttattgaactatatcaaattttggttgggcataaaaacttctattaataccatagaggggctatttaaatggattaaaagaagcagattaaacaagttttaaaagtgtgtttacatatccatttttgctggattagtttacaatatttgaagagttcgggattttgttttttggaataacactatttgaactattaatcattctttatgtagtataagattggatgtcgctgtgacgtaaattcttggttattcaatgtattcttatttatcaaaagaaaaaaaaaacataaaaatccaaaattttctagtaatatccattcatagctaggtaacacattttaagagtgtaccaatatatatatctattctatatnaagtgtgcctatataactgaatttcttggtttatgagaaatttatgggtgactttttatttatatttaa

SEQ ID NO: 134400 - DNA, 736 bp, Cannabis sativa
aaaaaaaaaaaaaacaaaaacacgcaacacatgtatgacctatatcctatagggcttgaactgtgtagtatattagttactattaaattttctattaacaaattttaaaactaagtctggttaaaaatattttaagacactaatagaatccgcatcgacaaaattggagaaaaatgatagttttataaggaaattatagtaaatggctcaaaatcatagaactatgttagtaaatattctcatttcataatttgtagcaaaataaccctttttaagttatatattactgggaaattatagtaaatgacccaaaattataggattgtgttagtaaatattctcatttcaaaacttgtagcaacatgacccttttaactagattatttattatttatatttttttgtcaaataaaaaaattaataattttctttcatattttttttttaaattagaagcaaattacttaaagattatgatataactatattagttttgtcaaaatatattttatttgaaagttatgtcaatttttttaattttttgtgagttgttggtatatagattttgttgaataatatatttctgttttgttgtataatatattaatatttatagatgatatttgttttttattttactatgtataacagtggtatataattttattagcataatataaatattttaatgtatgcatataattttattggcatgttatatatatttaattattat

SEQ ID NO: 134401 - DNA, 1396 bp, Cannabis sativa
  modified_base (1324)..(1324): a, c, t, g, unknown or other
atggtagacatatctactatacctgttaatatcttttgtaatgaccatgaggtctaactttaattttatttataaacgcatttttcaaaaaaaaaaaaagaccccttaaacggtttttttagtagactttctatctgttttgatatcgagtagaatttcttagtttattttttttttaatgattgcatacattgtagctatttaaaatcatttgtaaatttttaaaatttttttgaataatttacagagtcaaaaataaagttacaatatatacaaaaaaatagttacgcatgcaacaaaatatgtaaatcttacttttaagtattgtaaattattcgaaatgttctaaaattttacaagtgatcttaaacagttataacatatataatcataaaaaaaaaattagattaaaaaactctcttatatagtgaaacagaaagaagatttatctaaacacccttttaaatgaattgtagacttgccttataatttatattggtaacatatatttaatttaactttaatttttaaaatttaagctcctacatctaaatatatgtatatatatatataaataagggtgcactcttaataggtattacccattcaagggttatattatgaaaatgtgagtttttatacttaagttgtctatctaattaaaaaaatatcttatttttacattacatgagttggtgttgttccattggctgaaaaaaaaaattaacaaaaaaagtttttcggcaaaaaaaaaaagagtttgacttaagtattttatatataaacatattttttttttgaataaaaatcataaaatttattaattaattaattcgttcaaaataataacgcacttcagaggaacagtccttcagctgaagcagacgacctgtagagaaacaagagtctcttgccaagcaatgtatacttatttgcagatcgttttagaaaacgcaaatcaacaaaagataaagccaaaaggaattttcgaacatcttgaacaataagaccaaattgtgaaggcataaaaataccgctatgaatcgcttggacacacaccaagctatctgtttccaacatgactctatcccactaatgagttgcaatccaactcaaagtttctttaatgtttattatctcagcaattttggattgaacacaaccaatcttccccttcttgaatacttctaccatatgcacccttgtaccgtcttccataatcgtaccacaactagcagaatcccgaacacaaaaaaagaaaacaagaaccaacaagaatcgaaccagaaaaaaataaaagaaaagactaaagaaccatgtcaanagacaagactaatgggaaaaactaaattagtttcaacacataaacacgatcacaacattaaaattaattaag

SEQ ID NO: 134402 - DNA, 647 bp, Cannabis sativa
actaatcagattgtaaagagttttattagggcataaaacccaacagttactaccacttccattgactcataaatatggacacgtgaagggtctagatgcattatatatatatatatatatatttttttttttaaatttaatattcagaaactaaatgctgagtgaaccagcacactatatggaacatggttatcgaattgaagtgccaatactatgtgaaaattgttacgataactatttttttgttgttgaaacaagtagcatttagtttctaatatttaaaatattaatttttaaaataaaaatactacttgtttcaacaaaaaaaaaaaatcaattcttgtaacaaaatggttataggtgtctactatattataggtgcaaaaatttaaaattgggtatttaaatatttaacaaaaatataaatattaatactaattatatttaataatatcaatattttataatatatataataataataacaatatactttatatataataatataataatatatataataattataatagtatatatattaattaaagttacaaaagtaactttattctaatgatataatggtaataataatgataatatctattctatataaagtgtgcctatataactgaaattcttgg

SEQ ID NO: 134403 - DNA, 829 bp, Cannabis sativa
tggagggtacattccggcgagtgaactgaaatcaagggttcttccaaagattaagaagtcgaaaaagtatgggggtgtgatgctttggaacaagttttgggatgttcagaataaatacagtaatgccattgtcggaagtgtttaatttactataattaaaggtgtgaaataataataagaataataataagaataatttgcggattaagtttaattttagatataaataaatagttaagtttaatttttgacggcagtaatacttatataattttaaaaatataacttaagtattattaccataaaaaattaaatttaaatatttatttacaactaaaaattaaatttataccgtaaacaatagcttaattataatttgtaacgtattgtgtaataatgtattaaattgtattgtttaccttcaattaatatataaataataatactacgtgtttttatatcgatcattgtgttgcctagattggacaacattattattaagttgtcgtatgtgatcttaataacttgaaagaatgacttgttacttaattaattaaataattaaattataatgtttaaaataaatatataaatcaatttttgaaatagaaataaacaaataaaaactattttgactaagagtaatcacatgttcacacatttacgtgataaactaggttaatgttaagtgtatttgcacatatacataatattatttaaaaaaaatatattaatttatttttttaattattacataatttttaattaaatatatgatcgtataataaaaaaaacattaattcataatttaaaaaaaaaaaataaatta

SEQ ID NO: 134404 - DNA, 978 bp, Cannabis sativa
tttaaattgaaatatttgtaataaggaattgatatctttccgttttagttatggtaaaccgattcatacattatattatttgtaaagtttgggaataaaaaaccttcatatcaaatatacaaatccaacctatatatagatgcaatcaaattcggttaagtgagttttggttaagagtatagtaaattacagtatatgcattagaggtgtttgcggtgcaggtggtgtaatttttgactatttttttaaaccaacccgcacatgcagtttttccaatttcctaaaccgcacccgtactacaaaactaaaataccgcagaaaccacaccgcaaaaatggggcgatgcggtacgatttttacaatttctgcagtttggactattaccaaataattaaactatcacaaatacaacaaagcttgagtaacacttctcaaatataccataagatttgaaaataaatatgaaaaaaacttataagttttaacaatacaataattagtgggcttcgggttggacattcacatattggacttaaagaaatataaataattaaactatcacaaatacaacaaagcatgagcaacacttgtcaaaaataccataagacttgaaaataaatatgaaaaaaaacttttaagtttcaataatacaataattagtgggcttcaggtcggacattaacatattggacttaaagaaatataaaaattagtatttttataatatgcggtgcggtacgattttaaccgcacattaacaattcaaaatcgcaaaccgcacctcaccgtgcggtttaggacaaattcagaccgcaatagcaccgcaaagaatttcaaaccacatttttttgcggtgcgggtagttggagcggtttgatgaacaaccctaatatgcattatcagataagttatttaattaaattttttttaaaatatttaaaaaatacgtatgtatataatcacatgtaaagagtacat

SEQ ID NO: 134405 - DNA, 529 bp, Cannabis sativa
atcgagagatgttacaaaattcatggttatccacctggtttcaacaaaaataaatccaaagaagccagtgcaaatcaaattctaacaactgatgagaatagtggcagccaacaagaaaatcatgctttactccctcaactaaccacaactcaataccaacagttgctcaatcttcttgcatctcaacaatcgggcataaacactacagaaccaagcacctcatcgggtaattcaggacaaaatcaaccagaggatgattggaaaaggtagcaatgtcaaagatctctacatccttgatactgcaccagatccctctcctattctctctgtgtctgctgaaacatggcactctcggcttggacatttgtctcacaaacgtttagaacttcttaaagatactttacattgtaacacttcaaacttgtgtaaagataaaccctgctatatttgtcctattgccaaacaaaagaaacttccctttcaaaataataataaattggctggacatgcttttgatctcatacattgt

SEQ ID NO: 134406 - DNA, 631 bp, Cannabis sativa
  modified_base (551)..(577): a, c, t, g, unknown or other
ccatggtatgtctagttgatgtgcatagtgggttggattaaagttgttaaagtctaaacttccatcccagagtcaacctgggtgcagggatagggtcccctcacgggttgacagttatgacttgagtctactcaactctgtgacatcatccttcatttcacgtgttaaacattaatggccatgtcactagggaaagtttttgggttaacattttccccaagtcaatgtcacacttgtgtggagttcacttgatcatgtgaatgaagcttgttttgctcaaaacttcaagatgggcatcaattttgacattcttaggcacttgtatctgttcttcaagcattcccagctgaattaagactttgaacattttttactagtccttagaaatttaaaaaactcattaacaaaaaaaagtgaaaaaaaaatcttatttttttcacttatcttttatctccttcattgaaaatttgaaatttcattattttttgttatggcattaggattaattggattggaattctaatccttgttgaatatgccattcgaaattnnnnnnnnnnnnnnnnnnnnnnnnnnncttttggccttttgcttatcatttatcttttcctttgatttctctaatttttct

SEQ ID NO: 134407 - DNA, 703 bp, Cannabis sativa
ataggatgtgtttttgagtaactatattcaggatttctttaaaaaacaaaaatcaggatatcgtatgatacatatgattgtttgtttcgatacataaatttttaagaggattatcaattggtgttcaacattttggttagtaattttttaaaaaaattattttttatgttatatgatactctcgattcttaattaagaaaaaattagaaaacaataatatattttaacaattctttttttttgatgtatatatatttggaattgatgcctagtaccattcacatttataccaccttgatgaaaacttagttactctactgcaaatacttaaagttgctttaacttgtacggaaatactctacctaaataatgaaagaaatgtaaactaatagtgataatgtaaattaatgagcaattaatactccaatttgttaattagagtgtactgtaattgttatcagagaaatgctaaagggtactgttggtgcttagcactctcctacgtgtcaatatcgctattggtgcaattaaatatcaggtcccatatagttttatataataatttttatggagtattactaaccaatcacaatgcgacatgtcgaaaaggtgctaaacaccactggtgcttcatagcaatgctcttgttatcataactagaaggccgccctcgttaatatttattgtgctcaattttttaata

SEQ ID NO: 134408 - DNA, 529 bp, Cannabis sativa
tcccatcgagaccttcgttttctttcacacaatctctcccatactacaataaagattcgtgcgcttgcgagttgataaatgtaaaacgtaccattttggtatacaacattgactctcattcttcttccactaataatcgctctcgaagtgtttataccaggtcaggctttgtcgaaacacgacgaggaggaaggtaccatgttcacagaggtgatctgcgtgatcatctcaacaaaattttcaaggcatgatctcgaatgccaagaaacattaacgagccccgtgatccccaagtgggcgatcaaggcacacaaaatataaataacccgaccaatgcagtcaattttcccaacgcactaactgggactacagaggtgataatcccaaccaacatagctgcggttgctgctataccaacagtaacacaggccaatcctgttttaccaggagtgatagaccaagaaagcctcctgcgagctttgagaatgatcgagcagcagagaaagcccatttacaaactccatgggac

SEQ ID NO: 134409 - DNA, 1099 bp, Cannabis sativa
tatgtctatttcgaaataccaggcggctgaagctaatcttcaagaagttttgatgcagaaagagattttttggcgccaaaggtcgaaacagttgtggttgagggagggtgatcagaactcaaagtattttcatgctatggcgacatcgagaagaagaaataattcaatacaaaagctgaaaaataatcaaggagtctgggtcgattggcaaaataatttatctgaattaatgattgattatttcagcaacttattctcctcttcttcacctgatattgctgaggtaactaatgttattcctaaacttgtttctgatgttcaagctaatatcatgatggaacctattgcgaatgatgaagtatgaaaagcacttttccaaatgcatcctgataagtctcctgggcctgatggcatgacaccaggattctttcagaagtattggaatgtggtaggccatgatgtaatcactcaggttaaggaattctttgatacaggttacttttctcctgttttaaatgaaactaatatagttctgattcctaaaaagaaacaaccgaaaagcatgggtgatctgcaacctatatcactttgtaatgttgcttataagatcatagcaaaggtcctggccaatatgcttaaagtggttcttccttgtgtcatttctgaaacacaaagtgcctttatacaagggaggctaatctctgacaacattatggtagcttttgagataatgcattatctaaaaaggaaaagaatgggtaagactggtacaatggcgctcaagttagacatgagtaaggcgtatgatagggtggagtgggttttccttgagaagatgatgacacaaatgggttttccttggaaaatggtgtcgttgattatgcattgtttttcctcggttacctatataattactcacggtgggaacaatatggggcctataactccgagtaggggaattcgtcagggagatcctttatctccttacttatttctcatttgtgctgaaggattttcttcattggtaaagttgtttgtgcaaaagcagtggttgacaggttgccgtgttgcaagaaatgctcccattgtttctcatatg

SEQ ID NO: 134410 - DNA, 501 bp, Cannabis sativa
  modified_base (30)..(58): a, c, t, g, unknown or other
acaagtattgtgactaaaaacacatttagnnnnnnnnnnnnnnnnnnnnnnnnnnnnntacctttagccacggaccttttattgacaacataagaataatgttttataataagtcacaacttttttacttttagttaaaagtaagattttttgtagtgatagtatgtgatcactagacactgtcatagtcacattatctcacaagtttagataaagcaagactataactctgtgggagtatggattaataggtcatcttttccacgaaaattgaattcacgtatcaattttatacaagaccgctcttgtatttctaggtatcaatatcaagattaggagagagactcttgtaatatcaagtgttttgagaggaacttttaacactacaagaaaaaatgtttttgatgcgccggcaaaagtacactaactacgccggcaaagcttgtctgggaatcttggtcggtaaaagactttttaccgccgcgtagactaaatgcgccg

SEQ ID NO: 134411 - DNA, 656 bp, Cannabis sativa
gaccatgaaagtgaccaatgtttacaagccccacaccacccagccataatgatacaattcaacattatttcaatattcagaattcacattaatatattaagattttgattttattagtattttgttgagtgtaaaaacatatagggaatagcttgtcaagtgtagaactttttttttcatgagtattatatgcttatatgggtgttgttttacttgaagatatgcaattttagtgggagtttgttttctatattaattactagattgacattactttgagtagtttcatttttcagcattattataaagtttgaaagattaaggatttatctcactaaagaataaaggattaattaaaaatatacatgattaaaatcacattgtatgtaattttcagttacacattcatacttgatctatttcattgaatatatttaatagggaaattacctcatatatatatatatatatatattttttttcaaatttacagtttgagtttctaaagtagtggcagagctatttgcaataggggctctaattagttttctatgtgaaagtcctaatttctaccagttcatattgatgattcttagcagattaattctatgttatgaattagaaattaaaaacaatgaacacagaatttacaagct

SEQ ID NO: 134412 - DNA, 642 bp, Cannabis sativa
  modified_base (37)..(37): a, c, t, g, unknown or other
ggattaggtgagagtaatctttatccttccttgattnatgtgattcttcataatggagctgtcactagactctttgattatcatgtaatcacaataaacgaagcttacgccttctgtcatatccttttatgggtcttataatacgtttcccccatgccgcattaaatgtgaaatgaatgttcgagcatgttccccttctcccggagatgctttgttgtatctctagctacgggagagtagaggcacgctttatgctcctctccgagggctcactccctgaagtgcacttgcttgtctatatataacttagctaatttcgtgggtgaggtgtccttgaaatccacgtgcaacatgcagccactgccacgtattttggaaaaatctgaggacacaattgaattttttttgctgtattattggtagggttggtttcacttctttcactgtttacgcttattagggttgttgctacgatcaatttctaaccgcttattttttgtgtttcacagtttccatcatcagacaagggtcttttgttggattttgtgccctaaataaaactcattttaatataatcatatttactaattaaaaaagattagaaattattttatatttcatggttcacatgactatacttaa

SEQ ID NO: 134413 - DNA, 808 bp, Cannabis sativa
atgtggagacagaaatccagaattacttggcttcaagatggggatcttagcacaaagttttttcatgctattactatcgtgagaagacagagaaattttattagttagctgaaagatgctaatgatcagtctcttccgactcgcaaaccagattggaaatgctttcttaaccaaatttcgagatactttcaaggtaatgccactaatttttctcatgatttcagaggttgcatgtaacgccctaatctatagggacaccatgtgagtgattttataaactagtttaatactaataaaataattaattgttcaaaactgtgatgatattaaaaacttgactaaaataaaacactaaaaacagacattataatggcatagaaagcatatttcgaggatccttgttataaaaagttttactaaataaatatatacaacaatcatttaaatacaaaatcaaaatacacagtagatacagccagcccaactcctggcaactcagcacgcaggttggtgaggtcaatatgtacattgctggggaacgtagtcacctcatggaagctctaacttttccttgcccttacctgcaccacataacactcgttagtcacaaggactcagcaataaaagcaataataataataatcatatagttttttatttgaatattatcatttgtacacgatcagaatcaaaccattacgcattgttgataagatgaaatccaaatcactattggtatctgcgatgaataagtattagtatacagacatctggtaatacaaaaccataacattcaacagtaggtaat

SEQ ID NO: 134414 - DNA, 868 bp, Cannabis sativa
  modified_base (738)..(739): a, c, t, g, unknown or other
ccgccaaaaattaaacttaaatatgagttaaacttaatatttatgtcgcaaattactcattcagaaaatatgaattttcaccacggccatcacgcataatacatagaccattgcttgtaaaaccaccgctaactgttgatgacgaaatcaagccaccatatgagccggccgatctcaagagactaaatcaaaacaaaagaccgaatcaataaaagtagcctctaattatagaaacgtcttgggagaagacggagaaaatgggcaacgagagtatgggatgggaaattatagtaaatggctccaaattataggattatattattaaatatcctcattttaaaacttatagagaaataacccttttatacttttgccacataaaaaaattaataattttttttttaaaaaaaattagaagtaaattacttaaagattatgatatatctatattagttttattaatcttctttatttgaaaattatgtcaatttttttaattttttatgaattattgtgggttgttggtaaatatattttgttgtatagtatatttctattttgttgtatggtatattattattcttagatgatatttattttgctatgtatatataatagtgatacataatattgttaggataatacaaatattttaatgtatgtatataattttattggcatgctatatatatgtttaattattatgtttatacattttaattgtatgatatattattnnttttaaataatatttaattagattctattttattatatacaattatagtgtttaattttgttgtcatggtatatatactttaattttggtatataatttagttagtatggtatatatatatatatatat

SEQ ID NO: 134415 - DNA, 869 bp, Cannabis sativa
tcaaacccgaacccaaacccgaacttgaacctcgaccaagacccggaccctggaccgggaccgggacctagactccaaactaggaccgtgaccgagacccaaatcccggatcgagactgggacctggaccccgaatctcacacccgaacccaaatcctggactcgaacccagactctgacccaaaccttgaccccagacccggacctgaacccgaactcggaccccaacccggatccttgatccaaatccaaacccaaaccccgaatccccgacctggacccgaacccaaaccctagactgggatctagatcccaaactcgaacccggacccaggtttgggtctggggtccacgtctcggttttggtccggggttcggagttttggttcaagtcttggtctcgatattgggtctagggtccgggtctgagttcgggttcgagtccaagttcaggtcatgataagggttggggtcgagtttattgtaaaaaatttataattgggctgagatacaaaatgtcctaaaatttagaaattaatttagtaaatgttaatttttttaaaaaaaaataacaaaatggtcaaatatattgaattagttaataaaaattataaaaatacatttactccatattaatttttttagaaaaattatataataattaaattaagttatataaattttttagtattgtatattgttatattgtaacaaaaatgaataaatctattagatcataaatatataaagcaatatttgatatatactatcactgaaaattaatatacagtagtaataaagttatataccacaaagaaattataacaatattttttttttttgataaatcaatgaattgtattgcataa

SEQ ID NO: 134416 - DNA, 740 bp, Cannabis sativa
ataatattaaaattaaataattataattaaaatacacaatttattttttatatataatttaaaatattttatatatctgccgcgaagcgcgggatgtttactagtttatcatataagaaaattaaatttcaattctaccaattataaataagaataatttttaaattctaaatcaatgtatctctaataattaatggaatattgaactaaataatcctcctctaaaactacttttttgctaaataactttcttataaaattattttaatttttagatttttttattactaataaagtagatgattaatatacccacacgaacacaacttaaacacccagccccaatccccacgtgtaagagaatttttcttcttctgtttttcattttttcaactcttcttctcttcttcatttcttcatctcaaccaacccaatgataagctcaaccattattttttcttctcttcaccttactatttcttcttaatttttttttttccataaagtcatctccatctcttctccttaaatatgtcatctactcccttaaaattcctaaaaatgaaaccctaatttgtaatcaatccaatcttcatagataaaattaaagaaattcttttagttatactaccatttcggtaagttttattatatatattctcgaatttatataaatatattatattttacatatatatacccacataatatcagggccagccctgggcataggcgggcta

SEQ ID NO: 134417 - DNA, 666 bp, Cannabis sativa
  modified_base (637)..(639): a, c, t, g, unknown or other
attatatatgttatgtgtaataatgtttttgtactagctagattaataattaataagcgtgtgttttttcatggtaatgtgtcattgtgggtttattaattacttggtagaattaatttataatattacaaaaattaatttttccatcgatattttgccaagatgaactgaaagatttaatttaacgttggtaaatgaatgaggactcttaatttttaaatatctcttcaaaattttcaccaatatatattgttaaattttgctcggtcttcttcttttttcccctaaacatttacattcttagtcaagatcatatgctgaagcacagcaatggaaaataacatattattgtattgagatagtcaagttgagtgtctagcacagagttgctgatcctacgttctatgagctaacgagccccacatatacatatgtagattgattttcactcagtgaaagaaaatagctatttacaaaaatatgaaaaaataaaaatatgttttgatttatatgacttaaaaacttaattactttaaatatagtattttttttaaaaaaaaaatttataaatatgggaaaaggtgatgagcaaaactataaaaaactttaaatttgtgtttctttttatttatttatnnnttttttaaaaaaaaataaaacactaaa

SEQ ID NO: 134418 - DNA, 890 bp, Cannabis sativa
acagatgagattaactggattagttatccagacttctgtcatgcccaaacactagattgcacaaattagcctgtctaatccaatccagtcctgcataccaaacgagccccaacactatttataggaaataatgaagtaagatatgcaaaaatattgcattatgttattaattacgaagctatgttcttggagtgtgcctatataaatatttgtattttatattattttattggaaaatgcttaggtggagtcatgagaaacgacgtctttatatacagacatttttttttttattatgtgtcactcttatatttaataccaatatttcattaattccttttatattattttttttttaataactttgtgatatcaatataagaaaagttacttgttctaaaaaaataaataaataagaaaatttattaattaaatatatgatacacccctattaactttaaaaaggatttaaaaaaaataaaataataataactgccaaaagataaaattaccctaattaataaggagaagtattatagatatcttttgtaggagattttggtgttagaatttttatcaaaaaataaaaaataaaaagacttggtgatagactttgttgttcggtgacttccattgatgaagttaaaaggttttctattttattagataattaacgattggagtttagaaggaacacaattttacaataaactcttcttgtcagacactaattttagcgagaagataagctataggtgcaagctgtaagatatagctattaatgtaactgtgtattgtaatttatctttattatttttttatttattattaaaaatttatttagagtttttctttattttttttagagaggataaattacaatggactat

SEQ ID NO: 134419 - DNA, 694 bp, Cannabis sativa
ttaccataaaacagtacacaccaaaaagcataatgaatcaatggctactctttcaattttgaagctcatagaactttgtttatgtattactacattacatgtagactccactaaaagcttgttgatccgaaaaaaagagccctattcggaggaggtgactttttctcatcagggtaaaagaccccgtttggaaaatttttttgcttatattttcttgtctttttgagaagctaagaatcccaacttctaaaaaaagatcataaaaattttaccaaacggagccaaagtgtcatctattccaagatgaactcgtccttaagccaaataacaaaactatttgctatattttttgtataaataacagaaaatagagtgatagtatttcttggtttttatcattggagatatgttttgagtttgtatcaggcacagacttgataattcttagcggtataagtatttaatgttagtaaattgtaattttcgtccagtttcaccagtacagatttcattaacgtcttaaacagaaaacatgtaagacacaccttctaaattattgggtctagacgaaaaatttgaatttccatacttacaaaaccatattattttttccctaaacatatacttagtaaaattgataatatatgacaattttacaccttttccaaaactaacactcccatttcaaattcta

SEQ ID NO: 134420 - DNA, 525 bp, Cannabis sativa
aagagggtaaaaataaaagatgacaatataaaaaaagtatagagtgtaatttactcgtattatatattatttattaattaattaaatattattgatacctttaactataccaaattcagtttcatttgtttatgtacttgtgttagttgaattaaaatattatttatattcttgtcatccttgaatattttttttccttttcttcgtacttatatttatattttttatttgttgttctattagaaaccaccatttttttttattttctttttgaacatttttttaaataataataattaaaaaaaaaaaacatgatttaaacatgtgacaagatatttaagataattgtatagattattgaaattaattattactaacaatgaacaaagatatatattatatattgtaaatgctaattagtaatttttcctcctgaattttaacatgtacaaatcgtgccccctgaacttttttggcgttaaaaattcccctcgaactatcgagattgttaaatttaaggacttt

SEQ ID NO: 134421 - DNA, 516 bp, Cannabis sativa
tcaataacacatatatgacatgaacccatcctaccctagacccaacctaaacctggaccccagcccgaacatcagaccccagacccagactcgaatccaaaccccagacctgaacccaaaccccgaacccagagccgaatcccaattttggggctagttccgagatccttggccgggtctgggttcggggttcgagtctgggtctatggtctggcgttcgggatccgggttagggtcgaggtccgaggtctggggtacggggtttaggtctaggtccgaactcagggtccgggtccgggtccaggtcctggtatgggtttggggtttggggttcggggtcgaggtgtgggttcgggtctgggatttagaccggggctcgggggtccaggtcagggtcttgggtccaaggtctgggtcaaggtcggagcccgagtccaaggtttgggtctgggtctgagtttggggtttgagtctggggttcaggactcaggatccgggtctgggtccaaggtccag

SEQ ID NO: 134422 - DNA, 1107 bp, Cannabis sativa
  modified_base (450)..(451): a, c, t, g, unknown or other
accaatactgaagctggtggttatataccaaggagtgaggatgcctatgatcccaccaggtacgtgctattggctgaattggaaaaaatcgccaactctggcaacgactgaccgaggctaaccatcaaaacactgagttggagagggaggcagtcgtagttagggtgactcaggaaagcaacataatgaaccaacctgatcctggagtgagaaggccacgaggcagacctcggggctcaagaaccaagaggtaggagacggcttaggaaaacccccaaaacactcaagaggaacaacctggggaaagtggggatgttccagaagatgaacaaccaaataaccaggcaccttatcaagaagtgcctcggagaccctaggtgtaataccctaagaataagaaaatggattagcaaaccctaactagttaattatgtattattgtggaattannttattatataatttattataagtgaattaatttaatatatgacatgttaagaccctgttggtgagccaggggcattttagtaattttgacccgagaatggtaaaactgtgaatttaatttaattacatgcttatggactatattattatatagtatacctattttttccttttcatgtgtgttatgacaagtcggcgcggtatagtcacaagtgggtattttgggccgaaccgagttcgaggccgtaatgaaattttgggattttaaaatggcatattattgtcgagtgaataatctaaaaattaactgagtaatgtgatatgtgtttaagacaatttttcccttgaatgcatatgtgtgtgtgttgtatggccccaggggcattttgatccttttgaccatttgtttattttcaactaaatggaatttcaagaaaatgaaactcatttgtttctcagcccccaaatcgaccccttctttctctttatccatcttttcaatttgtgagtttattgggaatagcttggattagagcttgatttgtgggaattctttggagcttgagtttttgagggtttgaaggtagttttcttactattttaatttgaatttgttgctaaaatggaagtggataaataggtctttgagttttgaat

SEQ ID NO: 134423 - DNA, 576 bp, Cannabis sativa
  modified_base (514)..(518): a, c, t, g, unknown or other
aaaaaaaaaaaaactcaaatagttgacaattccataaattgtccactatgatcctacataccacattttaaacatcaaattaatgaattttcttagtaaaaacaacttattttcctaaaaaaaaaagaaaagaaaaatgacatggacattgtctcttttcaacatctgtattgtcaaaatttatcttgaaagttgaaccacattgtcagtgacgaagccagaaatttggttgagtgagggcttaaataaatattaagtcaaagctcataaaaataactaataaatgtatctttttaaatttttatcttcaacaaaataaaataaaatattgtcaatagtattattttattttttaataaagtgttattttttttattatttgtattgggctacttttaaaatggacttgattaaaatgagggtaggtttatgaattataattaagatattgagtgagggtttttgtagattaggctttaataaattgagtaaagtgaattaatatatgtatatnnnnncatgtgaaaaatttgatgtatatatttgagtgagggcttaagcctacatataggcata

SEQ ID NO: 134424 - DNA, 594 bp, Cannabis sativa
gttaaatctaactaattaacaacaaaacctgcttgaatcaccttaaataaccataatcaaacttcaaaaaacaaactcaaacaccaacaacaaacacagagctcaaacacccactttcatgcaaaatttcattacttgaagcttaagaaaaagaaagagattaagtccaagaattctaccttggattgggtcactaacaactaatctttaactctgatttcagcaagaaaaacatcctacaagctgctgattcctagggctttcgaacaagagaaagagagaaaaaggttttctctctaattcacactttgtttttaattctctaataacaaaaccaatacaatacttaggttaataacaaattgtgaccagctgccaccttaaaattcagccacaaaacaaaagggtaaatgactaaaatacccttccccacataactaaataataaaaagatctaagggtaaaatagtcatttctaactcaagactaataccgacattctcaatgtctaattttatcgccctgctatactaaaatactaaattgtgattctactgagccatacaccgcgttccatgttgtcgggcaccgaaa

SEQ ID NO: 134425 - DNA, 665 bp, Cannabis sativa
agtatcgatgttggcaagattttaactaaggaaatctttgattgtgcacaccgagagaaaaggaagatgttcctccctgcactggtcacaggaatatgcagagttgctggtgtccccatacgggatgatgaaagcacagtcacacagaagcaggttattaactttggacttgcccctgctccaaaatacactcctgcaactgaatctacttccaatgatcaagtgatgaattgtttggccagccaagaggctacacagaatcagatagtggaaaggctagcacaaagcggctgcatgctcactgggagtacgaaagggagagagacatgtgggtgaggcatgcgctgcagaccaatgtgcacaaagttatcctgggatatccagaatttctagatcagattcttacgccttggcatccgattgacggtgaagagtttgacccttgaaggagttttcttctttccttaaccaattttattactgtaaatatgtgtggtagttctgatgtttagtttaaatgatgtgagttatgtgttgttgtggttgttatgtatgttcttgttgatattggttgtgtttattgctgtctttagttgtttgtgtagcaacattgtgtagttaatgtcatgttagtgatgttatttaacgccctaaataattaggca

SEQ ID NO: 134426 - DNA, 882 bp, Cannabis sativa
aggttcccatatttaattttctccattaagttttatatgcccacaaacatgtaaactagctccctttctttttcccatattttagtgaatatagcccatttttatgccctctatttctatttctatccaattaacaaggtcctattttaatgtatttttatattgtaattttgttaatttctcgttattttttgttgttgtttgaggaatacctctttttctttttttttttcttttttttttattaattaaccaaaaatacctacatattaaaatccattcaaatttacctacttttataagtttactatccaatttatccttacatatgttatcactacaaaattttttactttaaaaagatgtgactaattataaattatcattattatgttgtgactgtggctaaatgtatattagtcacaaaattacaatttaatgtgactaaatgtattttaagtattgtaactaaaactaaattagtgacaacttgtatttaaatactatattttagtcacaagtaagtttttattgtgattaaaagtcacatttaatcacaaaaaaattatattgtcattaaaaaaattatcattaaaagtaacagttttttgtagtgtaccttaattaatagctagtgggtattcacgttgggtaggcatcacgttaattgtatgaaacagaagaagcataattggtataataattagaaaaaagggtatataaattaatgagttttaattgaaagaggtaaaaatgacacgaaagattttaatttcctcttaaaagtttgggataattagacaagatattattttttgtaaaaaaaattatatttttacgcttaaagatttttttttttttttaacatttttacaagttttt

SEQ ID NO: 134427 - DNA, 668 bp, Cannabis sativa
tagacttctcaacccaaaccatgctccttagagtaagaactaatattgtgacccaaaataccacaagccgcacatttgtttggtaaccattcacacttcacagtctgttcacctaattgatctctctcactaataaaagggatagacattggaagtttatccaaaacctccacctcaactaacagcctagcaaacttgatcatggacataacccttgtgactttatcaatcataattggtcttcctattgtgctaaccataacactaaggttgttcttaccccaatattgaagactagaccattaaaaagaacccaaataggaactaatctcaccagttatacaaaatctaagttagtagtccaaggatgaagaactaccgactttttatcaaaatagatcacacttgtttcaagaactaaatcacgagtagcttcatcatggaagctcactagagtgaaattagaatgcatacgaacaattcgatcaattcccaaatttctccaaactcatttgataaacccttcgaacacacgaaaggggaggatagcccctaaaacaatacatatgatcgagttttgccaaaaggaggcttcaaattcaacttcttcaacatcaatctttacaattaattgatcaccatgtttcattggttctgtaaagttaagt

SEQ ID NO: 134428 - DNA, 1251 bp, Cannabis sativa
ggaagaattgagctccaagaatgtatttcgttttttctttggtagtagggaggatcggcagagggtctatggtggtggtccatggacaattgacaagcaattgatttgttttgtgaaaccaatggggctgggtgaaatttctaagatgaactttgattttacatcattttggatatcgattaataatgtcccattagcttgtatgactgaactttttgcgagagaatggggggagaggattggtaagttagaagacattaagattattaatggtaccatgaaagtgagggtgcgcattaacattacggagcctctgaagaggggattgcgtgtggcgatcgatgatcaaggtaatgaggtttcacttctatttcaatacgaacatttacccgacttttgttttgactgtggaatcatcgggcataaggcattggattgtcctttgcgggactttggtggggttaatcctaattttgatggtgggagatatggttcgtggatgtgtgctccgagttctccgccacgtgatcggactaggtatcaaaaaaagcgagagacttccccttctaacaggccgattatgactatgggagaagcctcaaagattgtttcggcggttgagagaagccgagttcgttattctggccctacaacagaggagttagctcctacctcagttttagaggctcgagaacgtgaggaagaactggcgtccaaggccaatatgaaaccaaaggctcccgtggttgttgggggtcaatcggaggtgactgagactgtggtggggagactgaatggtgatcctatggtgtccgaggacgtgctcttgccttcttctgcaccttcggtttgtgtgccgggtgtgggaatggtgatggccgataatgctagtgagacggagcagttgggaaaggtgttttcttcgggtatggatggtggttcatctagtggaaaggtggatggtgtgggagatgtgagtgaccaccgagtgctgaaggccactaaagacaacaagggaaagggtgtgattgttcattcggatcaagatgagctctcgtttcgccaagcactccaacaaacttttgagccgataattcaagcacaaaaatcgaagacttggaagcgtcttaattctataaagggccgtggccctcatggggtagctaaggcggccacttatcctattagtcctaagttatctcatgtcattgtggccaatgccaaatgtaaggtgagtcctaaggttggtgg

SEQ ID NO: 134429 - DNA, 594 bp, Cannabis sativa
gtttctaaataaatttgttatatagaaaagtgtaactttttgtatatcagaaaatttatctatataatagatagagaagggacttctttttggaatattcgataggagcacatccgcaaattaaatgtgatcctctattttaaaaaaaaaaaaattactatttatttgaaaatattaaaaattcatttaagagaaagaaaaaaactaaaaacaatttgcaatctttatgtattattattaactagtaacaggttgcacttatttataaaaatttaaaattataaatataaatattaattagataataaaatcatatcaaataagtttaattttattttatatataatttaaaaatatatatttcaaaacaataaatttacataggaaattcttaaaaattacgataaaaaaatcacacgaaaaaatatttttaaatagactaattaagatttttgtcccttaaattttgacatgtaacaaatgaggagcataatttggcagatatcaaactagaatgggcatgatttggtagatattaaagtatgaggagtatgatttagtacataaataatcactaaattagtaaaattgaat

SEQ ID NO: 134430 - DNA, 509 bp, Cannabis sativa
tacccacaaggtcagagcttctctatctagagtttggagtttttgatacttagcctattgttgtaattaccatctcgtgagaaacataaattcaaaaaagacgtagcccaataactatcgcaatataaggggtgactactataaattatgtatctctgtaaattatttacttaaacttattagtcatcttgccaatctaccgagttgatgttgcccacttttttagcgtcaatatttttgtactttcattgagagccacaatttgagtttctcatctacagtttgacatcctctaccgagaactttgtttttcaaggaattcataagttcaagaaagcaatcaaccatgaacatgcaaagcaacataccactcttggtacccacgccattacttagcaagtagtaggcaatgaaatttcctataaggaagtggattacaagcgagaaccagaaaggacttagactcagaaatgtggatccataggatctctgcctgacacggagaaatc

SEQ ID NO: 134431 - DNA, 625 bp, Cannabis sativa
ttgcagaacacttggcgtgtacaacactatgtggtggttttgaaagtggtagggctccttgaggaggaccctttgtttatctccttcacaaccaaaagaaagtacaaatagatcaggtggttttttagtaattgtggtttggaatctaccattccaatggtccttcatttgcttttggaatgtggataaaaacacagactttgtagtgagaactcttgcaactaacacagtatccagagtgccatcgtgaacctctacatcatcaaggattagaggaggttcatcttcttcaacaatggtcatcttgcctttcaatttgtcagtgagaggattcatagttcaggcaaaaattttgattgtttttggattgaagggagcggttatagatacatgaagcaagaaaaaaggaagaaaaaaccataaaggacttcttaactgccttagagcacaactaacggcaaactgctcttagaagatcatcttatcttctcgtttcaaaattgaatattatctacgagatatatttttatttaaagttgatcatttatgaaaagtaaccaattggtatattatcgaaatcataattaatttaaatattaccataaagtatactaaataaaactat

SEQ ID NO: 134432 - DNA, 618 bp, Cannabis sativa
tatcttgaatttcacaaaacctgctgttttataaaggacaaagcaacagggagtgtgctgctcaagggaacctttaaagatggcctatacttgctaggacagtcctctaatgcctcaagatcaagtccctcaactcagtccaattctcattttcattttcctactgctatgatctgtaataaacaaaattacacaaatgtaattatcaaatctaattgtaataatgttgacaacaataaaataggtcagtctccttcttatttctccactcttgtcgcatttcatactagcagtaaattaaactttgatatatggcatcaaaaacttggtcattgttctttacctattttgaaaaaggttctgtctagcatcagtaattcaactaccccaaaccaattgtatttttttcatgcctgtcaattaggtaaaagccataaactaacatttcctatctctaattctagagcctcccaacccttagaattaattcatacttatctttgggggccatcacatatagaatccaaagatggatataggtattacatccatttcttggatgactttagtcgttatacatggatctaccctcttgttcaaaagtctcaagcatttgat

SEQ ID NO: 134433 - DNA, 1313 bp, Cannabis sativa
atagtattgaaattatttaaatgctagactggatttgtggtcccaccatacgacgagacatgagggttcttgaatccctgggggaatgcaatattcatgatgtttggatggaatggctcgagctcctcaacaagtcatatccagactgctttccctgttccccaacttgatacctcctgaatttgtcctccaactcatcaattcgcaactggatagaattttcttgcttttgaccgagctattggcgaagatcgagttttttctagttcaagtggttacgaagatctggttgtggctggttatagttgttaacggacctcgtcctactcacaaacctcatcctacccatggacctcgtccttgagtaactttcaattttatttgtgcctgtactctctcgatcagtattgcaatgagttctttcccttcctcgtgttgattgactatgggttctcgtgtgtcccgagctaacactcgcttcgtcgtgtcccatctttttcccttgggtatgggtcgtcgcatgccccctactggggtttgtacgtgccccttgtttgttggttcgagaaggacgttggcgatgcctttgtggtgacccacctgtcccaagttgagtcccaggatttccctcgttctcacgggggatttcttattccctggtccctggttgccttctattctaatttttgtgggaaggctctggttggtcatttggttgttcattcttagagggaccctcagtttccccaaattgttcttcttaggcattctgaggattctcctgagccgtctcctgcctcctggttcatgagccacaagtcttcctcgttgtcttctcactctagaattaggttcgttttgtgtgttgttctcctatgtcgccctggccgcggctatctcacgttccaactcaacatttcgtcggtttgcctcctccaagcgacgcctgagacagaattttcgaactcaacaattggcacgtatcttgtgggatcataggcaccatcattatcatattccataggttgcgcacccccaagattgggttctggccattatcatcccctacttctgggttctggccattttcatgctgagtcctccttgaacgtgtggaccgtgtattttggccaccttcaagttaggtccttctggaacgagtggtccgcgtagatcgcgagttgggaggcctctgtgagcccatcggctctttttcaggacggtgagtggtctcttcaggatgagcatcaacatgttctctattatcagccatggagaaaggtttttcttttgatcaggaggtttttttctga

SEQ ID NO: 134434 - DNA, 556 bp, Cannabis sativa
catatttatgagttaacaaaagtaatagtaacagtgtaagagaattgtaacattaggtatttttacctctaaatataaatatttagtatttaagtgtatataaaatttaaaatattagataattatactgcaatttacccttcttttaaaggatacttgcagcgaaattgtcttaatatttattttataatttttatacatataactctaataaaagaataataataaaagcatcttattatgtggtgatatatttccttagcttatttaatacataatttaataatatatcgacacgtatttctgaattgacacttaatgactgaaaaaggatacgtctgcaataaattcgtaagataatatacttttgctatcacttttttttttttattaagatcatttgtgtaaaaaattataaaaattaaagggatttcgctgcaaatatctttttcttaataaatatccgggtagactgtcttatgtttttagcattcaaaaaaaaaaaaaatattctaattattttattataatcgtatacgttgtaattatttagaat

SEQ ID NO: 134435 - DNA, 1207 bp, Cannabis sativa
tctggttgttggttttgatgtgttatgtagaaattcaacaagcttgggtttggaaacccaaacttgagtgtttaatggcactttagattttaaatttttctcttgctgttattacttggaataatataggtgttctggaaagtttggtgggatttggacatgttttgagcaggtttggaattgtttggggaaatctggtgcaaactgattaaccggttttcttggatttgtaaaaccggttaactagttatggcagattccccgaacaattcttttcttcgattcgtgtccttttcagagccttgtttgggtgattacctgtttcttagggtattgtatttttagttactaatagtagaaccttaagttggagtttgggtttcccggattagggttttggcgtgtaatttacccggttatgttatgtgattagggcatccatccagcacgagaatttccgttcaggtcggccaactcacttggattcaaaaattaggtaagaatagtgcagaacatgtgatatatatatatatatgcgaatgtatgtatgtgtgaaatatataggatgcttattatgttggtatactaccaacacttgtacggaaatagtacagagtgcattggtatagtgtatatcgtttaaagagtacattacggtattaccagcacaagtacgggaaagtacatggtgtatgtggtatatcacttagtgatactcagggtacgaaacaaaccctactaacactcgtacaatattagtacaaagtgtatgtggtacagtggctgtaccctagtaaagagcgttcttactcattgtttaagccttgtaaatatgtgtatgggcgcctaaatacaagtcgatattatatgatttgttatatgcttttcttactgagactatcaactcatagttctactttcatgagtaggtaaaggaaagacgaaggctgaaaagaagtgagcttcgagctaggattatgttgtacatgtcatggcgacacgatctgaagtgttcggtcttgggacatctggggttatattttgcagtcgttgtgcgacctgactagtattttgaatattctgtaaagaggttaattacgggatcccaatttttgtaattatatatataaaagtttataaacttttatagttaaatctaaagttttaatttgacatgattttcaaaaaaaattctttgattagcaaa

SEQ ID NO: 134436 - DNA, 761 bp, Cannabis sativa
  modified_base (395)..(401): a, c, t, g, unknown or other
cagcctttgtgagcgggggacctcagtcacgaggctattcagacagggtcgtgtctgagaaaactcagacaacccttatctaaaaatgtgtctcgaccgagttttggcccttcatatgcacacgtacgagaaaccctagcccaagatatttttcaaacttcaaaaaatcacaactatttcaattttaatccaaattaagttttgtaaaagccaaaattacttaatttttcaccaaatttcccaataaaacattttcagaacaaaaataaaaattatttttcatttttaattttgtaattcacaatcaatcatcaagtagtcacaaaaactaacatgaacacatccaaatcatccaaacatcattttaaatccatatttcatgaaaataaatcatnnnnnnngctctgaggccagttgttggaactgcttttaccaggatttagatttactaacatgtatattgattataatactataatctaacatcttaaatatgaattttctaaaataatgaaataaacacataatagattaagaaattcttacattaatggcagcagaatataatgactcctttcattcagatctatagcccttgatttctgtatgtagcagagcattatcaatatctgaatagggctgagcataaaatccagaaaacaaaaaaaaattgtttatactgacctactgaacactgttggaatcaaaactgacggaatcgaaaatcgaaaaaactgctaacggttaaaacttccattgaa

SEQ ID NO: 134437 - DNA, 631 bp, Cannabis sativa
acattatcatcacttgctccttccatgtggagggaagggaaggaagtatgtgtatatctgtgctattaagcaagtggagttaaaagttttcatgaatctggcaagctgtcactgagttatgtttgtaacataaaattagcatttaaattaactaaatgcttacatttacatattatttattaacaatctcttactaagactaagatatccagaatcccagatgcatgttttctatttcttcagactatcagaagaactctaaaactaacctgagaattctgtacaaccatccatagtttacgaaaaagggtatatggtgttttgccagatttggccattcaggttcagctgaggtatatgagacaacacagctacttagggcttgggttgagaggatatgacgctcatagtaatgatcttagcttgatccataagtaatactcaaaagtttggaaacttcctgggcagagtgattgctgaattgaactagaatttcacaatacctaatcacatatggtactaggataaatagtttaacactaaaattaatcttatttgtgtaagattatttattccaacaaaaagtgactatttatcccacacaatagaatgattgactaaactattaatg

SEQ ID NO: 134438 - DNA, 502 bp, Cannabis sativa
ttttatggatgcatactctaggtataatctgattaaactgcatgtctctgataaagaacatacaagcttcgtaagcaacatgggactttactgttataaagtcatgccatttaggttaaaaaatgctagagcgacatactaacgccacataaatggtatgtttgagaaccagattggacgaaatatgaaggtctacgtcgacgacatgctggtgaagtcggtaaaaagcgaggatcacacaaaggatcttgcagaatgttttgatatactcaggaattacaacatgaaacttaaccctaaaaaaatattcttttggggtttccttaggaaagtatctgggtttcatagtcaatgcgagaagaattaagccaatccaaagaaaataaaggccttaattgagatgccttcgccaacgaagccaaaagaggttcaggcactaacaggaagaaaagcaacattgtctcaaaatcaattgataagtgcctcccattttttaatgttt

SEQ ID NO: 134439 - DNA, 1157 bp, Cannabis sativa
aacattttatctagcgggacaatcttaaatgatatttggaatgttgatattaagtagggttatggtttcggactattttacccctaagcctaaagataacttaagggtgaaataaggggcaaaatagtcattttgccaaagagtttagttttggttttagtgggaattcagtagcatttttcacattattctaatctaatttagagtaagttaaaaagataaataaattttatccctttacttagaaaaataagaaaaattggaaataaatgaaagataacatcaccccttcactttctctctcttgtgacctatcttgaaccaaaaccataccaagctcaacctttgttttgagtttccaacataatttgaaagagatttggagtatcaagaattaaggcaagactttagctccatttttatgagtttttggaaggttttctttaatttaaagcttgcaaaatttgagaagtggttctgtccgaacctagggtcaccttgggctgttttttgggttaattttaggttgtttggagcttgcttgagttaaatttgagggttggttgtgtcactaagcaagtttgagttcaagaactcaaagcttgctcaacaatgacactttttaattcttggtgtaattattgtgtttgagctgtggaatatgtttagtatgttatatgttggtgttctataaagtttggctgtgattggggaagatttgagtaggttttgggggctttaagattgagaattctcgtgtaaattctgcccagacaaccaaaattctagttggttcatggcaattccaaccaaaataccagttggacagtatcgagaaaggtcgattttcaaattttggccataactttttactcaagtgtcctttttagacgttctatatactgttttaaagcttatgacaagctctatagtatggtaaataaattacagccaaattatatattttattttagggtgtcttcaccacataattcggtagaaaaccccggattttatatacatgtattagaaagtgatcaagattagacacttaccagttttacgtaaatgtgacataaggcatttgttaagtaagtgaaatttctacttagattgaccgacacacttgaatctagaaatgtggtaagattagtata

SEQ ID NO: 134440 - DNA, 651 bp, Cannabis sativa
aacggccaaaaaaattcagaaagcataatttagtacatatcaaagttcgggagaaaaaaatcctaattagccttcaaaaaaaaatgttttgtacttctatatacatgtaaataaaaataaattttcctttataaaattataaatggtcaaaaattgaatatgtttagagaaaaagaacttaactaaaaaacaaattgaagaataaaaaaagtgaatcatagttcataattatgttttgtaactcaatataagagcaaattaatatgagtataaataaataaacatatatatattttaaaaacatttcctgcgagggtttggggacaagtcggagagctaagttccaacaatttcaggatgcttacaacggagactcgactggcgcagctcagaaaacaaaggtaatggaggttcggttgttgtcttcggagctctatttcgttttttttctttttttggttgaggatgcgtgattgccatgagaaggaaagagtagaagcccaaccatgtagttttgcaaaacaaaatgtaattgtgcttagagcatgtttggtattgttttctgtttattgttttcaaaaaaatatttttaaaaatgagaacaaaaaaaaaattttgaagtttttaaaacacaagtcatgtttggttagt

SEQ ID NO: 134441 - DNA, 555 bp, Cannabis sativa
gaggagcagggcgatgtctgtcctgatagtcctttcgaggaggaggaagaagaggaggctgcacccccaaattttgcgagaaacaatgagggtggggagccaattgacgctaacggcgatgtcctggtcataggcgtggacttcgttagtgaggaatttactgctgtagttcctcataggaggcagggtgcattgggcgccaggtgggtgagccctccatccaaggtcactagggcacgcttacaggacctcgatctggatggctagctgtgcgagttagactgtgacattcccgcctataacaatcaagccacaaaccctgagagggggatgtgtgcctggtcggctgctcatgctaagcaaggggcactgctgcctttgcgcccgtactttaggaaggtggcagacttcttctacccctgtctgaccaaattcactcccaagtgcattaagtatctgtctgccctgtttattctctacgcctcccagaagtgggatatgtcctctccctatgaggttagctagttttttgacttgaagtctacccccaagcaa

SEQ ID NO: 134442 - DNA, 805 bp, Cannabis sativa
attttaattattaaataaattattttggcatttataagattaaaattgaaaaatatggcatttgtgaaataatacataagtggttgagaaaattggcaaataaaatttaattagtgtagggcccactttgtggccaaccattatgtgctatttttgctattattttctcattttttattccatctaattcaatcctaaccttatgtaaattagtataaaaagagaagaatgagaaacaaatgcttttaaaacctagttttcatctgtcagacaactagtgttttgagacttcttcttcttcttttctctattccaatttgaaatcctatagtgttcttcacaataaaatttgagccttagtgattgagtgcatgcgcacccatagcaaagtagtcctcaattatagtgtgtaagattgtaaagaatccaaacaactgaaggagtgtcgggctcagattataattatactctacgatagaaagtatacaagggttatagatctgagcgaaatgggtcatttaatttcgctacaacctatgtaaggtttctcatactttatatgtgtttgatatttatcattttagagattcatatttaggatataaaaaacatagttgttagtaaatctaggtcttggtaaaatatattctaacatcacccaactagggtttcgtacaaaacatgatataatggttggtgctataacaaggcgatcggaccgttggctggtaggaagccttcccatcgtgtggtgtacagatgctgcaaggcaattcgtgggactaaggacatgtgtgtcccaatg

SEQ ID NO: 134443 - DNA, 629 bp, Cannabis sativa
gctaatagcctatagcagcagaataggagtttattagcagcggagtccgtcgctaattaaagtaattgatgtagtgtgaaattgttcttctagctttttttatattttggcaggaattttttctttatcaactaatttgataattgtattagaaggttaaatattataatcccgatggttgtttccaacagttcttcttgttgaaccttggaagtaccctttggccactcgatgggatcttcaagaactctaagtaatttttgttgtgccaatagatattgtatatttctcctccaaatcatgtaatcatcagaaaacaatcaatatcaacttgaatctagtctctcgtataaagaaaaatgaattattattatcttttgaaatgctaaaaacatagatgtccctagggacaaaattagtgtcactataataaggacgtttagttggaggtaatgaaatggaatagaaagaaaagaaaacaatctccattctattccttttgtttggttgtatattaaagtgttggaatgttatttcaatggcatggtcttttcacgattttggtagaataacaattctattttcaaataaaaggaaagaccattccaatgcataatgagaaaaaattt

SEQ ID NO: 134444 - DNA, 542 bp, Cannabis sativa
tcttcgcggattagtaccgaactaatcgcgtattcagacactgtgaggtaaatggataagatttctccaggcattggtttggaaaggattgggggctgccccaaatgtaatttgagggcctgaaaaggctcttcacacttctcagtccactgaaacttcttattgccttttaaaatttgaaaaaattctttgcagttgtcagaggaacatgatataaagcgatttgaagcaacgactttacctaagcataacatgaagtaaataaaactaggatttttgaagcagtgattagtgtcataaaagttaaaacattaatgggaaaaatagctaataatatgattcactatagtatgactcttgtgttgatggaggggggtctgggaaatacgcattggcgtggtcattgaatgagtcagatcttgcttgattgttggtagattatggcccttgaaatcgatttttctgtttacggtttgggcactgacgataattatgggttgaagagcgacaaatgcaacaatatcttgagtttcttgggattt

SEQ ID NO: 134445 - DNA, 1116 bp, Cannabis sativa
ggatgttatcatactcatccactgctccgctttgagtggatcaacaccaccctcaaacactagcgagttttgcttcctgaactgctcgtacaacggctccagacgattacctgcattcggtggcactattagaagtgccagaggatcaagattagggtttggaacaggttgagctcgctgctccctcagttcttagatttgctcgccctgctgtcagatggtctcatgcatcacgacgtataactcttcccagtttggtggtggtggatggttctcgccctcattgccaaccccgagcccagcaagctcacggttacctctatcagaatgcctcgggtgcataatctatacacatgcggtcacattccaagaattgacaatactaataagtatttccaaacatctcaaactttacactctttctaacaactagcataactcagacaaacatacaagcaggtaatcaactaataatctaataattaaaacttactgaatcatgagtcgaacgaatctttgcagccaatgtacatatcaaaccagtcttcaggatctaaaaaccttggcgctctgataccatgttgtaactccctatccaacagggacaccacgtgtgtgtgcttttataaaattctcttttataacttatataattataccaaaagtgtgggtaattaaaattttacatttaagataaacattttatttttataaaagttgaatactaatctttatggggactccctttataacaaaatatttacatttggttccaaaatacttttcaacataaactttatatttcaaaatacaatcaaaagaaacatcttgtccaccgggccgtgacaccgcgactgatatgtacattgctactccgaccccagactcatggctgctcaaccttagccttccctttacctgcaccattcagcacccgtgagtcataaagactcggcaagaaaagtgaataaatcaatataacattcatttaaataatcatatattaataaacttacatttacacattatcgtaatcacacaatcttggtacttcataaagtacccataccactcgttaacctcgacctgtatatgtcactatcgatgcccgataca

SEQ ID NO: 134446 - DNA, 823 bp, Cannabis sativa
ttgatattctcttggcacatatagaaataccaagatatttaaagggaatgttacttcttctaaaactagaaaatatatatcaaccactctttttatctccttctcatccatactagagcagtatattgcaaatttgttattgtttcactgtaatcctgaggtgtttgagaacaacttgagtccctacaacattagacagatgcttttaaagtctcctttgcagaataaaagtacatcatctacaaagctgagatgattgagttccaattcactgcatctttcatggaaagagaaatctttcatgcccccaaccttttcaaaatcctgctcaaatactctatcccaagcacaaaaaataatagagacatcagatcttcttgtctaaggcctcgttttgctttaaagaaaccatgtaaggtgccattaaacattacgaacaagaggtaattgcagcataaatatgtgattttttagatttcatatagttatataccacatgttttttcttctagcgggttatatttatgttactttcatcactaccagtgtgttaatttatattaaaaacagactaatgttaacacgtgtcaacttattagtggtcttactcttattttcaataaaattaattattaaataattctaaaaacaaaaaataactaaataataataaaattagaaaatgacaatacattctaagagaagaagaagaaaacagggagagagatatacttgtaaataatgtttttatttttttattttattaattaaataaaaatcatttattagttatttttttaaaattttaaaattatttaataag

SEQ ID NO: 134447 - DNA, 712 bp, Cannabis sativa
atacaatatatatttctaggtggactctagttattatacacatatatatgcccccaagtaattttaaaaaaatatactttgtaattacttgaacaaattttaattttattcataacaatcattaatcattacagagataaatacaacatttacacattgaattcactagtaataaggtcgtaaatattcactattctattagttctttattagcgagtcgttaagccaagctaatttgtaaaccccggttcctacgatagcttcaataatatatggaccttcccattttaagttaaatattcctgcacctggatctcgtatatttgcaaatacacgtcttaacacaaaatctctaactttaaaaagcatttttcgaactcttttattaaatatcttgttattcggtgctaataggctgcattagttatctgctactcattgagtctttcttcaagtaggtccaaggacaaattcaaaagttcttagttttcctcttgattataaaattcacgcctgtgggtcgcaatgttaacttctattggtaacattgctttcgagtcgaacgctaatgaaaatgaagtgtttcccatcattgttttctctgtagttctatgggcccaaagcacttgtggtagctcgtctacccatcttcctttagcagagtctaacttctttttaatagtatcttttaaggttttattaacaacttcta

SEQ ID NO: 134448 - DNA, 815 bp, Cannabis sativa
  modified_base (451)..(454): a, c, t, g, unknown or other
  modified_base (597)..(602): a, c, t, g, unknown or other
tttatatgtacttatttgatgattgtatgaaaatcatcatgtatgttgtaaaatatttttttatttcgtgctggaaatatttttattggaaagtagacgaaaaattaatgaatttaggcttgtacagaactcaatttgatttttttttatgaattagttatatttcttgaatttggatgaaaatatctgaatttgggtagcacacgcgcgcgcacaagggcatcactcagcttcctcacgcggtttcagaaaacctgaccgaggaaaatcggacacgggttgtctgaaactgtgtcacgctgagttcccttagccattgaggctattgtcttggtcagcttcctcattccgcgcgcgcgcactaaaattgttttcgtcataacttttgattcaaaaatcgtttttcattgacacaaaattcaaatgttggtagaattttgtgtagaatctnnnntttcaattaaaaatctaattatcagaataaaattaattttattaatttttattaattaattaaaattaattttagatattagtaggctttgaatttaaaattttaatttttcctacaaaaatagccttatggttaattttgannnnnngattcttttatttattttaattatatgatcagatgttacttaattttattattaaaattttgaatgatcttattttgatattaaaatattaataatattagaaataatctagtttgaatttcgaaatttgctatatttttgaaatatattttattaaattaaattataagatttgaaaaatgttagttttgacattttatcttattagatatt

SEQ ID NO: 134449 - DNA, 603 bp, Cannabis sativa
  modified_base (58)..(69): a, c, t, g, unknown or other
gtatcaacattaccctcctcaagaatagttataatactaagagaataacattccaagnnnnnnnnnnnnaaacaaacaaggtaatgttttacattatcattctcttgttagaattaacccattccaaacaatgtacggatatattaaggcaattctcatcattttttctagtgttttgatcttgttttgagcttaattatctctttatgagatatttattagttttttttttttttttgttgcaataaagatatttattagttcaagttcgaattttggtagagaagaataaaaaattgacttatatattgtctgttaaattttaatagaagaaaagaacactaaaaaaaaaaaaatattggttttctagaagtttatttattttagaaaaaaaaatattggttttttatttttgtcctaaaaaatattggttttttttttctacatttttacaaaatttcacataaaaactcatatggtaacttacgtagcaatttaatcgcaaccaaaattcgtatataacaatccacatagaaagtaccagagaaactagaaactcaaattgtaaaggctaattagcaatttttcccccgaactttgaca

SEQ ID NO: 134450 - DNA, 936 bp, Cannabis sativa
attatattaaatatgtaatcatgttgcattggtgttagccaataaatcattttgattaatttagaagtgaattaaaagaaattgatcagttactaagtacctcatcttatttcattgtcaatatgttttgttgacttcataaaatattaattaagattaattttatttttaaattaaatttaattacaattactaattagttttagcaattgatgatcactcaatttttttttaataattaatgttttaagcatataaattattgagatattttacaacaaaattctctaataatttagaattgttactctttattacttcaaaaattaagtcaataatctcaaacgctaataatttcttagaaattaatttaccatatttaccatatgtaatagaattttttgtttaacgacactttttgaatttctacgttaactttaacataatatcctattaatattctttattaattttgtaatattattatatatatttaaaaataaaaaatatatataaatatttttttaaaaaaattaactttaatttaaaatacttaaaatattataaaaattattaatcatatttttaaatttattggtttaacattgaattaaaattaaaaattatgtaaatattttatataaaaaacattaaaatttaaaatattataaatatttttaaccacttttaactttattattattttattttatattttaaatttaaaaagttgtactaaagaattaattgcgttccattttagttatggtaaaccgattcacacatcatatttttcataaagtttgggaatgaaaaacctttatatcaaatttacgaatcttgtctatacataaacacactcaaatttgattatgtgagttttggttaagaatacagtaaattacaatatatgcattatcagatacgttacctaat

SEQ ID NO: 134451 - DNA, 554 bp, Cannabis sativa
tgtcatttaacaaaacacatagtccaatctgtaacttttgcaaaacatagagtccaaaatggtatttacccttaaaataataaataaaaatgtgcttattggccgatcgttagtgatttggttcttgatgggtttcgtttggattttggattaatgtttagggatttcttttgattaattgcaattacgcctaattgtgttgattaactgcggcctttcatcgttatgggtttggaatattatttttttttatctctccttttgtttgtcagttcaaatttctttctgcctccattattttattcttttattttttactattattaggttaattcctattagtatttttatggagttagaatttttagttttatgtgttgaaattaattaggttttcccattagtcttgtcttttgacatggttctatagtttttctcattggtttggtttattggttttctggcgttagttactggttcttactggttctgggttctgggttcgttcgggtgtccatggcgtcgagtagttatcagcgaatggaggcagcgga

SEQ ID NO: 134452 - DNA, 957 bp, Cannabis sativa
taactaaaagtaaaaaaaaaaaatggaagtgtaaatgtctttctctttcgaataaagatcttctattaaaagattgtgttttatagtgaattaaacaattctcattgtgccacatcaattaatttgaacatttttagaaaaaaaaaactgtatatatagatggttaatttcttaataaataaaaaattaattgacgtgtgagttaaaaattagtagctggttttggaaaaaattagtaggagttaaaaatcaggagaaggctaaggtggatcggcatacctttagcatgcagaaattcagcatatcaaatacatatcaattgttgtttaacaggccggagaagaaggactggtgcaaacatgtgtgggatagacttgttattcccaaacacaagtttatcttatggcttgtcttgtgggatagattgaagacaaaggataaagtacgcaaatatgatacacatgtagacttaacctgtttgctttgtgggaagggtgatgaatcggtccagcacttattttttcaatgtgaatatagtagcaagttccttgccgaatggaagatgagattgaaatgaggtgcgaaagcaactgagttgcagaagctgctgcaactcatcagcaagtttaagggaatttcagcaacaaggagaagcatgatgttaactatgttggctgccttgatatgccagatctggggtccacgtaatgatgtgctgtggaatcaaaaacaatagcaaatcaggacaattgtgaatcgggtacagcaggaaagcaagaggagaattgtaggggtttggccaagcaaaacaaaggagatggacaagaattgggtgctgaatttataatttgtaaaaagattttgatttatagcagtaaaaagccgattatgtacaaaaacttgagatgtaattgatagtttgagcaatacaagatttccttattcataaaaaaaaaa

SEQ ID NO: 134453 - DNA, 574 bp, Cannabis sativa
gaacataattttttgaagaaattacataactgagtaatagtagttgtggtataactttgtaaaaatttacaaacactaataaaaatcactccctgcatgatgacatgacaatcatggaattttcatctaagaatatttgactcgtctggagaaactttgctttttaaatttgaacagaagtcatctagaaacttgattccttaacaaattgacagaatagttttcttttttcaaaagtcaaacataagaagcatgaggtttcatcaaccttctgtttacatcttcataaatctacaactttcccctcacgcctatctttttcaaattatgtcttgcattagtggtatccttagatttatcattatctaaaatggtgtcaaggagactgccacacacattcttctcaatatgcatgatacttatattgtgctttaaaatatttgtgctccaatactcgagcccatagaaaacactcttacaaaaaaaaaaattaagaacactcctcctactgatttatgaataatttgcatattttaataaggttgatgtcttgttatttttctattaatttata

SEQ ID NO: 134454 - DNA, 551 bp, Cannabis sativa
attaattttcaattttccttatttacacttgaaaaaataataaattaaatatacatattttattcggtgagctaaatattaataatgacatacttttaaataatttaaaatatttttttaatcattaaaaataatatatttacaattttaaatatcatttaaccaatttaatatttttttctataaattatataaattaataaccacatgaacaattgttgtaataattgatagataaaatttaattatgattattttaattttttatgtataatttttggaaacttatacaacatacttaaaaacatactttacttttgacatttctataattgtttttatatatatttttacggattttatttttcttttatttatatttttaaggattttgtttttttttttatagaaaataatgttgttctaaaaataacgttgttcgttgttttgaaacaacaaattaactacactgtattgatgtaaaaaaattacattatttttccatagcagtaacgtcaaaataacattgtttcaaaaaaaaaaaaaaaaaa

SEQ ID NO: 134455 - DNA, 723 bp, Cannabis sativa
gcccaacttctaaattactcacgcaatcatattgatttggtagtaagcatttctggtatggcatcgtggcgtctctctggtttgtatggcgagccaaatcaaaagctcaggcaccgtacttggaacctccttcgtgctatggcgactgaatcgaacctcccctagtacattattggagatttcaataatatccttagcaatgacaataataaaggtggtcgtccttacccttcttcattaatctctggttttcagtctgctgtccatgactgtcaacttattgatttagagctaaggggttatccttatacttgggaaagaagtagaggaaccaaccgtgcagtcgaaattcgccttgatagagctatggccacacaaagttggctcgatatttataatgaggtatctctaactaatcttgagttttcatcatctgaccattcgcctatatttttgcttcctgaaactgttactggtactacttttgctgctcccttccgttatgaaaatgcatggcttaaagagcctttatgtcatcagattgtgtccaatgtctggtgctcaaaccagacggagaacattatgaaaaaaattgagctatgtggcattcaattggctgattagggtcgacatttaactgaaaattttaagtcacggctgtcaaaaagcaagaagcttcttgcaaaattcaaaaactttgttaatgactttgatgcagaaaac

SEQ ID NO: 134456 - DNA, 583 bp, Cannabis sativa
attatttaaaaatgattttttttctttttctttttctttcttttcttcttcttcgtctgtcttcttcatcttcttcatctccactgtaaaactgattcaccttaacctactcccatcttgtcatcttcttcttcgtctatcttcttcatctttacggtatataattttgaataggtgtataatttttttattaatggcagcagtggaaccaaacagagacccggcagtggaggaagacccaaagagggatggagtagacccaggcacggagcaaggggtcctaaagagaggtgctgaagagggagaagaagatacgaagccaaacagagacaaagcggggcgctagggtttacttaagagagaggagaagatcagaaagaagaggcggtgagagcggaggatccaaatgaaaatggagagtttgatgagaatgaggaagaagaagaagggtttgagaatgagaaacccgaacacgattgtgtagcggcggcatgggcaaaggagccgaaagagaagcctgatatttgtggattcgtggatacatttgtggttttgaaaaggagattttagggttttttttaca

SEQ ID NO: 134457 - DNA, 691 bp, Cannabis sativa
ctcttgtgccttttaatagcattgagacactcaaaaccaatcattgtgttatctattatcaagcgtcccaggataaacgcactttgctcctccgaaataacatcccctgatactcccccaatcgattagtaatcatcttagcaataatttattaaaataaaaaaataaataaattgtaactttaatataattatagataataaattgttttgagttattatttattatattgataaaaaaaaattattttattgttattttactaaaaaattatgaaagccaaagagtgattatattatttaatcaattaatatatcaatatatataaatgagaggaatgagacgatgatatataatagtctcatattagtttaaatatgtttatatattctgtttttatttctctcattttttaatatttttattcaattattttaaattaatataataaattattaattagtcacataactatatcttattaatagtatatgttggtactttacagtataatttatatacactacaaaaaatcttatttttagtcataacaaaatttgtgactaaaagtaaaaagtttgtgactaatataaactactattattcatatgttgtgattaaaaggtccatgactaaaggtattagtcacaaaaattacaattttttatgactaaatatatttttagtcaca

SEQ ID NO: 134458 - DNA, 820 bp, Cannabis sativa
  modified_base (320)..(320): a, c, t, g, unknown or other
gattcctagtttgagtctcggtccgggtctgggtctaagtccgagtcccagtcccgatccgagtccgcgttcgggttagggtttacgtctcgggttctggtccaggtcccgatccgggtcggggtctgggtccaggtccgggtttcgggtcctagtccaagtcctaggtttgtgtctggatcagggttcaaatctgagtctgggtcccacgttcgggtttgggtcaaagattggtgttgtaataccctaagattaagagaatggattagaaaaccctgactagttaactgtgtatgattgtggaattatattattatatnatttattatatgtgaattaatatttgataaatggcatgttcagaccccgttggtgagccagggacattttcgtaattttgacccgagaagagtaaaattgtaattttaatattatgacgtgcttatggactatattattatatagtatccttgttgtgtcctttttgcaggtattttttgacaagtgggcatggtatagtcacaataaggtatttcgagccgaactgggttcagggccgaaatatattttcaggattttatattggcattttcttgatttatgaatattctaaaaataatttaagtattgtgtgtgattgttaatgacaatattacccttgtgtcatgcttatgttatatttaagccctagagcattttggtcttttgaccatttcattaattatcaacaaagggaatttttacaaaatgagaaaaccaattttctagttttatagcacaccaccgacccctccctctctctatttctcatcttttcaaa

SEQ ID NO: 134459 - DNA, 890 bp, Cannabis sativa
gtttgaagtttttgggtttagggccaagtttcacaaagctttgaataagcaaggtgaaaggcagacaatgtgcgataaaaggctaaacgtcatcaaccacgaaacttcacagatcattacaaagaaaatcacaaagttttaaacctagattttctacttatcctctacaacaaagtaaggaacgcatgtatggaacccagaaattaagcatgcaaagtaaaagaagaaaaaattgaaaacatactcactgctcgacgtctgagtttgattcaaattaagttgctcggatactttgggtagaaatctcacggtagacctaaagcgaaaacttcttttttgctctaagcttgcttagtagagaaggtggtaaaagtgaattcgtgaaggatgttcatccctatttataagcagaaaaattaaaaagggtaatcattttgaacgccttagacgcctcgattccccctaaaaagaaaatatcgggaatcaaatataagcaagtgtattcatcaaaatgtggttagagaaaaccgggttttgaagcaataattgcgtcagagcactaattagccgaaaattgaagagacgcctggtcaccctcacattgaatcgcgaacagacgcgcctgacacgtgtcacctatccaaacgcaagaacagctcagatgaagtctacacgcaacttcagaagtcccatacagacttggggggaaaatagtatcccaagttttgcactcagacgtggcatcacacgatggtgacatgtggaatcaactccacgtacctgctcgtaagaaatatttcgagcagggcaccacatacattcgttcggacgaaaccctcttagccgggcagtgagcaatccgcgcagcacgccaacacttagcaaattca

SEQ ID NO: 134460 - DNA, 521 bp, Cannabis sativa
ttggtattagaactttttccaacataaaatgaaaatgtaacgccctgactctcagggacgccacgtgtatgcttttaaaaacttattatcactaatctataaatgtttggaaaaaatgtggtttaatttaaatcttgatataaattcaaaataaagactttcatttaaaatattgtcgtaatatagggatcccctgtttataaaataaaaatattcttttacaataaattacatttccaaacatagaaaggaattcgatcctgcttcccaaaagccaagaccccacggctgatatgtacattgctgggagacctttgactcatggccgaacacagcttctaacttccttacatgcgtcacgaagcacccgtgagtcacaatgactcaacaagaaaagctactaagtagacattatttaaagtacaggcagatttcataataatataacatacataccggtaggtcttacatatgtcaatctacatatacaaaaataacataacgcttatgtaagcacactt

SEQ ID NO: 134461 - DNA, 2099 bp, Cannabis sativa
  modified_base (46)..(64): a, c, t, g, unknown or other
ttcttaatcgtaaaatacttgcacaaatagctatattaaataggannnnnnnnnnnnnnnnnnncaatgagatcttaaaagaaggaaattgaacgaaatccattggaatattttaaacggagttctctggcgaatgaactccaggaaggtagagtagaaattagtatgataaaaaaaaataggatagaatttgataaagtcatcacactgaacaaatacgttcaataaaaaaagatttattcttcttccccaattcttttttttcttacgacactacaatcaaatcttaattttgatattgtttgaacaaaacgtcaattcgcatttgagttcggattggtttttttttgattcaattgaaattgaagagaaagcctatttatttttagttctaagaccggtaggtctaggagtcgactcgcttctttcaaattgtttctcattattaagaaaaggtaacgaagataaaatacgagcttgttttatagcaatagtaattaatcgttgttgttttaaggtcaatctattcacccgtctagataatatctttccctgttcactaataaatcgactaattaaactcatgtttctataatcaattcgatcccccgattgtatcgagggcaaacgcctacgaaaagatcgcttggatttaaaaaagattcgcttggatttatccatgatttttttattccttgtcccgaaaatattaattctattttgatcggatcaaaaatgatttcaaattaagaaatagaatttttttgtttatatttaaataaatataggatccgttggatatgatataattgttgttatatataatatgtaattattgttattatagaatatgtctttttcgtcttccttggaatgtaaggcggacacgcgagcgatcggttcgatctatttctttatctccccgtgaatcgtatgtttgtaacaagaaggacagaattttcgcaattccaatcgactaggcgtattatgtcgatttttttgagtaatatatcgggaaatgcctattgattccttattcacgcggtttcgaacacaactggtacattccaaaataatcgttactcgggcatctttacccctagccatgaacctcctttgggtttttgattgattcaactcttctatttttctattttccaatccgaagcgaagaagaagaaaggaaggaaaaaaatagaagttgctaacttgaaatccaattattaaagatttcgttgcaatcaatatagtaataataagtaatataaaaatttctacttaaatatttaatttagtatttagaatttataatcgctgtacaatattgaagttttttgtatgatattgttgccacagctagtccattttctttctcattctattattaattaaatattaattaaatttttagcctggaaacccaagttcttagtttcacgcgggtcaatccgcttttattctttttcgaatttattttgaattctaaaaattaagataagaagagaaggggagggattagtcacaaatttttgattgtatctctaatttaattttcgtcaccccttcccaattactatcattaaaaaaaggggaatatcaacgcatccggaaataaacgattgatctctatcaataatcctgctaaagacccaaaccatatagtacttactaccggtgccacggaaagatatgtttttagatctcgcatttaaaatcctccttctttttattcgttattgtaattttaatacaatttgtaatacataatgctaatacatatagaaacagatgcgtatatgtagttaatgactgacacttgtatttctacgcagaatccctaagacaaattggaatatacaacttgaaatgtacaatgatttaatagatattcattagttttttcttaaaacaacaaatacgtccctttctgtttgagaattcccccaaaatattcatttttttacgatgggtttcatattatatttatttagtacgtatataagtctattattattatatgatatgagcctaaaaaagaaaaaatgacaagataattgaattttgtatttcaataaaagaaataaaagatcggaagagcg

SEQ ID NO: 134462 - DNA, 1212 bp, Cannabis sativa
gctacataccaaagagtggtaaacaagatgtttaaagaccagatcggacgaacatggaagtatatgtggaggacatgctcatcaaatctaggaaggcttgggggcacgcagatgacatggacgaatgcttcaaagtcatcagaaaatataacatgaaactcaatcccttaaagtgctcctttagagttagcttgggtaagtttctaggctttattgtcaacgcccgaggaattgaagccaatcgaaagaagattcaagccatcctggatatgaaatcaccaataaaaaccaaggaagtacaaagcttaactggtcggatcgccgctctcagaagatttgtttcaaaatcaacaaagaagtttgttccattcttcaacattctacgaggaaacaagaaatttggaacctctgtgagtgcaaaacctgctgtactcgcaaaacgtcttgtactcttgaaacctctggacggagaagagcttgggatatacttggctgtcacggagcttgttgtgagtgttgtactgatcagagaggaagacaatgtacaacatccggtctattacattagtacaagactcattgaggctgaaggccgatacccattgatagagaaactcacttactgcctgattctagcaacaagaaagataaagccctattttcaagctcatcatgttcgggtgcacactaaccaaccgttacgcaagatattacaaaagccggatgcttcttgacagttactcaagtgggcagtagaactgggtcagtatgaaattactttctgaccccgaacaacaatcaaaggccaggccttagcagatttcgttgtagaatgcgcaggcaaggaagaaagcatatttgaaagcaacgctgagccagtacaaatacctcagccaagtaacagtgaagacaagccgacttggaaactagatgtggatgggtcggatacagattaattatgcagtgtaggaatcgctcttgtcacacctgggggtaacacttgcccgctgcagtaaactttggatttaaagcatccaataacgaggcagaatatgaagttttgatcactggtttaaaactaggctgggagatgaaggctggacatattgaaatttgtagtgattcaaaggtggtggtaaatcacgtatgtggagaatacgagcctcggggagaaaagatgatagcatatttgagcaaaatacacgatctgct

SEQ ID NO: 134463 - DNA, 510 bp, Cannabis sativa
  modified_base (443)..(461): a, c, t, g, unknown or other
tatttttgaaaaaaattccgtgtgagtatttttgtaaaagttaactaaaattccagtatttttgtaagtttccctataaaaataaaggtagttaaaacaaataaaataaagtatgtatacaatgtaatttcctttaattttacgttgtaatgttttcataaataccaaaaaataataaaaaatttaaaaatattaatttatagttctcttaacatttttacagatttgaactttttttattttacaaaaatacacataattgtcttttacgatacactatgctatgttgttgcaaggtggaaacaatattattttatgtaaaaatgtaactataaaaatttatataaaaaatctgtaaaaatgttgtattttgtgtagaaatcacaacaagataattttcactcttgtacatgtctttatccagtggcggacccagaatttannnnnnnnnnnnnnnnnnnaattttaaaaagaaaatataaagtgtagttagtgaggtttgaaccttta

SEQ ID NO: 134464 - DNA, 581 bp, Cannabis sativa
aaccaagttgttgcatcaatggttatggtgatctcgtagccgatcaatctagtactctcgcatattctgatcaatcatatatgctttgataatcttcaactatcaacacctaaacgattttttttttttccaaaaccaatgggtgttaaggataggtttcttccactagctagtagggccatcaaattcttagagaatcttccatgtccattcggacaattaaagcacttacagtggatactttatcatattcttataaatcctccatactttcgtggccatttcattgttccatataacctggttgttgcatcattgtttatggtgatctcgtagccgataaatctactattgtcgcatattatgatcaatcatccatgctttgttatcgtgagcatgaacaccttatgttgggcttaacaactatcaatacctaaacgatttttatatcaaaaaccatgggtgataaggataggttttttacacaagctagtagggccaacaaattcttagagaaccttccatgtccattcggacaatgaaagcccctacagtgcatacttttccatattctgatcaat

SEQ ID NO: 134465 - DNA, 6997 bp, Cannabis sativa
gtatatgtaaaccccataacataacttattacacaaatattatctaatccggtatcttatctgtatatgagtctataggtaattttcagtaaattctcgcgcttcacttcaatttttacaatttttctggaatagattgaatatataaacgagaaattttgataaagcctggcaggtgctgttccgaataaagctgtaatagaaaagagggggcttatatatagtatagatagctatagttatatctgcttttttgacttacacattatttatacatttcatatcttctacgaattcgactaaaaaaaatgtgaaaaaatgtttctcttctctgtaaattcttttttgaacaattgaagaaaacgttaagtgctaaaaaaagaaattctatgttgtttctgattattatgtctttatcttattatctcattgaacagatcaaatcctgaatacatttctggtattcaattggaatttggaatacggaatatcataataatggtagaaattgaatcactttttgttttgattgatattctatacaaaactccctaagtctaagtggaatttatcaccccctttccgtttgtatctgttgcaaattccgatttgagaataaaattctctttattcctccgttcatacgtattgctccatctatttatattatatggagttaagtaaaatttcatgtgattcagtaataaacagaatagaaattccatcattgctatatcgatctatcttatttgatgaagaatgggaaaataatgggatttttttctataaatataaacgggaaataaaaaaaaatgcttggggatggaaatgggaaaatgtctacaatacccggatttaatcagatacaatttgaagggttttgtaggttcattgatcagggcttaacagaagaactttataagtttccaaaaatggaagatacagatcaagaaattgaattccaattatttgtggaaacatatcaattggcagaaccgttgataaaagaaagagatgctgtatatgaatcactcacatattcttctgaattatatgtatctgccggattaatttggaaaaccagtagggatatgcaagaacaaactatttttattggaaacattcctctaatgaattccctgggaacttctatagtaaatggaatatacagaattgtgatcaatcaaatattgcaaagccctggtatctattaccggtcagaattggaccataacggaatttcggtctataccggcaccataatatcagattggggaggaagattagaattagagattgatagaaaagcaaggatatgggctcgtgtgagtaggaaacagaaaatatctattctagttctatcatcggctatgggctcaaatctaagagaaattctagagaatgtttgttaccctgaaattttcttgtctttcctgaatgataaggagaaaaaaaaaattaagtcaaaagaaaatgccattttggagttttatcaacaatttgcttgtgtaggcggagatccggtattttctgaatccttatgtaaggaattacaaaagaaattctttcaacaaagatgtgaattaggaagaattggtcgacgaaatatgaaccgtagactgaatcttgatatacctcagaacaatacatttttgttaccacgagatatattggcagcagcggatcatttgattggaatgaaattcggaatgggtatacttgacgatatgaatcatttgaaaaataaacgtattcgttctgtagcggatcttttacaagatcaattcggattggccctggttcgtttagaaaatatggttagaggaactatgagtggggcaattaggcataaattgataccgacccctcagaatttggtaacttcaactacattaacaacaacttttgaatcttttttcggattacacccattatctcaagttttggatcgaactaatccattgacacaaatagttcatgggagaaaattgagttatctgggccctggaggattgacaggacgaactgctagttttcggatacgcgatatccaccctagtcactacggacgcatttgtcctattgatacgtccgaaggaattaatgttggacttattggatccttatcaattcatgcgaggattggtccttggggatctctagaaagtccgttttatgaaatctctgagagatcaaaaaaagtacggatgctttatttatcaccaagtcgagatgaatactatatggtagcggcaggaaattctttggcactgaatcgaggtagtcaggaagaacaggttgttccggctcgataccgtcaagaattcctgactattgaatgggaacaggttcatcttcgaaatatttttcccttccaatatttttctattggagcttccctcattccttttatcgagcataatgatgcgaatcgtgctttaatgagttctaatatgcaacgtcaagcagttcctctttctcgatcggaaaagtgcattgttggaactgggttggaatcccaggtggctctagattcaggagttcccgctatagccgaacatgagggaaagatcgtttataccgatactgacaagatcattttatcgggcaatggagatactttaagcattccattagttagatatcaacgttccaacaaaaatacttgtatgcatcaaaaaccccaagttgcgcgaggtaaatgtattaaaaaggggcagattttagcagacggtgctgcgacagttggcggcgaactatctttgggaaaaaatgtattagtagcttatatgccatgggaggggtacaattttgaggatgcagtactcattaatgagcgtttggtatatggggatatttatacttcttttcatatacggaaatatgaaattcaaactcatgtgacaagccacgggcctgaaagaatcactaatgaaataccacatctagaagctcatttactccgaaatttagacaaaaaaggcgttgtgatgttggggtcttgggtggagacgggcgatattttagtaggtaaattaacgcctcagatggcgaaagaatcatcgtatgctccggaagatagattattacgagccatacttggcattcagatatccacttcaaaggaaacttgtctaaaactacctataggtagtagaggtcgagttattgatgtgagatggatccagaaaaaagggggttctagttataatccagaaacgattcgtgtatatatttcacaaaaacgtgaaatcaaagtgggtgataaagtagctggaagacatggaaataaaggtatcgtttcaaaaattttacccagacaagatatgccttatttgcaagatggaagacctgttgatatggtcttcaacccattaggagtcccttcacgaatgaatgtaggacagatatttgaatgctcgctcgggttagcgggggagttgctagatagacattatcgaatagcaccctttgatgagagatatgaacaagaggcttcgagaaaactagtcttttctgaattatatgaagccagtaagcaaacagcgaatccatgggtatttgaacccgagtatccgggcaaaagtagaatatttgatggaagaacgggggatccttttgagcaacctgttataataggaaaaccatatatcttgaaattaattcatcaagttgatgataaaatacatggacgttgcagtggacattatgcacttgttacacaacaaccccttagaggaagggccaagcaagggggacaacgggtaggagaaatggaagtttgggctctagaaggatttggtgttgctcatattttacaagagatgcttacttataaatcggatcatattagagctcgccaagaagtacttggtactacgatcatcggaggaccaatacctaaacccgaggatgctccagaatcttttcgattacttgttcgagaactacgatccttggctctggaattgaatcatttccttgtatctgagaagaacttccagattaataggaaggacgcttaatcggaaggaatcagaatttttcttctatgatcgatcggtataaacatcaacaacttcgaattggatcagtttctcctcaacaaataagtgcttgggccaaaaaaatcctacctaatggagaaataattggagaggtgacaaaaccctacacttttcattacaaaaccaataaacctgaaaaagatggcttattttgtgaaagaatttttgggcctataaaaagtgggatttgtgcttgtggaaattatcgagtaattggaaatgacaaagaagacccgaaattttgtgaacaatgcggagtcgagtttgttgattctcgaatacgaagatatcaaatgggttacatcaaattggcatgcccagtaacccatgtgtggtatttgaaacgtcttcctagttatatcgcaaatcttttagataagccgcttaaagaattagaaggcctggtatactgcgatgtgtgatttgataaaaattatgttacaaatgcagaatgagaaactgtcatcccattcaatcgaattaggatgtcccatatttgacatgtctcttgttaaaagtaacatgaaactcagaattataggtgtgttcaatactcctaagtaaaaagggaaataggtctatggtcaattaagtaacaaataaatcaattttatagttatacctcgtgaaaaaaaagacttatttctttatgttatgtgtaattaaccattccttttcgtttagaaagaaatgaaattatgtttctgtccaaataagcaaatatgtcatggttgtcggagtttattcatcgcatataggctttaaggacgtcgtgacataaccgtcgaggcgaagtagggacctaaaagattgaatggaaagatacatagacaagtaaatctcttatgaattgaattgaattctaaggcatttctttactttaattaagtttaaaaaaagttaaggaggggattcatcattcgaagggaagtagactactcaagaatttcacatttcatttctttttttattgaatgagtaattcaataaaaaaagaattcagaaaatctaataaaaagccactaaaaaaaaataaaaaaaagaagaatgaatcaatgaaatgttgcttgatcttctttaggaacttgagtaaggagtagattattgggggttttatagaatttgaaagtgaaaaccccctttttagctttatttagtgtaactacttgagccggatgaaaggaaactttcacgtccgattttgaaagggggagatcctataggatcctatccgaatttttcttttgctaggcccatagctaaaaaacctactttcttacgattacgaggttcattcgaatatgaaatccaatcctggaaatatagcattccccttttttttactactcatggcttcgatgcgtttcgaaatcgagaaatttctactggagcgggtgctatcagagaacaactagccgatctggatttgggaattattatcgattattcgttagcagaatggaaagaattaggggaagaagggcccacgggtaatgaatgggaagatcgaaaagttggaagaagaaaggattttttggttagacgcatagaattagctaagcattttattcgaacaaatatagaaccagaatggatggttttatgtctattaccggttcttcctcccgagttgagaccaatcattcaaatagatggcggtaaactaatgagttcggatattaatgaactctatagaagagttatctatcggaacaatactcttatcgatttattaacaacaagtagatctacgccaggggaattagtaatgtgtcaggagaaattggtacaagaagctgtggatacccttcttgataatggaatccgcggacaaccaatgcgagacggtcataataaggtttacaagtcgttttcggatgtaattgaaggcaaagagggaagatttcgtgagactctacttggtaaacgagttgattattcggggcgttctgtcattgtcgtaggtccttcactttcattacatcgatgtggattgccgcgcgagatagcaatagaacttttccagacatttgtaattcgtggtttaattagacaacattttgcttcgaacataggagttgctaagagtaaaattcgagaaaaagagccggttgtatgggaaatacttcaggaagttatgcaagggcatcccgtattgctgaatagggcgcccactctacatagattaggcatacaggccttccaacccattttagtagaaggacatgctatttgtttacatccattagtttgtaagggattcaatgcagactttgatggggatcaaatggctgttcatgtacctttatctttagaagctcaagcagaggctcgtttacttatgttttctcatacaaatctgttgtctccagctattggggatcccatttccgtaccaactcaagatatgcttattgggctctatgtattaacgagcggtaatcgccgaggtatttgtgcaaataggtataatccctctaatcacagaaattatcaaaatgaaagaattggcgataatacctataaatatataaaagaacccttttttggtaattcctacgctgcaattggagcttatcggcagaaaagaatccatttagatagtcctttgtggctccggtggcgactcgatcaacgcgttcttacttcaagagaagctcccatcgaagttcactatgaatctttaggtacctatcatgagatttatggacatttactaatagtaagaagtataaaaaaagaaattctttgtatatatgttcgaactactgttggtcatatttctctttatcgcgaaatcgaagaagctatacaagggttttgccgggcctgctcatacggtacctaatcatatggtatccaagctaagtagttctctgaatccagtgtgaattcgagtccctccggttcaacaaagaacataattcctg

SEQ ID NO: 134466 - DNA, 773 bp, Cannabis sativa
caatcttattagatttctgataacgtttcagggccttttctcttatgaatttttcgtccttttttcagtgtaacctgctcctatttatagttacataggagggcagttaattaaaaatcagattaatattttacaaccacaatcccctaaaatcgtggggtttgattacataccatgtaaaatgaagctaatatctagatatcacacaactgtgattgatccgcttttactgagtcaattaaatgtgtaatagatatgttgtaaatcgtattgtctgggacgtctcgataggaacatagcaacaataatcctagtagcgagctagagcttttccccacatctatgaggttgataatgtaaatcttgttgcttctatgctggagacataacgctccatctgacaatcacagctcttggtgacaaggtgaacttcaacagtcaacattatttgaatttcagctcctatctaagagaactgactcgacggaactatgaatcttactaaaagatgtctaaggctgattagtgagaataccacgagtgcgccttcctatagtgagatgaacagctcgctattagttgtatgtgcttatgcgactatcttaccgtgtaatatacgttaagtatctcattagtcgttatatatcgtcttctaatgcgtaacaaggttgatacctcgccttgtacacttgaagttacatggtttttcgttaatgcgcgaggcaacagtttgtatatctttatctcgaataagactattcagtcaactgagt

SEQ ID NO: 134467 - DNA, 4491 bp, Cannabis sativa
ttggtggatctctctctcatttacatttaataaatgtctggaatcttgggttaataagtggtggaatactaggccctccgaaatttttttgaatgatattcaagaaaagaatattctcaaaaaattcatagaattaaaagaactctccttcttcgacgaaatgataaaggaatacccggaaaggcagttacaaaagtttcacgtcggagtctacaaagaaatgatccaattgatcaagatggacaatgaagatcgtatccatacgattttacatttctcaacaaatctaatttctttacttattctaagtgtttattctattctaggtaatgaagaacttatttttcttaactcttgtcttcaagaattcctatataatttaagtgacacaataaaagttttttctattcttttattaactgatttatgtataggattccattcgccccatggttgggaactaatgattggctctatctacaaagattttggatttgctcataatgaacaaattatatccggtcttgtttctacttttccagttattttagatacaatttttaaatattggatctttcgttatttaaatcgcgtatctccgtcacttgtagtgatttatcattcaatgaatgattgaaaaaggatcgaccgatcaaattatatataatgtttgttactttgtacattagcaaaacagtcaaaattgtacttattctttctacccacccgggagattccttcaatattccagtaacattatttcagtaaatctaaatagcagaatcatagataggaaactatactagtgacttatctaattttattgtagaaattttcgggataaatgattggactatgcaaactagaaataccttttcttggataaaggaagagattattcgattcatttccgtatcactattaatatatataataaccagggcacccatttcaaatgcatatcccatttttgcccaacagggttatgaaaatccacgagaagcgacaggccgtattgtatgtgccaattgtcatttagctaacaagcccgtagatatcgaggttccacaagcggtactgcctgatactgtatttgaagcagttgttcgaattccttatgatctgcaactgaaacaagttcttgctaatggtaaaaaaggaggcttgaatgtgggtgctgttcttattttacctgaggggtttgaattagcccctcccgaccgtatttcgcccgagattaaagaaaagatgggaaatctgtcttttcagagctatcgccccactaaaaaaaatattcttgtgataggtcccgttcctggtcaaaaatatagtgaaatcacctttcctattctttccccggaccccactactaagaaagacgttcatttcttaaaatatcccatatatgtaggcgggaacagaggaaggggtcagatttatcccgacgggagcaagagtaacaataatgtttataacgctacagcggcgggtatagtaagcaaaatcatacgaaaagaaaaagggggatacgaaataaccatagtggaggcatctgatggacgtcaagtggttgatattattcctccaggccccgaacttcttgtttcagagggcgaatccatcaaactggatcaaccattaacgagtaatcctaatgtgggtggatttggtcaaggggatgcggaaatagtacttcaagatccattacgtgtacaaggccttttgctcttcttggcatcggttattttggcacaaatctttttggttcttaaaaagaaacagtttgaaaaggttcaattgtccgaaatgaatttctagatccacagattttcaataccaagctctaaaaagaaccccgatttttgttggaaaatttgttatggaattctatcaaaaaaattctgaaaagtctttaggcttttttattttagttttctatcttatatcatacattacattttttgagaattacttgtaacgcattactagttatagtatgtatactgtgaagaagactatttgactttacttatttatttctttgttttttcaatcaaaaccgaagcggtatgattatgtcactattgtccgatttcaatgccatgccatttaaaattccatcgaatgaatcaatagttttctattctaatagatatagaatgctatttaactcaatttaactcaacactaaccataagataaataagcagaaaatagaaaccaaagtatcaaaaaaatgaatgagaggaagaaagcattctaattcgaaaagggattagttgtattcctaatctttgacacaagaaaaggaattttccacaaccctttcttgtgtcgaaataataatcatccttgatcccgttcgttaaagattcctattcgtctcgtagtttctatttttttctaggtttatcataacccttcttttagatttattccataaataaagtatggacggatactatcgaggaacagatgttctgaatcaagtaatttaagttaattttctaaaaatatcataaaaaacgaaactggagttttttgaaacatccgaaaaaaatcctttttttgttatcatttagatttagacgaataaaatattatgattattaagagctcaacgggacctaccccctctttctttgtcttcttcgagggggattccgttgagttcttacgctttcatgtcctgtctacaactcagtttacccaattactaaagggatgaacctaatccagaatatgaaccataaaagaaaataccgagtaaaccgatcacaagaataccagctacagtacctattatccaaagaggaatccttccagtagtatcagccatttgtcctactttcctccacatttcatcaggtggtcgtgctagagacataaacagccatagataattatgagatgatatccttccgaatgggataagagaattcctactattatttcctattcttctttttttaattgaagaaataattggaaaataaaacagcaagtacaaaaatgagtaataacccccagtagagactggtacgattcaattcaacattttgttcgttcgggtttgattgtgtcgtagctctatgattcggattaggtttatcgttggatgaactgcattgctgatattgaccccaaaaaagaaacggtaggtacagctagtccgtgaacagctaaccatcgcacagtaaaaattggataggttctatctatagtcatttgtgcctcctaaaaagatctactaaattcatcgagttgttccaaagaatcaaagcggcctgttattaatggaactccttgtcggctctctgtaaaatactcgtttggacggggacttccaaatacatcgtaagctaaacccgtgctgacgaataaccaacccgcaatgaatagggaaggtatagtaatgctatgaatgacccagtatcgaatactggtaataatatcagcaaaagaacgttctcctgtgcttccagacatcttaagctccgcatattcttgtacagtcaaaggggggtcgactccgtaaaagatgaaatcagtaaacagaaattcactgaaatcagatctttgtgagatcgtcaatagtgtaccaagggtttctttagagtataccgaatcagtatagctatccttcttctgacacagcaacgaaatttcccaatcaggatcgaaacgaagtgttagataatttcttttttcttgttgcgtgtacatgtagaatttgtactattcaactattcaatagagtctttctcaaattcctgtatcattacaattcctgcagtaactgtagtagtgcttgtaatataataatctaaaggttttctcaatttctctattattagcttcggactcgaaactgaggatgaggtaaaaatactagatagtattagtattcaaggaaagaaaacaacgaataaataaaataaataataatcaatattcgtgatgcacagagtgttgttgtattagacccaaagaaaagggtctttcttgaactaattacaaagatggagctttgtatgtaattaagaaagacaaaatataaaaataagttcaatttaaagtaaaaaagtaaaggacattttcattataagctaagatcacttgtcgttctaaactgaaaattaagtaaaaaaaaggattcgtcgatacaatcaaaaaataatcaaaataaaaaagatttggtaattttatttcagagtgattcaaagaaagtttcctttttgaatgaagttctaaaacaactatttttacttttttttttctaattatttaaaatttatttaaaatattctatatatactaatatatattagatattgtattgtttatttagtgtactcaactcaagagttgctcaatgaatcggttgattcgaaatttcgaaatggatagatgtcacaaatgatgaattgatttcttacctatgttactctatttttgttaggaccgccttctataattataataattgat

SEQ ID NO: 134468 - DNA, 960 bp, Cannabis sativa
tctcactcaaatcaaacccaaacctcatgcaaccttccagacctgttctaaataccccaaagaacattcccaaagcatcaaaacaacccagaatgtacagatacagaaaatgccattaaagctccaagctttgagtttaaactcaagcttggttaaaccccactaacatgcatccaaacctgcttgaatctacttaaataagcataactaagtctctgaaaatgacagcaaacaactacaaacagcacagcaacagattgcatcatttcaccattaaaatcaagattttgagtcaaaattccaaactttgaacaaaagcaactaaaatgcatcaaaacctatcctatttcactcaatcaaacatgattaaacttttgaaaacaacaacaacaattaacagccaacacaactccaaaaagtaagcatgcaaccattttcttacttgattttcaagaaactaaagagagaaagagtaagagctatacctagagcttggaatgtactcaaaatgaaagaaaaacacagcttgaattaccaaggaacaccacttttcttgctgctcgaagagggccgaaagagagagagagttttgagagaatgaaattcttttttgaatgaaattcttaattttccaattttctaattttgagtaaaatgaaataaggagaggattttcgcaattaattcagccaaataaacatcaaataaatcacataattactaattaataagctcactaaagaacaaaacataattggggcaaaataaccattttgcccctccacactaaaatagcacaaaagaggtactaagggtattttgggaaattataaattctcgattaatcctcacattcccaatgtctaaaagaaactgccccaacatactaaaatactaaattgtgattctactgagccatacaccgcgttccatgttgtcgggcaccgaaaatgcaaaatt

SEQ ID NO: 134469 - DNA, 689 bp, Cannabis sativa
  modified_base (438)..(445): a, c, t, g, unknown or other
tttgtgattttgaaagttgggaggttgagagacataaacctcttccataatgtacccatttaagaatgcacttttgtaacgccctaacaaataggcacgctatgacatccgttaatgtaacctaatcccgaccaaaccgaatttacaagaaaataagagcgagaaaatttaaactttaatttacttacagaatgaaaatataacttgtaataacttaaactttactaactattctaaaatatcatacatgtttcgggattgcgtaaaaattttcataaaacattacaagttgcttttacattcactggtagacccagccccgcgtggtctagtgtggcccgaacatgtacaatccactgccaagccctcaaactcatggctgatcttaaacagatttaccctataacgtccccacttcaagcctccattgggcccttnnnnnnnnggaatgaatgattcttatacacgagtacatcactgtggctgcctcatggagtgatgactggccctacagaccaacacgagtgtttccatcgtgttttgtcctcactcgcgcgcttcctaggaaaacttctcaggaggtcacccatcctgaaattaccccaagtcaagcacgcttaaccttagagttctttcgtgataggctaccataaaacacggtgcaccttgttgatataggtagtaccaat

SEQ ID NO: 134470 - DNA, 624 bp, Cannabis sativa
  modified_base (452)..(452): a, c, t, g, unknown or other
tttagttattatttattatgtcttttgtacgaaaactggccagttgggaatattttcaagaattaaataaaaatgcgacattatgattttctgcgtttaacgctggtaaagaaaattaacatttttataaaagtacgggtgtcacagtttggtatcagagccacggttatatcggtcccgaacgttctcacgagttacacacatcagccaaaaaaatttcgcttgccaccaagtaagaccattatatttgcttacattttatgtgtatttttttgtaatgtctaaatttgcattttatttttaaaaaaaaaaaaagaacaaaaccttagtaccaatatctaagtttaggtactacccatatgaaataattttttttttcatacatataaatatgtttcaagttagtttaaaataaaatttttgggtgaaattttagaacttgatgttagatngcaccatatgactcttgaaaaaaaaatactaaaatttcttaatttgaaaaaaaaaatgacattaatttagtactactatataaaataacatatttatgaaattactatttccacatcgagatttctagactattataatagaaaataataattaaatattttggttattaca

SEQ ID NO: 134471 - DNA, 566 bp, Cannabis sativa
aactaagcggtctttacaaatatcgaacttgatttcttcatcattagcactcaaagttaggtggcctcttcgaacatctataagggcaccaccagttgctaagaaagggcgcccaaggatcaatggcatatccttgtcttcttccatgtctagtaccacaaaatccactggaaatactaacttacccactttaattataacgtcttctattattccccttcgataagtgaatgatcgatccgccaattgtaatgaaattattgtaggctttacttcaccagtatccaactttttaaataccgaaagtggcattaaatttatactagcccaaagattacataaagacttctcaaattttaaaccactaatctcacaaggaattgaaaagctacctggatctttaagcttttgaggcaacttcttctgagttatggcactaaattcctcagttaagctcatagtttcatagtcccaaaatttcttcttctttgtcaacacctccttcataaacttaacatagttggcatctgctctaatgcatcaatgaaaggaatgttgatgttgat

SEQ ID NO: 134472 - DNA, 636 bp, Cannabis sativa
aaactatactagggacctttctctactgtccaaggtcgtgaacgatgggagtcatattgaggattgagtctgagaattgatgagaaagatcttggaggttggatatgggtatttgagaggaaaaaaaaaaaactctttagtaaggttgcttctctatattaaaagaaaaagaagaatatgattaaatggggaaagagaaaaaaaagttatatgtctttttttttttttttttgaattactagggagttttgttgtaaatatataatagtaggaatgttaaaaaaaattaattgctaattttactaattgtaaaaattaattagtaattataattaaatttaatttataaataaattaattttaattagtattttataagtaaacatgataataaatgaaatctagtttcatgttacaagtaatataatttaattaatcataaatattcaataatgattcaatggtcaaaattagtgtaactatagtgattatatatttttatttttttatatattacaatatctttatctttatatattaaatgtggctatttaacgatttttgttggtttaacggaatattttaagaatataaaaacatcccgttaaatttacggtattagtagagttagtttta

SEQ ID NO: 134473 - DNA, 553 bp, Cannabis sativa
ataatattataaatatataataatttactgctgcctcgtgatagattgttggtgtagtctattcctgttctatctcgactaacgatggataccttaaattggtcgcttgatctttttgggttgtattcagtgaagagtgcatataagcttctgcagcaacttaatggtgagtttggattggatgtttcagccgaagacagattttggaggaagctgtggaagctaaaaaccccactgaaaatgaaaaatatgttatggcgtgcagcgaaaagttgtctcccaacaatgacccagctgtaattgaaaagagtgcatgcgaatttcacttgtccggtctgctcttttattttatccagttgcagcagctgtgtgggatcgggtgggtattggcatgatattgcagcagtagttctcttttttgggttggtacatgtatcagtttgagatacttgatttggataatgcaaacttgctggtggccttgtgctgggcaatctggaatgctaggaatgataaagtttggcaagataaagttatggggatcgaaggcatc

SEQ ID NO: 134474 - DNA, 501 bp, Cannabis sativa
  modified_base (48)..(52): a, c, t, g, unknown or other
cactttgagtatccgatataatagaaggcataaccactttaagcctannnnnaatgacttttgaaacaatcttataaagaacattacaaagcgtaatatgtcttaagtcacccatatccataggttgtttcttcttgggtattaaaaccagattagtattgtttaaacctacaggaagatttccagaactaataaaattacgccagttgtatgacatctcgattaacaaccgaccaacatttttggaaaaacattggtgtcattccgtcaggccccggagccttgtcgggatgcatttggaacaatgcttttcggacctcatcatcagaaaccggctgaagcaactccatattctgctctgctgtaacacgagcttgcacactatttgtaacttctctccagtccgcattagatgaagcaaaaagagcaaaaaaataatccaccattatttgtggcaaacctgaagaccaatccacccaattgccattcgaatctttgagc

SEQ ID NO: 134475 - DNA, 833 bp, Cannabis sativa
  modified_base (773)..(789): a, c, t, g, unknown or other
tctcttactgaggtttctttaatcaactccttccgaatgttgttcaaaaaaatttgggcatatctgcagtctgtgctcataagtgtacttcgttccttactttagatttttttaattacttcaatagaacgtcatgccctaatctctttcctacatggtactttacagcaaaaactcctaattattatacttccttcaaggtcttccttcttcaaataggaattggaatacctttgtttttgtgattggcggtaagcggtttcccaaggttattaaccctaaggcttttcctattgtcaatggtatttcaacaacagaagggaaagagttgacatcaactacttgatcattcacaatagaaacattagttgggagaacttcaatagaaaataggagggaactccaacaccaaaagatttcttttaattaataatttagtagagaccaaaatctcaagctttgctagacatcttataaaactacatactaaaaaagcttttagtgcttctcctcctatttatgcgacatatttttaattgatattgattattatgtccgatcttatgtaagttagtataatataaatacatatctctcttaaattctcttaaattaaatatggatatataatagaaaatattattttcttaacactaatataatttaaatttaaatttactgaacatctaaaaaaaatgtatttctattattattttttttaaaactctttgcacatattcaaagaatatctttttgttataaaataatataannnnnnnnnnnnnnnnngagaagaaagaagaagaaggtgaagagagaaagagaaagtgaat

SEQ ID NO: 134476 - DNA, 741 bp, Cannabis sativa
  modified_base (341)..(341): a, c, t, g, unknown or other
tttgcgattctgacttcgagtttgtgtttgagtttaggtcaaaatttaagtcctggtctgagtttgggttcgggtccagatttcaatctaggtccaattcaggctcccggtgagggttcgcgtcctgggtcctggtctaggttgggtccgagtcccaaattcaattctcgatatgagtttggattcagttcttggtctaagtcgttggttctgatcctggtctgggttcgagtttttgtccaggtcttggctagctttgggactgattctagttgtgggtttgaattctggtccgagtctgtgtccgtgtttgtgtcgaggtctggaccccgatctgggtntaggttcaggtccaggtccaagttggggtctcgagtgcgggtccaagtttgggtctgggtcaggatctctatccagatctaggtctagcatttcgatcccagtctgtgtcttggtccgagtcgaggttcgtattcggatccctatctaggtcgaagtctatgtttaggatcatgtcccagatttaggtctagttccgggtctcagttcctttctgggtacacgactgtgtccaggcctgagttcctgtctcagtttgggtctgaggctaggtcaggttccgggtcctggtcacaattgtagtcttggtctatggtccaggttcggcaattcttcttctggttctaattttgggtcccaggtctaggtctgggtttaggtttggttcttcgtttggaatct

SEQ ID NO: 134477 - DNA, 1329 bp, Cannabis sativa
  modified_base (1265)..(1265): a, c, t, g, unknown or other
gagagagagagagagagattagatatttttatttttttaaaaaaataaaaattatttttttaagaaaaaaagaagaatatgattttttttgaatataataatcaattttattgctgaaaatcaaacaatacattggttattaaacaaagagggaatttcttccaacccaaaaacctcattttctatctgtagtgcataatctcaccatgttttgcgatattaccattttgcattatatgttgaagacatacacatggaaagacagataacaaggacctaatagaactaaaaaatagcttcacctggacacaacctcaaaaaaagaagggctaaaatgatggcaacttcaggatcactctctacaaaaaaaatataaagacccagcaaagaacaactttgggtgggaggggatcgtcttagttgcatgacagagagaatcgtatgcttgtgaagaagactccctcaaaaaaagagaaaatattttaactgcaaaataaaattatagattaattagtaagaaaaatatagaaataaaaaataaaaaataataatcataataaataattatataaaaaattaacaaaatattttcactacaaattaataactatattgataaattgtaacaatagtcctaattaaaaaataagaaaacttaccttgtcaaatacaattaatgccagcaatagatcctagaacaatatacttcaaataatttaataacttgaataacttaataactttacaactttaataacaaataaattgtaaaaattttccaataaattaaaaccatcaaaaaaaaaaataaaacatttgtttctcctatagactaattaatgtaaatacttatttttgctaaacatataagtaaatacttaataagctttgaaggagctttaattaataataataataactactcaaaagtaaattaactgtctcatttaaaaaaaataacttttataattaataataataataataataataataatcttatctctaactgtcgtaatttctttcttcagggattgagatgactaatatagatttgagtgattctacaatgcacctccttaaaagagatgtactgatgcacccctacttgttttggcatctagaaaaaaaatttagtctaattttttttcatatacatgtacattatagctatttaagatatcctacaaaatttaagaaattcagaataatttacaacacagaaaaaatgttcaaacactctattttacacgcgtataaaatanaatagtcacgcgtgcaatacactgcttgaacgcaattttcggcgtgttaaacttttctgaattt

SEQ ID NO: 134478 - DNA, 671 bp, Cannabis sativa
  modified_base (537)..(540): a, c, t, g, unknown or other
ctgaccttaagtttaaaaataagaaaagataatcaaattttaaaaataagataattaattaagcaaaaatgatagatttttacctattttcaaccttcaagcttcaaatttcactaatatcttaaattaaggtaaaaaaaaaaattcaaattaatttaattctgataattagatttaaaatatgaaaaacaaaaatctaaatgcaaaattacacagaaaaacccgaaattaattccatgaaaaagcatgaaaaatgaagaaaattgaaaaaattgcaagttgtatggatggtatgcaatgcgttgcataccatccacgcacgctgagcatgggacggcgccgagaaaactcacccagagaggctgcacgcagcctcgtccgcgcgcgagaccaagcattcagacaaaacggagacacccgaccgagaaaactcggacatctccttgtctgaagctcgcgtgaccgagtgatcactcggatccgtgcgcatatggggtgtctccacccctatctcttttcaaaacttcaaaaaatcannnntaattcaaataaaatcgaaatcaagttctgtaaaaaaagtgaattgcttaatgttctacaaaaatatccaacaaaaataattctagaacaaaaattcgattatttttcataaaaatttcacaaacatcaat

SEQ ID NO: 134479 - DNA, 524 bp, Cannabis sativa
ttgcgaataaagggtccaacaaaaacttgtttgtcattaagtagcatgccattgagcttctcaattgcactttgagcagcctctttactatcaaattgaacaaaaccatatcctttggattgacccgaaacatcatcagttgctattttgcaagataaaatgttaccaaatattgaaaatgtttcgtgtaaagcttttgtcaattcctttatccaagttcttaacaaatatatttgcaattccactctttcgaatactcgggtcccgataagaatacattatcctaattggcttaccattaacagtagaaaaattcatcaaattcaatgcccgagaagcttcttgaggattactgaaattcacataaccataaccaagggacagatgtgagatcagatccctgcatacccggactgaaacgacgtaacccatttggctaaatatctcaaaaagatcggcttcgttgatggaggcatcaagatcgccgacatacaaagatgtcattgtcacaccattttgagtag

SEQ ID NO: 134480 - DNA, 846 bp, Cannabis sativa
ggtaggggtttggggtcaggagttcaggcgtgaggggtcatgggtcatggttaatggcaaccattacaaaattggtgggggaagttctcactttcttttctcccttatttaatcaagttctcccttttttaatttaaataatgtaagtaaataaatgtaagggaatgattaccttactattgattctcattacttattagtaaacatgccattaataagtaatgagaatcaattgtaaggtaatcattccattacatttgtttgcttatattattaaaataaggaaatagagaacttgtggcgtgtttactaataatcaatgagaattaatggaaagaaaagcattccattacattttttttatttaatttattaaatttatgaaagggagaacttaactaaataagggagaaaagaaaaggagaacttctcccaccaattttctaaggaatgccataaagggtaatggattttatttatttttattttattttttaatattaaatttataatgataattttattctttaaaatgtctaacaaaataactactatatactatagtttaacttaaaagggtaatttaatcaatttcctaataaagtaaacaagataaataactatcattccatttcaaatcagttttagtaaacaacatatcataaatgttaattatgattattattcatttaatccgttatatttctccattactttattccgattctgaatactttgtagtaaacgtgccattgattaaataagggagaaaagaaagggagaactttctccaccaattttgtaaggaatgccattaatggtaatggattttaattatttttattt

SEQ ID NO: 134481 - DNA, 4225 bp, Cannabis sativa
tgtttttacgagtatctccgatgaaggggattaaacgtttcgggaaaagagacaaaaggatttttttttagaaccggttgttgctgatactttcttctcggttccttcttctccttcttccagaacgcgagctcggagaaggaagagataagagggccctatggagaatgtggtcagaaatccataatagagtccgaccacaacgaccgaatttattatcttcatgcataaggatactagattacctagtataaaagattgaaaaatcatcccaaacctccccttgttcttttctatttccatttctggattattatatgatgatttttgaactttccatatatagaaagagataaactagaaacgacatctcttatctcaatgacaccaaagggatcttaaatgaatggaattgggatgtggatggaatataatgaaatagagccactttgaggttccctatgaaatgaggcatggaacggagccacgaagaagaagttccgagagttacaaaggaaacttcgagctcatatgggtcatgtgttgagaacgggaattgaactttatgagatctaacctcctgttgttcctcagtagctcagtggtagagcggtcggctgttaaccgattggtcgtaggttcgaatcctacttggggagatttgattcattccgaattctttaattcggaatgaaaggattcactttgaccgttaagagagtaggtaacccgttccctgtgtctttgtttctattgcattctatctcatcgtatcacattctgttctgcgatatttgagaatcgccgtcaatccctcggcgtaggtccgggataatcctttgttccacagtctggggctatttacaactatccaattaagaattctcagatgtactagtactagcaagtgcatcaaagatgcagtcatcgattcgcccgagaggccacaattacggcgagcaaacatattaatgacgaggaacgcatttttgctatgctactaatacttgtacttgctccgctattctgcccccgcctggctgaggaagaattacggggcgtaaaacaaaaaaatatgctgattcgggtcgggcatactctattttcattttcaacctttaaagattaaagaaagaaaaagaaagagtaaggccattccatttcgacaaaagacccacgcccaaattccatagctttgggtccgcaatcccgatcatgattttcctacccccaaagggaagggtccttccctttttggccagttgtgggcgaggagggattcgaacccccgacaccgtggttcgtagccacgtgctctaatcctctgagctacaggccccaccccgtctccactggatctgttcccgggagtaccctaaaaaagggaacctttcctctccccagccgtttcggtttaagaagatgtgaaagcgcctctctctatataagaacggtgcgttccgaggtgtgaagtgggagagaagggatttcataattggggttttgaataagacgaccctttcatttttcatttttttctttttcatagttaaaaaagaaagtaataagaatgagaggtgttaacctttttatcatcctggcgtcgagctatttttccgcaggacctcccctacagtatcgtcaccgcagtagagtttaaccaccaagttcgggatggattggtgtggttcctctacgcctaggacaccagaatatcgaaccatgaacgaagaaaggcatgagagaaaagcatatcggctagtgattgtgaggccccaccccaattctggactggaggggacaccaaaggcctctgcccttccatcccttggatagatagagagggagggccgagcttttggttttttcatgttgtcaaagagttgaacaatggtttttttttcgtgttgtcaaagagtggaacaatgaaaatagatggcgagtgcctgatcgaattgatcgggtcatgtaggaacaaggttcaagtctaccggtctgttaggatgcctcagctgcatacatcactgcacttccacttgacacctatcgtaatgataaacggctcgtctcgccgtgaccttctcttgaattctcaaaacttctgtcgctccacccccgcaggggcagaaaacccatcgctgtcttggctgtgctaccgaagactctggggaagtcggaataggagagcactcatcttggggtgggcttactacttagatgctttcagcagttatccgctccgcacttggctacccagcgtttaccgtgggcacgataactggtacaccagaggtgcgtccttcccggtcctctcgtactagggaaaggtcctctcaatgctctaacgcccacaccggatatggaccgaactgtctcacgacgttctgaacccagctcacgtaccgctttaatgggcgaacagcccaacccttggaacatactacagccccaggtggcgaagagccgacatcgaggtgccaaaccttcccgtcgatgtgagctcttggggaagatcagcctgttatccctagagtaacttttatccgttgagcgacggcccttccactcggcaccgtcggatcactaaggccgactttcgtccctgctcgacgggtgggtcttgcagtcaagctcccttctgcctttgcactcgagggccaatctccgtctggcccgaggaaacctttgcacgcctccgttaccttttgggaggcctacgccccatagaaactgtctacctgagactgtcccttggcccgtaggtcctgacacaaggttagaattctagctcttccagagtggtatctcactgatggctcgggcccccccggaaggaggccttcttcgccttccacctaagctgcgcaggaaaagcccaaagccaatcccagggaacagtgaagcttcatagggtctttctgtccaggtgcaggtagtccgcatcttcacagacatgtctatttcaccgagcctctctccgagacagtgcccagatcgttacgcctttcgtgcgggtcggaacttacccgacaaggaatttcgctaccttaggaccgttatagttacggccgccgttcaccggggcttcggtcgccggctcccctgtcatcaggtcaccaacttccttgaccttccggcactgggcaggcgtcagcccccatacatggtcttacgactttgcggagacctgtgtttttggtaaacagtcgcccgggcctggtcactgcgaccccctttgtgaggaggcaccccttctcccgaagttacggggctattttgccgagttccttagagagagttgtctcgcgcccctaggtattctctacctacctacctgtgtcggtttcgggtacaggtacccttttgttgaaggtcgttcgagcttttcctgggagtatggcatgggttacttcagcgccgtagcgccttggtactcgaacattggctcgaggcattttctctaccccttcttaccctgaaaaaacaggggcaccttgcgtccttgaaccgataaccatctttcggctaacctagcctcctccgtccctcgggaccaacaaggggtagtacaggaatattcacctgttgtccatcgactacgcctttcggcctgatcttaggccctgactcaccctccgtggacgaaccttgcagaggaacccttaggttttcggggcattggattctcaccaatgtttgcgttactcaagccgacattctcgcttccgcttcgtctaccactgctcgcgcaggtgcttccctctaggcggaacgctcccctaccgatgcatttttacatcccacagcttcggcagatcgcttagccccgttcatcttcggcgcaagagcgctcgatcagtgagctattacgcactctttcaagggtggctgcttctaggcaaacctcctggctgtctctgcacccctacctcctttatcactgagcggtcatttaggggccttagctggtgatccgggctgtttccctctcgacgatgaagcttatcccccaccgtctcactggccgaccttgacccctgttattttgaggtcatatctagtattcagagtttgcctcgatttggtaccgctctcgcggcccgcaccgaaacagtgctttacccctagatgtccagtcaactgctgcgcctcaacgcatttcggggagaaccagctagctctgggttcgagtggcatttcacccctaaccacaactcatccgctg

SEQ ID NO: 134482 - DNA, 857 bp, Cannabis sativa
  modified_base (736)..(738): a, c, t, g, unknown or other
ttagcaacccaaactttagattaggttagaaaatatataggataaaccgtccaaaccaaccaatgtacaggcctaatccattagacaaacataatagtgttagatctcgacagataagtatttgtaaatgcaaaatctagttgtacatccaaagatgacaacttagactagggtttacaatatgaaacaatgaagagattaataaaataagaatagctttgactcttgtctaccgagatattgttggattcttattttaatcgaaattatcctttattttttctcttagctttttcatttagaaatttcttagaaagtatatcatggacaaaaggtttatacatcatttgcttatgatgttatcctattttcttttatgaaattgaatggcgcaaatgactatattctagatattctatcctgaaatgatataaattctcgaccttatagaatctcctacttgtatatacttactaaggtaacttagacttagagatagattaatagtggtggtccaggataaaatcattactcaagaaatatttagtataaatttaagtctttgattttatattttagattccaaataaaaattttagtttctgtttccaagaatacattgaacattacagtacaactttcacaagttttttaatatttattttctgtcaatggatccaaacagtatgtctatatatggaatttgagttttatattctgtgaccaggatccactnnnactattctaagaactctttcttgtaactagacctatttcatcaaaagacctcaaccacactctaatatatctatgacatttgtattttgttcatagtggttttgacaagatcattctct

SEQ ID NO: 134483 - DNA, 655 bp, Cannabis sativa
tctttgttggtaaagactatggaatcaataattgaataaaaattgtgatgattggtatagtataggatgaatttgaatttttattattttgaccaaaatgtcctttactcttttaaaataattttagttttataaaattactattatagtacaaataaaaaaatgatatatatttatgtatcactcttaaattgtattttttagatctaattatcaaataataatatataaataaatatctaatttaatagtctattttatattaaatatttaagtatcaacataaatattattcatataatttaatcatcacacatcgtttattcatataattataataatattgctttcctataattttgtacaaaaaaaaaatataataaacatattattataatattaaatgttgtagatatatgttttaaaataaaaaatattactcatattataatcatttatttatgagaagggtagataaggaaaaataatttttgattggtatggaatggcttttcaagtcattttatttaggaaaagtaatttcttaatttatatgaattacaatttctatggaatggattttccaataacaataaacaaaccaaatacttaataatttttctttagaaataacaattctatttctacactcatt

SEQ ID NO: 134484 - DNA, 636 bp, Cannabis sativa
atatattatatattaatcaagttttaaaaaaaatttcaataacattattttttttcatgtgatatggagccaagaaaattattatgtttaaaaaattattataaaattagatgaataataatatgaaaaaattaggaaagaaatatgagaaaatagataaatatttataaatttaataaaaagttaaaaaaaaaatgagagaattaagaaaaaaaataaatactactatttagagtgattttagagcgactaccttatatctctgctttatatatatactaggaaacaaaccgtgcttcgcgtgcggttatattttttttatttataattaagttacaaaaatatattaaagttgatatttttttaatagtatgagtaattattcaactaaatttttttcataacttttatacagaaaaataaattaatatggtagaaaaatttatcatacagtttcttatctaaaaaaaaataacaaaaagatatttccgaacgttatagtaaaattaaaaaatagaggttgaaaaatcctcacagaaaatagagatctaaaaaaatcaattgataaatctatagaaaactcatcatatgattttaaaattgttgtcatttaaagctgatgtcatcaccgtatct

SEQ ID NO: 134485 - DNA, 631 bp, Cannabis sativa
  modified_base (40)..(46): a, c, t, g, unknown or other
  modified_base (557)..(561): a, c, t, g, unknown or other
  modified_base (596)..(603): a, c, t, g, unknown or other
ttctccaaaatcactactccacctccagagtaatcaccannnnnnnagtagactttctagcactaacacaagtctagaaactttttttggtgtagtctaagagtattcaaataccacccttatcgactaacatatagtttctcttattaatcttaagattcatttgattatcttctaatatttttttcttggattattctgatacgtacggattactcccattcaatagcaagtgtttggtataatgcatacataagaccactcattgttgatcctaaggaattcttttcttggcctttatcttttctgaaattgttgaaattgttccttagataaataaaatctatgtctaggagtcaaaagacttcctatagagttagccattaaaaaaatactccagtatcttactaaagttagtttcttacactagagtaattcaatcactaggaataccataagccataggttaatctcaaacctataatacttggatcataaagttttgttaagtacattgaatagatttatttttaattttctttcttgtccttgtaatnnnnnacttttggttactccatatgaatagttttaaccannnnnnnnttggctttgcttcttagttccttattct

SEQ ID NO: 134486 - DNA, 967 bp, Cannabis sativa
ttgattttttcatcagggacaaagacaaggggacactctgtactttttgttggcaaaaatatcaaggttatttttttaaaaaaaaataaaaaatatgtgtgaccaacattgtcaattgagctttcttaaaaaatcttgttatttttcttgttatgtttcactattttcttaggcactattttttctcttaagtgtttattggtgctttatgtgtcattatgtgttgtcttgttcattctgtgcaaattaatatgggggggcatattttgaaaaaattaaagaaaaattgtggcataatttttcgatttggctattttttcttttatggaaacatgttttcattgcattttatcgagtgtgtttcctttatttttggagatttggtcttttttggtgttttaggaaacttgtttttaattaattaattattttgtggtttcctttttggtggcatttttggatttggttgggttttttaattattagattttgtggggatatgttgtttctttatccatttaaggtaacctttgaccaaattttgaaacattttttaatttctttttttatccacacatggtgctcaaggtaagaaggtaaaagtttcctttttcttcttttttattctgattttgtggatattgatttttattttctttttttttcttgctacccacatctcttccccttgataatatattcacccatgttcttcactatctcactctctcactcttattgatttctcgagtgtgaatgatcttttaatgtgagaagtttctttacttttgtccttggcttccttgatagacaaaaagggggagaagtgtttatgtgtctcgttgtcaactactcagggggagtatttgtattcaactcagggggagttgtttgttttgttttcggtttgtaagcttttccgtccaaaaaaagttctttgttttatgtgttagagtgctttcatgca

SEQ ID NO: 134487 - DNA, 1175 bp, Cannabis sativa
  modified_base (1123)..(1126): a, c, t, g, unknown or other
ttaatctgttgagtactcctggtctgcatatttgcttatttattgttcgatattccaaccaaacactcatctcgtgtgttgtcttttgtagattaactcaggtgagtcttgggaacgcggacatcggattgacctggacttgcttcaacttctgcacgaggatcatcctcgtctttgttctagcccaccttcctctactaaagggcattctccaactcttgtacctagccataggatgatggctcgtacaaagaaaactacgcatctggatgacgcacctgatcctcaagtggctcggcacgccactttgcccagcaccgaataggatccggccgtccagatggaggaggatcatgaaggggacgctgaggtctaggagatcgaggagctggacgatgtacgtcctggcagtccctccgaggtggaggaagaggctgaggttgaacccccaaattacagggagtacaacgaggctggggagctagtcgatgctgatggagacgtcctggttgagggcgtggactgcgtcaatgaggagcttgctgcggaggttcctcatagaaggtagggtgccttgggcgccaggtgggtaagccctccgtccaagattacggaggcgcgccttcgaaatcttgattaaggctgatacttgggctagctggactgctacattcccgcccacaacaatcgtgccacaaaccttgacaaggggatgagcgcctggttgggtgcccatggtcagcaaggagcgttgatgcccttgcataagtacttcaaggatgtggcggacttctttggcctctgcccggcccagtttactcctaagggcattaagtgtttatctgcccttttcgtcctttacgcttcccaggagtggggtactccttctcctcacaaagttgcctagttctttgatttgaagtccacccccaagcaaggcaggtcagggtacttctatttctctaaaccaggcttcaagtggttgatgggcacgaatgacacggccatcagcaagatagggaatttttctgatgagtacttcatggtggatggcgcggacatcactcgcactcagttctagtagattttgacatatcaccgtcctcccctcactcttgctctnnnngatagagctcaaaaacttgcccggctgccgggagaagaccagaatatta

SEQ ID NO: 134488 - DNA, 700 bp, Cannabis sativa
aatttaaacaatcatatgcataaaatttatcagaggttttcattggtcgtattcctctctaatgttaagtagttaacaacctactttacgcgcgagtagcttatcttctgccccatcctcgatttgcgagtagtcattgatttcgcctcgcgatcaacttaaatatattttcaatgaccttgtcattttgtatatatttttattgcttacatgaatagttaaatcttctacacacgtgttaggtttaagtatttttccaagacactttgatatctcgtttaatactttcctttagcgcgagccattagtattcaactttatgcgcaagttctaacttttgattttcctttctcatcaaataggttttaaaccaaaaagtatagttgtttgatccatttctcgtcagaaaggtttgatcagagcgttataacgattcgacccctctttcgtagaaaacgtttggtcagggagttataacagttcgacccctctttcgtcaaaaaggtttggtcgaggaccttttgagaagtttttcaaattttttattatttttgaagtgatgggtttccattgtattatgtattttcaaataaattcttgttgatcatacatatatgtcccgtaagtaattttaaagagttatgctttacaattacttgttgaacgaaatgattattttattcacaactaaagttcaaaa

SEQ ID NO: 134489 - DNA, 877 bp, Cannabis sativa
aaccatatacatataaaatgacagcaatggaatgccaatcctcgggctttatttgtaaagtctctattccttggtaatcgaaacccaaagatctatgaactagcccatgtttgattaaccaaacagacaaacgaccctgcatcttttttctctctcccgcatttttttgttttttttttatatacgtattataagtaataagtatttcacatttacgataaaatttcttaagattgattcgctgtttattattctgtacaaaaggatcttcgttaattcactaattcgtcgaaagatactgaacttttgtatttgaaaaatctttcagtcgggatctctgaagtagatggtggttgatacagtaatccttgattataacttccagtatgagtactgcgtttaacacgaaacttgtggctggtagtaaaacaccgattctcctgttgagatcgaattcgatcttcatagatttctcgagatattttcttccgaagttttgttatagcatctataactgcctccggtttaggaggacatccgggtaaataaacatccacaggaattagcttatcaaccccccgaacagtactatacgaatcggtactgaacatcccccctgttattgtacaggctcccatagcaataacatattttggttccggcatttgttcatataatctcactaaagaaggagccattttcattgttactgtacccgctgttaaaattaggtctgcctgtctaggactcgatcttggtaccagtccataacgatcaaagtcaaatcgtgaacctattaatgaagcaaattcaataaagcaacaactggtaccatagagaagcggccataaactggagagtcttgaccaatttgaaa

SEQ ID NO: 134490 - DNA, 1206 bp, Cannabis sativa
  modified_base (1173)..(1181): a, c, t, g, unknown or other
gatctatattaataggcaaatctgattatattgaaatgagttttatttatggcataaaacccaacagttattacttttcttgctgagtcatagtgacccacagatgctatgtggtacaggtaaagacaaaggaaagctagttcaaccatgatgtgacagtcttcttcagcaacatattgactaaatcggcctgtgtgccgagttgtcaggagttgttttgagctgtatctgctgtgtattttgattttgcattttgacttgtcattgtatttagtttttttgtaaaacttttacaacaggaattcctagaacacaattttagtgtcgttatgatgtccatttttagtgttttattttagtgaagtttttaacattatcacatattttaataattatttatttaattagtactaaactaatttataaaactacacacgtgacgttcccataggataggacgttacaatgtggctcctacttttaaaggttgaacctttgcgtgatatgtgctcgagtggtacaaaatagtctccattatctagttgctgcacgcacgggcataatgtttccacaggattattcactcagctctaacattgcatgtaatgtaccccaatagtagaacttgagcagataccttaggcagatcatgggcctgtccatacccgccacttagcctacaaatacctcccaattctcatatgaaggggtagattacaacttgcataactaagactttgccaatattactctacgtcttcttcttcaagagaaacttagattttcctgcaaaaatattgtaaacacatcaatactgtcctcagaggctaatagaatgactcgtggactaaggtttataaacacccgaaccacgtaagaaaatcttcatctctttacttctgtaagttattatttctttagctcttaaatattgagtttctaaaaaattttagtaaacaaacacctttttagaaaatgtactatagacttaccaaaaaaaatatttaaacatagaaattgaaatatattgataaaaaaaagtaaaatatttactaaacatatttttatttttaatttttttcaaaaaaataaagtaaacaatttatttcaatataatttttttacagaagggacattagctaaggtgttgtttggtaacacttttttaatcannnnnnnnnttttaaaattgaaaaagtgaaaata

SEQ ID NO: 134491 - DNA, 609 bp, Cannabis sativa
  modified_base (32)..(45): a, c, t, g, unknown or other
aacccataccgagacttggacccagactgggnnnnnnnnnnnnnngacctaaaccaagaccgggacccggacctagacctggcttctgatcccagtctgagttcgaggttgggtatgggtgcaggtccaggtttgggtttgattatgggtctggttgtgagtttgagtcccgggcttgggtccaattttgagttcgggtctgggttcgggttttgtcctattatgggttcgtgtccgagttcttatcctggttttgatccagggtcgtgttcgggtcccgagtcttggttttagtccagttcctagtctgggttagggtccaggtctcgatcgcagtctttgtctaggttcaagtttgggtccttatcagggtctggatcctggtctcggtcgctggtctcaggtctcggcgagggtttaggattagttcaggtctaggtcccgttctaggttcgggtcccaagtctcatgtcccaatcctagtcaagatctcaatccaggtgctggtcttagtgggttatggtttgggttggttctcgtctcaagtctgggtcctagtcacagttccaattccaattcggggtccgggttttgttcttggtccaggtt

SEQ ID NO: 134492 - DNA, 626 bp, Cannabis sativa
taaataacacaaaaatgggaaaactagggttcccaaattttccctaaccggtagactggttccccaaccggaattccagttctgggtaaaattcctataagccaaccggaattccagttcttacaggcctctctaaaccggaattccggttcagtgcaggaaacactaaaaatttgacaactcatgcaattcaaccccaattcaaaccaaactctccagacctattctatacatcccaaagaacattttcaaggcaataaaacacaagtaccaactcagaatcaaaacttgccattaaaaggccaagcttgagttctaaaactcaaagctttcccaaacccaataacagcctacaattcaagttgaaatcaacttattccaacatattttacccacagagaacacaatcaaacaatagcagcaactgcagcaacataactcatcattttaccatgaaaaccaaagttatgagttcaaaactccaacttagttaaatccaactaacatgcatcaaaatctaatttaacccactcaatttaacatatttaatctacagaaaacatcacataaacacagcagcaacaacatcaaatttaccaagcatgcaaactatcatatttttctta

SEQ ID NO: 134493 - DNA, 621 bp, Cannabis sativa
aatcataatatttaataagagtagaaggagaagaaaagaactagaatgaagaacacttcaaagccgatctctgtctcttccttgctctctctcatttgtagcttctagacttcctcaattcgtagtccaaaaggtcttatttatagtaataggaaagttaaatgaatcctattagaattaggatgctatttatagtgcttcaagatagatgaatcctattagaattagaattctatttattgtattgggaaatatctcactaaaagaaaagataactcatctatagaaaaaaagataaaaaaaatcgcaactctacctgaaaagctatctttatttcttactatgacaactgatagtattttggctataactctcttgatattacttggaattataatattcaagatgatttagaaatatatgaacgagatctaaaactttcatgttgagttccaagtccaattttgcctctaagatcgtttgaatttgaaattaggttctgccttgtaaaatcgagctagctggcttccactattttccactaaaatatgctaaaatccctccaaatgactctaaatgcatgaatactctttaaaatagcctaacaaattaaaatcacac

SEQ ID NO: 134494 - DNA, 2319 bp, Cannabis sativa
tatgatatctatccagtgtgatgtatggaatatatgacaaaggcggagtgttagagtatttctattgatcggtcatgtcatataggcccgagtcggacatccaattgcttcgatttgaattatccggaggatgccttatatttatatatattatatcaaaaagatggacaatcaaacctatttctcgattcaatagaagcccaaagaggtgaatagggtcccaaataacgagagatatgtagaaagcaggtccgattacgcctattcctaatcctaaatggaatgtaacgacgtagggatccatatgtaaacatagtatctatttagatacgctcgaatgaccccttctcataattagaatgtatataaccctattccggtctggtccggtatggaatgaacttataatcatggaatcgactcgatcatcagattatcgattataagttcataaccctagcccattccccttttgggcggaacagatctactaattctttgattccagttagtaagagggatcttgaactaagaaataggttctagaagctaaaaaagggtatcctgagcaatttcaataatcgggttcattgatattcctggtatagtagatgctatcacacatacaatcatactcaattcgatggaattgtttgatcttaaaggggatcttctataattttgcacgtgaggggttatttcttggtttcgtccagtcattaataacttgattatttttagataatagtagatagaaacaacgctcgtaaggagtcctattgaaaccaagaaatataggcctgcctgccatccacaccagaataaatgaagttttccgaaaaaacctgctagtggaggaagacctcctaaggataagagacagagggctaaagagagagccaaaaaaggatctttcgtgtataatcctgcataatctcgaatgttatcagttccggtacgtagaccaaataatacaatgcaagcaaaagttcctagattcatggagatatagaacagcatataagttatcatgcttgcatatccaccatttgagtctccaacaattattccaataattacatatccaatttgacctatggacgaatacgcaagcatacgtttcatgcttgtttgagtaatagcaatgagattccccaatatcatgctaagaatagctaggatttccagaagaagatgccattcgtttgatgagaaataaaaaggaatatcgaaaattcgagtggctgaagctgaagcagctactttcgaagtaacagaaagaaaagcaacaactggagtgggagagtcagagtcgaaaagaggattcctcacttctttctctcattcaaaaccgtgcatgagactttcatctcgcacggctcctaagtgataaaagaaagaagaacttatcttctttcttttttgattaccttcctcgcgtatgtataagaccgaatccattcgatttctaaaaaggattactaatccttaacttttcgaggaatccttcatcagtggttgtgaatgactgatttttctcaatcttttcgaccttggttccgtaggagcaagtcagaaagattgagaaatagaaccatctgatttgattcgttctcaatagacatgagatgatcatcttagggtgatccttttgtcgacggatgctcctattacactcgtagtctctgaaggatgagaaccaactatgtagcatctacatcgagaattcaagtattgtatacgtcattagtccgatcctttgctttgtaggaactacccgtaataacgaacttgcaaaatgaatctctttatgataaagagattcgttgttcctgaccctgcttcaccttaattgttatttgaacaagtaaaagttatgtcttggtccgagtggggatagcatttctcttctgcatgtccatggagttttgaaaaatccaaacatctcagagatagatagagaggtaggaatttatcgaacgaaccgcactccttcgtatacgtcaggagtccattgatgagaaggggctggggaaagcttgaacccaattcctacagtgatgaatataagcgcaattgaaattcctggggagttatacatttgtgtattgataagaccattcactatttcttgaagctcgatctctcccccggatgaaccatatagccaagagaaaccatgaaccagaatagaagagcttgccccacccatgagtaaatatttcatagtagcctcattagaccgtacatctttcttggtatatccagataataggtaggagcataaactgaaacattctggagctacaaagatagtta

SEQ ID NO: 134495 - DNA, 1724 bp, Cannabis sativa
ttttttcaaataaaaaaactttgggattgctaactaataactaacagacgaaatatatatataaagcaacggaaccatcatagtatttttttaactactcaaaaaggaagggtggttattggatcattgacctatgtgaataggatagaccctataattatttaatttattttcgatttcttcgatgtaaggtaaaaaaaaaagggacaagtgaattccattatagagccgtatgcaatatacaaaagatgcctgtacggttgttcaattctatctttttttttattatcttattagtctttttcacctttcatttcattatgcgagataaaagaatttaaaattatgttatatcatcagggtaatgatccatcaacctgctagttctttttatgaggcaccgacaggggaatttatcctggaagcggaagaactactgaagctgcgcgaaaccatcacaagggtttatggacaaagaacgggcaaatctttatgggttgtttccgaagacatggaaagagatgtttttatgtcagcaacagaagcccaagctcatggacttgttgatcttgtagcggttgaataaagaagaacagggatttccgcaaatatgcaatttgatattttcattttctctttttaccaggtttaatataataacaataaaataaatattgtatttgatgaatctattaataaaaaaatgattcataatcatccggttaggatcgatctaaaccaacccattatgtatatgattcaacatgccaactattcaacaacttattagaaagacaagacagccaatcaaaaatgtcacgaaatctcccgctcttcgggggtgtcctcagcgacgaggaacatgtactagggtgtatgtgcgactcgttcagatcatggattaggccaaaagaaagaaaacaattgattcagtatcagtgatcaataagagtgaataggatagaatggaaaaacaccattcactatcgaatcgaaaaatgaaaatatctaaaaatctaaaaaagatctatcatatccttttattgtggtatcaaattaatttatggttgctattggtacaaatccaatcacttctatttttcatttaagatgagaaagaattccccattggtagcaaatggtattcattaagcagggaaatcctatttaaaaagcagaaatattctgcctttactcttgactcttgcaagaacggactaacagggtcagctactcagctaatcttcataatataattaaataccgttactgtatgggtgggtctcgttgtgaaagacctattactggataattatgggtagagccaaagagtgtgaactgtacaagttaacaataacattgattaaatgagggaagaggctccggtgtatagagaggaccttaccgtttaagaagtaaccatagaaacgatggaacccactatacctatttattatatttactacttttttagttactatgttttatagtatcaatacaatttcttatttctaggtgagaggtctagaaaaaaaaaaaaaaggaaaaaatcgtggttgggaaggttatagtagcaaaagccattggaatttttattttatacattggaagaatccgttttcttattaatagactagaaaagggaaggacaataactgaaagaaaagaaatcaattagttattcatcaaagtttcatttagtcaatgactagaattaaacgagg

SEQ ID NO: 134496 - DNA, 505 bp, Cannabis sativa
agaacatgtaatgggaagagagaaaacacttatattacaagtaaatatgtaaaggagaacgagttttgtttggttataaggtacatacggtttattttagagatatatactcaaagttttgtatttatagtatgcataaataatttaatgatttttttagtagtataaatttgcgttgttataatttttgtccggtttgattaatatatgctccgttttaaatttataaaaaaagatttagaagtaaattatactacgtttttgttcagacccaattatttagaatttgaattttacaattacacgtgtcttgttcaagatactaacatagtctatttaattttcacaaaattagatgaaaattttactactactaacattagatacttatgctactaaacaattataaaattttataccgtttataaactcaaaattttagatattatattactatttattttttctaaatttatagttgaattgatagattattaataattaa

SEQ ID NO: 134497 - DNA, 832 bp, Cannabis sativa
  modified_base (361)..(363): a, c, t, g, unknown or other
  modified_base (762)..(764): a, c, t, g, unknown or other
atcgtcaaaatttgggtaatttgcccctaagtttctagcggtatgaccatatggtaagaactttcttgtgtaacccgagtctcgctttagttgttgacggcttagcgtagaagaaccataaataatacgcctatactaaaattatattccaaaaatgcaaaaatattttcctcaaccattactcttttacattttacaatatatcccaattataatttttccctttataagaaaaattaaattacaagaaaaataaattatttacaaaaagaaaataatctaaatattaagaaagacaaaaacaaataaattacttgtagcattataataatccttggaagctttgaggtctccatcttcnnngtgggtaggttctctacacttcctcttgcaattttcttgcttgaaatttaaaatttgatgaagtttttaacacttattggtagttgttttcatggccgaaaattgcattaaatcattgggatttttgattttttgataaaatgtgagtgtttgatgattgggtacctgcaacataggctatgggtaatgtatttttggctctagtttgatgacttttggtgaaggaatgactaattttgaaacttttggttgattgtgttccttgagaaaaattattgatgattatactttgtgagtggggtgtgaattttgggccaccttgcatccccacaccacgagataccttttttgggggtcgaggtttgtaccacgtgtctattggaatttattttaccaggnnnttagatctactcacaggtatgttgtttaacaccctaaatatgaactttctaaaacaataaaataaaca

SEQ ID NO: 134498 - DNA, 623 bp, Cannabis sativa
cttaagagaaacttattgtctataggaatgtttgataataatggctatgctgtcaaaatagacaatggcacactaaacatctctaaaggctctcttgtaatagctagaggtagactcaagaatggattatactacttgaatggtactgcagtaacagggacagcttcaccagccataaataatgtcaaaaacaacattgagttgtggcatttgagacttggtcatgtcagtgagagggggctcactgaacttgacaaacaagggatgtttcaaggaggtttaaatgggaaacttggcttttgtgaggaatgtgtgtatgggaaaagctgcagggtaaaatttgccactagtcatcacacaaccaaggagaaattggcctatattcattcggatttatgggggccatctagaatcaaaacccttggtggtgctagttatttcattagcatcatagatgatttttctaggaaagtttgggtattcctattgaaaagcaaggatgaggcattcaatgcctttgtcaattggaaaaagctgatagagaatcaaaccaaatgcaaaatcagaaaactaagaacagacaatggttgggagtattgctctaatcaatttgatgcattttg

SEQ ID NO: 134499 - DNA, 1272 bp, Cannabis sativa
gcataaaacccaacacttccaactagaggcaagcttggaatggtcatatgtcttcaaactcgtgaatgtcccatctgtggagagggagaggaaacaactgtacatctattttgggagtgctattttgcaaaggctatttggtttggtagtctttggggaatgaggaccgatcacctgcactgcctcaattggttagattggatgctgtggtttcgtgaccgggtgcatagaccgcagaacttgtcctttgatgaatttatgacgggggctctctgcattttccaaaaaatttgggacgctcgaaaggaagtgatacatgggaaaagtctcagccctcttcgggagatcatcaactcagtcaaccggctacacaaagatcacatgtccaaatggagaatgcgcactgaagtgagagtaaacaagcggattactgaagcaggctggtggaattgttgcacggatgtatcaatccagtcaaaccaagctttcggggtggctgtgtttcaagatcatatggatcgaattgaggccatctatgcggagaggatctctgctacaaatcctacactggtggaagccacaatgctggctttagcagcagagtttgcaagagaaaatcacatggagaaagttgcattctattgcgacaatgaagtggcgatcttaaattgctcagccaactgcatcacaaacagggatatcgacatctctggagtagctgatcgtttcaagcactcgtctcaatctctgcaggattttaaactgggaaaaattgataggaaattcaattacatggcgcacaattcagctaaatgggcggccatgaatggtgcaactggagttcttgatctaggaaccatggacgagaacatcttctctgacttcatggaatggtaacctgattaatggtgggaatgagttttctttagaattaaagctgtgttttttctatttgttactggtagtttgtactcttggctttgccttttttttttaatgaatgggtggaatacaccccctctttcaccaaaaataaataaataaataaataaataaccaccactacaaaaaacggctactttaagtgacaatattttaatcacaacatattttttttgtaactaaatatgacttttactcacaataaaatgttacttatgactaaatatagtcattagttactgtcactaaataatttagttttaatcacaacaagtattatgactaaaaatatatttagtcacaacagattataatttttgtgactaatac

SEQ ID NO: 134500 - DNA, 700 bp, Cannabis sativa
  modified_base (347)..(364): a, c, t, g, unknown or other
ggataagaatgagagcatcatgttccttttatagtatttcaactaggatttaggatttaattatatggattaaaaaaataaaataataggcaaataattgctttagttgccggccacttaatgagcctcactagttacaattttgccactttatttaaatcatatatctttttttttaataataccatatttttaaatttcaatcctataaatgttaaaactatttatttaattattaaataaaattgacatttatcttatttattaattagaccttacaaagtctctcacttaataaataaacccgaaaatctcttttcttcacaattaagtcattgcttagtgannnnnnnnnnnnnnnnnntagtctaattttagaattataaaggcttaattaaaactatttaactaagtctacaatcgatagtatctcaactagtgtgggaaccatgggcctatataatcaagcttctaataattagaactagaatttaccaagtaaattctctaacttattaatttctccatgtgccatcatagattcgaaattgtactctcaattatataaaattctctatacgtaccaagatataggtacgatatgaattatccatcgttctaatccaaattgtcaaaaatcttctatagatgatctacatcgaataaggataaatttaccgttctacccttcaatatattt

SEQ ID NO: 134501 - DNA, 836 bp, Cannabis sativa
  modified_base (734)..(741): a, c, t, g, unknown or other
cactcagaaaattctcatctcttctctattttctttctctaaattataatattacataatactaatattttataacaggaacttattttatgaatcttctaattgttggaataagtattttttttttacttatttttttttgttagtcttatcaatttttttaattaaatatatttatatatatatatataaaaaaaacataaatgtttaattttttattattttttttaatggaaaatgtaaacttcatcaagcaacaaactctgtcaccaaacaaggtaacaaatcagtaggaacagactccatactgaaggtacaatcaggatacaaattagagactctagctaagctatgagccactaaattagcagatcgtttaacaaaaataacctcaacggtacacaaatcagcaagcaaatttttacaattttgaatgacctgatcaaacaaagaaatcatacaaatagaactacgtaatgattgcacagccccaaggcaatcactctccacagtcacatatttaaaaaaattaaaaaatatttaaaaggcattttacatacatgtatacattattttaattaattactgtaaatatgtgcaaaaaatacttattactatttttcatacatttttatgtacaattagaaactttttttttttttcattttttatactatatatggtaataattaaacataaataaacttaccatagggtgtgtttggaagtaactnnnnnnnnactaggtagggtaattactagggtggtaattatacagtttagtaattacactatattttaaaatgtaaggcgtgtttggatatgatgtggtaatt

SEQ ID NO: 134502 - DNA, 612 bp, Cannabis sativa
tatgtcttgtttgtgaattttcaccaaggaagagcttatttgagaagaaaagaggatttagtttatttgttaattaagagactttgcaaggtctaattagtaaataataataattttatttgataattaattataattattaaatagatagaatttatatttataaagttagaattaaaatatgacatttgtgaaaagaaaaacgagttaaataaatggcaaaattaaaactagtgaggcccataatatggccggccacttaagtccaataaagctattatttgtcctttttaattctatttaaattataagcctaaccctagaaggaatcctataaatagaataggatggctctagttttcttaattgacttcaatctcttttgtcagacaactagaaaataaagagagagcttcttcttcttccgatttcaaaagttattcttcatttttactaaataattcaaatcacatggtgattgagagtatgcccactcatctcaaagtaatacctagcatagtgtggaagactatgtctaaccaaactaaaggagagaatattcatgtttaaatcttgataatgctctgctaaagaaatgaatcaagggctaga

SEQ ID NO: 134503 - DNA, 506 bp, Cannabis sativa
ctatacggtcaaatcggcatacaagatcaatgtatgcggcaacgtttgttgaaaagaatagatttggttatggttaggtgcttagggatgctagaggtcaggttttacatgctcgaacgaggtcttggagtggttactgtgaacctgcccttgccgaagctcttggagtgaaggaagccctcaattggataaaggcatccaagattacaaaagtcaccattgaaacagatagtctcattgttgtgcaagcttttcgaagctcggtgacttttacctctccatttggttgttgtatcaaggaatgcaagagggtgttttcagatttaatcaatgtttatttatgttttgctaaacgttctgctaattgtgtcgctcatggtcttgttcgagtttcatggttaaatgctaaacgtagttactcgtttgattctcttccgagtaacattattgatgtaattgtgcaagaatcgttataaataaagtttcagcttttattcaaaaaaaaa

SEQ ID NO: 134504 - DNA, 609 bp, Cannabis sativa
caatgggatgtgttctgatgcaagcttataaagttatagcttaggcctctcgtcaactgaaagactatgaacaacgctaccctacacatgacttagagcttgttgatggtttgttttctctaaagatatggcgacattatctttatggtgagaaatgtgagttttatactaatcataacagtctcccatactttttcacccaaaaagatataaacatgaagcagagaaggtggcaggaactagttaaggattatgactgtgagattctatatctccccaggaaagccaatgttgtggctgatgcactgagtagaaaagttcccggtcaatttttcaccactgttttgatagctcctcaattggcttctgagatggtcaatgcgaaaattgagttggttgttggaaagttgaacagcttaacactccaatctgatttgttagaaagagttagaaaggcacaattagaagatcccgagctagtcaagattcgagatgaggtgatggtagctcagcctaaagctcgagtttgtgttcctagtgttgttgaattcaagaaataaatccttgatgaagctcacaccacaccttattcattgcatccgggaacca

SEQ ID NO: 134505 - DNA, 778 bp, Cannabis sativa
aacaacattttttaaagtgttgcgaatttaattttattaatcaacctttaatataacaatattaattaatttttttgaaaaaaatattaattatatattttctataattacaaattttttcaaataattatttattatttaaatatatccatatccataattatttattttataaattataaaaaataaaatttcattcaataaaattcatgtttaattacaataaaaaatttcagtacataaaattcatacatataaatgttctttttataaatattgcattaaatacattgctatataattggtacaaacgcaaaaatatatgttccaaaaagtttaattcttcttgaaagttagaagttgttcatctttattttttgacaaatatacatatatgcacttatccatttcatgaacactgcaaaaaagaaaaaaaaatagcattattatatatttaagagcagtagaaagtgagtaaaaaattatatataacataaaatgtatgagtctgttggtttaccttaatcattatcattctatataaatataataatggatgagagcttataagtgagaaatgagctaatgttagagctcgatccattcactttaagaacataggacaagaagtatatctgcaagagagaaaaaacaaaaataaaaatatgagttaatggaataacccaaatgatatttatcatattacccaacccaataatattttcacagaattaaaaataattatatataaatatatattataataattgttcaaaca

SEQ ID NO: 134506 - DNA, 800 bp, Cannabis sativa
cgacttcccgagggactgtgttttgaaggtattgtgcccgagccatgcgatcccagaccttaaccccctctggaacggggacctgctgccaaaaagaatacttgggaaacttatcatcacaagtatactccttgttagtaaggaggtccacagatctcagattggcctcacttagaaagaattcgcacgacctaaggccgtggggaagagtcagcaagagcctgtgccgattgaccatctcgggggtagggactggtcctttcgagagggttgtaaaaaacaaaatattagtcagaaaacttagaatgaaaacaaggattaatccaaccgaccctaatgaaaacaatcacttacgaattttacggaaggtggttgtgctgattagggggaagccagttgtccaaaagaagttatctttgaaagatattttgtttggcaagtctgaaataagtttaaactcgttggagtgagtaccgagataatagaaaccccatgcgtcattcttcctcgctggaatagccttaatagagtaaagatactcgatttgcacaggcatagggcgctcccacttcagaattgtatacaagaccttcaaactggcaaggattctgtaggagacgtaatttagttggaatggggcaagcctgaggttgtttatgtaatccttgaagtagtcacggaggggaattatggcccttgcactgatgtctcaccactggctccctcaggggtctcacctgtaaggcgcgctggagggtaacaactaaactcaccaactcgcactgacctaacttggcata

SEQ ID NO: 134507 - DNA, 1637 bp, Cannabis sativa
ttcaagaacagatggagaaagaggcaggccaccaaattactgaatttgatagatttgaaatctggaaaagacttcacatgaacacgaaaggggaggtggagggcccagctatagaaatcgttaaacgaattgtaagtttaaagtttaattttatttgtactaattgttatgcttcataatttatttctaactctatttgttatgtttatagggcaaatatcgtaagcaagtggaagagggtgttgtacaagtggaaggtaaaagggatgtgttaaccatggcgctagggacagatgagcatggtggccgggtttgagccatgggttttggcgtcacctaaactaaatatttcaacacaccacgccctaaaaggaaaaacgccaatgggtcgaaccaagcctcatctgatttggagagacgcgtgcgtgagatcgaggaaatcaatagaaagctggaggataaagtggatgagctcattcgtcttattagttcccagcatagcagtgttgcatctagttctggtgttggaggagcatcaaatgaacaatcccatgttgaccttgcttccgatccagtagcacaaccaccgggtcttgtcaatgtctatattccaccagatcccatagcacaactgtctggtgttgccaaggtctctactccatcaccactgcgctttagagaaaaatctgctgcagcagcagcactgccaccaactggtggtagttcagaagaggtaatcttaatgttattttacgaattgatctaatgcaagattataaataaggtcaatttacaaattgaattgttgcttttttaatttggatttgtagaccttatcgtgttggatgcaccgtcagttgcagcctgatgggatgatactcaaggttgcttcgggtcacattgtgaaggagaaatatttaaaagatggaaagttctgcattaaaaatgatgaatacctacacaaaaattatcgtcgggtatttatcgaaaaattcaatgtggagaatgcactgctcccatgtcccatagctgaagatttattggcaacagtagatcaagctataaaatgttatgtagcatggtcgaaagattatcttacacctgttggaaaatacttggtatgtttcaatttgtttacttaactattgtgcttattcattaatgatattgctaactttactgtttttttccatatatatagacacagccacccactaagaaacttcaaaagcaacccgtgaagagaagcaaaaaagcctgagaggtcgagtaaggcaaaaggctatggtcgttatgtccaaccacgccaaacttcctcaattattaccttttggaactccgtcaaaaggtggcccaagtcgtccataatccaattccaagttgcttatgagctatttggagtcgaagatgactttatttggcttgttaaaagtgacattcaagaattgtgcagcatgcaatacttgggagcccaaccaataagagtttggtgcaagtatgatttctaactcttaatgataaacttgataatattcttttgacatggatgattattaattatgactttttatcaggtacatgaaagaaagactgttggacaatggtgggttgtgaaaaaccgtgtttttgcaaatgtc

SEQ ID NO: 134508 - DNA, 567 bp, Cannabis sativa
  modified_base (536)..(538): a, c, t, g, unknown or other
ttaaattcttgtttctatttagcaatcgaataaataaattttgaactaaataaactaagcaaaattaaataaaacagacaaataaaatgtttaataatggatgtaaaattatagatatgatttcaattgctttgattacccaattgttaacattaattaaccattcttcttcctcctaatcaatgacagattataaattaacttaaactctttttagattataaaggtcctaagttacatgccaactactacatctctgagatagaacaatatacaatttacattaagcaataatttaaaagtcacataagctatgtgaatactctcgtttaacatcaaaacctatgtctattcattttgagcattctcaatactcacttttcagattttgtattgagattatagatcatgcataaggtagccaatcaaacacatgtaataagcacaaatatgaataaatcacaataatagaaaaagaaaaaataatcaaatagcattaatccatagaataatctcagtcaatatccatcaaatcnnnaaatagagagtttaactcataatcaaatc

SEQ ID NO: 134509 - DNA, 1238 bp, Cannabis sativa
aggtctaggtctaggtttgggttgggggcccaagtcccccatctaggtcacggttcagttctcaagtcccaggtccgagtcttgggtcccaggtcccgggcccaatcccaattctggttctagtcccaatccaggtttagggctcggtcctagtctcggtctgggtcccagtcttgatctcggtctgggtccaattcccaggtttgattctgagtcctgggtttaagtctgatttctagtacgagtccagctgtaggtccaagtttgagtctgggtcttggtctgggttggggtttcggtccgggtctgggtctaggttcgagtcttggttttggtttggttcttggtctgggtctgggtctgggttctagtacgggtctaggttttggtctaggtcctgggtcacgagtcctagcgcaagttttggtccaggttcgggtttgggtctgggtatcgatccctagtctaggtctgggtccatatttggttttgcgtctagatcttgttctcgattgaggtccaattcctgttccaaggtcatcatttcggttcttgttctgatttcgggtcccgggtctgagtttggtttttgatcctggtctagaaattgttccaggttggggtcttggtacgatttgaaaatccagacaccgactatgggttaggtccaagccgtggatcgtgggtcaagatctggatcccaatcttgggtcccaatctcgttctgattcagatcttgggtctcggtccgtgtctatgttcgtgtttgtgttcgtgtctgggtctgggaccgagcactactacaaattacactattcacatcggtcaacgctactattcagtgttgaccgacgtgaatagtgtccaaataattggacccgtctgtttaaaaacgtcactaataatatacaatttgcgttgtttgattaaatgatgataaaaaagaaaccgacgaaataaagtaaaaatttaaaaacttgtttttcattttgcgtcagttggtaatagtcgaccattgtgcttgcaaagttttaaaagtgacgtgaaatataattgtgagagatagaaaccgacgcaaatttaataatatccctaaaacccaaaaattatataacatactgctcacatccctaaccattgtctcctcctgcgaaattgctctggccaaattggccattctcttcaaccctgttcatcctcttcgaaactgaccattttcttgttggaaatattttacc

SEQ ID NO: 134510 - DNA, 683 bp, Cannabis sativa
gcggcgtcacaaccatcaatttcggtgggcggttactttcacacctagcggtgcggtcatggggtttttaagggcgtttgtaagctttgtctttcgactttattgtctgggcaaggtacgcaatcgtttgaaattatcttgtggctagcgtacgtgatagtgtatgagtggttttttggttgattgtgttggtaggctccgtgctcgtgcatcgaactaccaatcctccaaccttcttcagggttgctacaagagcgctgctcatttgagcgcaatgcggtttcctgtgtttgctacctcggacggaatgattcatttggttgcctttttcctcctttgtggctgtaatggctgcaagggggacctcgtagcagtcctcgtgtcccgaacgtgcccttcgttattgattgtgtcgtttcggtcctcgagtgcctgcttgatctctcggatgcggaatgctacgcgagtgtgggggtctgtgaccttcgaacactcaaattttccatttaaacggatgacgttcgtggggtgtactgatcgtatgatctgcatcttgcggcgtccccgaatgagtgctacctggttgatcctgccagtagtcatatgcttgtctcaaagattaagccatgcatgtgtaagtatgaactaattcagactgtgaaactgcgaatggctcattaaat

SEQ ID NO: 134511 - DNA, 766 bp, Cannabis sativa
accagctactgatggtaagtaacctaaattcaaacaaagaatttaaaagtattattgaaaaaagaaaatttgaaactataccaccaagaattctatttaaaaaacaaatttttaattttatttattattaatatatacaaattattaattctgtactacggttacatttaagaaaaaaaatatctttaagatttgaaaaccttatacaacataggatttaaaaatattattgaaagaaaaaatttaattttatttattattaatatatattataatgattatatattacaagtaagataagtgaatgatagtgattttaaatatagtggccactacagttgagatacatccattttgattatagtgtgaatacaaataaaatacagtaataacaacaattttaaatatataatgcttttttataataaatttttttacaatattaattttatttttctaagtaaaaataatgaaaatttagtaatataattactcatattactaaaacaatattatattaaaaatattaaaatttaaaatttgataattttatcattaattatcaataaatgaaatacgtctgcacgcgagtaaagcgcaaattatttcctaattaattaatattacttgaaatatttacgtattatatatatcatcctacataaatttaaatattgtgctattagaggagtattttgaaaaaatatatatgaattaagcaatttaatcataaattttataatttcttaattgcaacaagtgattt

SEQ ID NO: 134512 - DNA, 876 bp, Cannabis sativa
  modified_base (419)..(421): a, c, t, g, unknown or other
tgggttgagcaatcccaaacgagaaaaaagcgaatgactttttagagtttttgggaaagtacaaacttttatgttttttttttcggaaggataaattttaaatgttttatgaagtgttgacactagactaattgaccacaatgaaaaagtagttaagtaaatgctcttggcatttttaacagcggacacgtggattttaggtgttcaataccgtgtctggaagggtaagacagcgtgttcttaaaagattggtctggtttctctttttattcttgcgcacaaataataaatatttgattgccaaatcttgatagagaatcgcatcaagctaaaagggaaaacttcttaaaatagatattaagcaattaattcactaaattgactttaatatgtctacaacaatcatccctaaaatcatnnnatttggttacatatcacgtagtgtaaatacagtttatgatttgaaaatcatatagctatgattttcccgcttttactgggtcaaaatgatcgtgttttaaatcacgtctttaattgttgtttctagagttgtctcgacagaaacttggttctagtgatctcaatagcgaaccgggaccattcttccttctgaggtcgacgatgcatgtctggtgtcgatcacagttcttatttacaaagaattcttcggtactcatttgaatgttagcttctgacttgccagggttgtgagcctcgctgatgctaatgggatgagttatatgaggtcttcccatcacgagactagcacctcgcttacttgttcttgagtcgattcgtctgtaacacttaatttgtatcctaaggaatttcgcaattgatatatgtcgcttttgtcttccaatgtgtactgtcctt

SEQ ID NO: 134513 - DNA, 1190 bp, Cannabis sativa
aaaactaagacaaagcaaaaacaacacgacagataactgagcctccaaataattaaactaccactgccacctgtgcaacttcaatcaattggccaaaccaaaatttcaattcaacaactctaggtataaactcggatgcacaagttaaaaaaaatcacgtatagatgcaaaacacttcaatttgaacatatcacaatcattctactcttaccaacgttccaccaacaaatgttcaatattcttgcatgacctacctctctccactaatatcgacaacccctgcttggaatcaaaaggtctttctcggttgaaatgtcttggcttaggtgaaaggtagataaaaagtcatttaggctacattataccataagcaaaacataccaaacaagcacccacacttatccatacttttatcccaaagaaactggtaagagaatgcacttttctctttatgtgcctaacatcatttttcacaattttttttctctttttttctttttttttttttttacttttttttactttgtttatatatatatattttttcttcttttctattgatggaaatgacacttctcataaatttttctcaatctcctacttccaaaataatacccacttataacacttcatctcccccaaacttataaaaagcatatggcataataatgtatattgggcatgaaagtaattaaaggaaacacattaggctcaattaagtggttaaaattttgaaacaagctaaggctcgacttgggtatactaaggacaaaattttacaggtaatcttcaagggctcaatcggtccaaagaaaattgcctaaatcattttccaaaaaacaatcatcaaggatttcgcttcgagagagtaagtcacgcaagttctattccattccaagcaaacatttcacaaacccaagtagaacacaagtgatactatccaaaaatcaataatttacatctatatgaaagaaaatttttacaaggcatccaattcaatccaaagagtttatgaattaagcacacagtttaaatttcaatccattgcacacataacaatagcagtttaatcagtagactggctcatttatcaacacatgaaaattaaaaaaaaaaaaactaaactagttaattaactaaaaacaaagacagtaaaaacataaaaattttaaatccctccccccaaacta

SEQ ID NO: 134514 - DNA, 676 bp, Cannabis sativa
gaattacatagagaagtacagaagtgctaaaggattttcctgcaaaaaattgcagcagccagtcactcaccaatctgccacccaacaagcagaacccgcacaccagctttcacaccagcatttagttcaaaaccaacactgcacggctgttaactctacagagatgccaactccaacaacactatacaatcctacccgatccaactgtcagcaagttggagataaccatggggtggctcaacttagtactgattcgcaccagcaaccagcagcagtaacaaggcaccagtcgatcaccttgaatgcagatgacagtatcctgcttccacgtcccttagacaatatcacttggactcctcctgttatgaacatgcttaaaatgaatgttgatgctgcagcaaatttcaaaaatcagacactcagaattggagctgtgattcgcaactataaaggagatgtcattgctgccctctccaaacgtgttcaaggctgctttcgtagtgatgaaatggaagcaaaggcgctttttcatagtctcaatcgggtttcacaatgtccattttcaatagattttgtggagatagatgcgctaagagtttcctctgctctgaactcttctcataatgatttatcatgttttaatgatctaattgatgatgtacgttgtcttttatcc

SEQ ID NO: 134515 - DNA, 1200 bp, Cannabis sativa
  modified_base (136)..(136): a, c, t, g, unknown or other
attgtactaccatgttctcaagatataactattgggaagatccatttggtcaattttaatgaacaagtcaaaaaacacaagtaatacagttaagctaaaacctaaccatctcaagattaagatctattgacctaanatcaactaagtgatattaacttagaaagatataacggtaaatttatgatatcttatccaatgtcaatattggtccagtctgatgtatactccatacatttgatactagcatactttactaatgtcctgaaaaggacataccacttattcaagtgtaggtaaactttatcgctgattatcacgtcagtgtaaatccaatacactcataaatcatgagactaaaactttgaagcatataatcacaattacttttcactgtgatgacatcattgtaattgtgaatacttatatgttctagatttaacaaaaaattatatgttaaaccataaatatgaaaataacatgtaagcttaaatgaattttaatcttctattgatagcaaataaggttttgaaatgagttttgtttagggcataaaatcccaacaaactcccacttgtactaatataaaactagaagtgcatttcaattaatctattgtcttgatatccatatcaattgtagtgtgtttgactatacccaaataacaggatccgtaaggttgtagcaagcaatagctttgttcaccattacttccctttgtgttcataaaatattatgaaacatcattttttatatgtattactcctctaggatattgaattctttacttcttaataagtgtatctgaacatacggaagatacaactctcattctatccaaaattggaaaagagataaaacaaccaagaactttattcagtttgaataattttctagtgtcttttaaaagtaactcagttattttgcttcactggtggaactaaattattatagatggatttttacacccttctaaaataatttctccacctttagagtaatcaccatctcagatatcaagttctgagttggtgtagatataaggattctaaatacacccctatcttctaacatataggttcatttcaaaaattatttctagaattggatttggttagacaatgtgtggttggaaaacaaggatcgggttttttagtaaggtacggaatgtatcgtcaaatattcaatatgattccacaagat

SEQ ID NO: 134516 - DNA, 1110 bp, Cannabis sativa
  modified_base (647)..(651): a, c, t, g, unknown or other
attcaagggctcctgagcatactgcttggcccttgcaccacccttcaacttagcctcgcgcttcagttgaatcaactgatcctctggatgagctcgttcggtccgactagcaccagatttcctgttcttccctatcacggacttaggagtaaagtccttgggatagagcccgtacctcacaaagttatcatcggaggtcaactggataatatgctggtcttcccctggaaaccgagcaagtttttgagctctatcccttagagcaagagtgagaggagggcggtgatatgtcagaatctgctggaaccgagtgcaagtgatgcccgtgccatccaccatgaagtactcatcagtaaagcgcccaatcttgctgatggtcgtatcgtccgtgcctgtcaaccacttgaagcctggttgagagaagtagaagtaccccgacctgccttgcttggaggtggacttcaaatcaaagaaccaagcaacctcgtggggagagggcataccccatttctgggaggcatagaggatgaagagggcagacagatacttgatgcccttaggagtgaactgggccgggcagaggctgaaaaagtctgccacatccttgaagtattgatacaaaggcatcaacgctccttgctgaccannnnnacctgaccaggcgcacatccccttttcagggtttgtggcacgattgctgtgggcgggaatgtagcattccagctcgcccaggtatccgccctggtcaagagttcgaaggtgctcctccgtaatcttgggcggaaggcttacccacctggtgcccaaggcaccctgccttctatgaggaaccgtcgcagaaagttccttactgacgaagtccacgcccttaaccaggatggctccgtcagcatcgattggctccccagcctcattgtcctccccgtaatttgggggtgcaacctctgcctcttcctcctcctcggaggatctgccaggacgtacatcgtcctgcccctcgatctcctggacctcaccgtccccttcatgatcttcctctatgtggacggctggatcctatttggcgctgggcaaagcggcatgccgagcaacttgagggtcagacgcgtc

SEQ ID NO: 134517 - DNA, 786 bp, Cannabis sativa
gcttggacacaacccgtagtcggtgtctcgatcttttaatcgtaccaagacccgaacatggaaccatttctagacgtggacccaaacccatactcaaattcaagaccttaaaaaaggaattggacctgcacacataactagatctagacacggaaccgaacacgaacgtggacccaaattgggatcgatacccggaccaagacccaaacatgaacctagaattgcgccaggtcctgcgacccagaacatgcagcctaggacccgggacccgggacctagactagaacctagacccgtaccagaacccgaacccagacccagacctagaccaagaccaagacctagtcccaaacccaaacccaaacccagactcatactagaattcgaactcaaacctaggactcagactcaaacccgagactcagacccggatcgagatcaggactgggacacagacctagactaggaccgagccctaaacctagactgggactagaacttggattgggatcgggacctgggaccctagatcaggaccgagacccaggacccaagatttagacttgggacctgggaactgaactctatgacctagatgggggacctaggccctaaacctgaacctggacccagacttggaccaatgatctggacctagatgggggacttggacccaaaactaccccccaaacctggggttcgagacccaaaactcgacgccaaactcgagacataggacccgaccttagacccgaaacccaagacctgactaccgggacacaaccc

SEQ ID NO: 134518 - DNA, 622 bp, Cannabis sativa
cgatctaggtcggggttccaaggcacaagtcaatgtctgagtcctaggtcttggtctgggtccatgttcgggtttgggtcctagtcctagtttcgatttcgatttagtgtatgggttcgggtttgggtcttagtctaggtcgaggtctaagtcctggtcccagtttgggtctgggtttgggtccaggtccgagttcgtgtcccaagtgcgggtccacgtctggatctgagtcacggtcgcagtctggatttaggtcccgagttccgatccaggtctgggtcttggtctgggtctaagtttgagtctaggttcgtatccagatccctatctaggtctgagtctgggtctaggatcgggtcctaggtctaggtctgggtccgggtctcggttccggtctgggtacacgatcgtgtacaggttagggtccaagtgtctcggtgcgtgttcggtactggtccttgtctcgcgtcttggccaagtctgggtctgggtcacggttaggttctatgtcctgcatcccgttctgtgtccgtgtttgggttcgggtctgggatcgagatcggggtcaggtcttgggtcccagtcctagtccttggttccgattctggctctaattttgagt

SEQ ID NO: 134519 - DNA, 640 bp, Cannabis sativa
taaaagcaagtatgatccctgtgtttactataatgatcatgtatatctacttctctatgtagatgatattttgatcataggaaaactaaggagtgaagttgacaagatcaagatgaaactgaacagtgaattcgatatgaagaatctagggatagcaaacaagatactagggattgacatcatcagaaagagaccagaatatataatgctatctcagaagggttatcttcaaaaggttttggataagttcagcatggacaaagctaaacaggtaacatctcccattgcccctcatttcaaacttacacaatctcaatcaccacaatctgaagtagacaagagatacatggataacataccatatgcatcatgtgttggcagcctcatgtactccatggtatgcacaaggccagatttggcctatgctatgagtgttgtaagtaggttcattgccaatcctggcactgaacattgggcaacagttaaatggactctaaggtatgtcaagggaaccttggacattggattaaaatttcacaaggacaacatttctccctgtgaagtcactggctatgtcgattcagactatgcaggaagcatagacaccagaagaagcctcactggttactgttttacagtt

SEQ ID NO: 134520 - DNA, 988 bp, Cannabis sativa
aattgttttcgaaatattaaagaagtagtcaataggctgcgcttcgcatgcaactatttatagacattttaaattatatgtatggatatttattgaataataaaattttaaaataattttaaatttatttttatgtgtataattttaaaatgcatatttatcaaaaaaatttatatagaaaactctatcggttactctatcggttttttttttttttttaaaaaaaattcatcatataatttctcatatacaaaacaaaacatcttcaaatgtatattatagtaaaaaaaattaaaattgaacaatactgacacaaatagatataaaacagaaagaagaccgtaaatttattaaaaactcatcatataatttcaaaataaatgtcatcaccgtatctcacttatagttactactacatttaataatgtcattattgtatttcacttgtaatcgtcgttaatatccttcccaattagtatattttgtacgtaaaataaatcaaataaagtactcacttttatacataagtgaatcattttctgttataaattaattacctaaaataattactcaataagtgaatcaaaaatttgtaagatattgaattctcttgatactaaaaaaaaatggagagaattgataagttttatatgatttgtattgatgagaagtaattattatttttattcatatttttttctgcttatttttcatcacttattaattactcaacgtgtcattgttgtgatttactttatattttttttttttcactcatttgattttttttttagtatcaagagaattcaatatcttacaaactctaattgtctcactatttaagtagtaaaaaaacactctatcaaataaactttgaaaagttaattacttgaattatgaaattaagatatatatatatatatatctattctatataaattgtgtctatataactgaaattcttggtttttgagaaatttatgggtaa

SEQ ID NO: 134521 - DNA, 650 bp, Cannabis sativa
aaaagacatatttgctatagttgttatagttcaagagaatttttatacaaaaaaaaaattaatagaatgtgattctgcaaattttataattcaagggaaacatttagtacagtattacaaatttaatgaacgcatttcactacctatactattaaatttgtatttcacgtgcgtagcacgtgtttcaataactagtaattattaaaatagataatgtcgacaataactaaaataaacaaagttgattcatccaacacttaattaataaaaatacaaccatcctcgttgtgatcttggtgcaattagattttatacaatttcaaataataaattttaaagatcactacctctaaaaaaaggtatgaaaaactctttttttttttatcaattaatcatatctacctctaattttatatttaattgaaacataaattaactcttataaggaatttatatagagagtatattaaagtaacaggagtaaaattggtaaaatatttaaaaaaaaataaaataaaaaagaataatataacaagaatatagagtctaatttccttttttaaaaaaaaagagaaaattacactctataccctttttatattgtcctcttttatttttcccttcttttttaaaatctatcatttttacct

SEQ ID NO: 134522 - DNA, 925 bp, Cannabis sativa
aataaaggattcttctctttaccgtttgctccgagcccagacagctcgctaatcaggaaatttaattgcccttactgtataacttgtcacatatttaatctacatctttcaaacacttaaaactcaaacagatatcaatataaagatgtgtataccatacacatattcttagtatagatagtcagtacgctacttctttccatcatacactatatttatctaagcaagtaagacaataacaaataatataaacacttactataccatgagtcgacctctcttcgcagcaaatgtacatattcgaccagtcttcaggacccttaaaaccatggctgttctgataccaagttgtaacgtcctattccatagggacgccacgtgtgtgattttataaactaatttaatagttatagattaattagttattaaaaaatgttatgatattaaaaacttgactaaaataaaagactaaaaacaggcattataacggcataaaaagcgtgttctaggaatccctgttataaaatgttttacccaaaagactatagataaaagcaattcaaaatacagcagatacaaccagtccaaaataactcctataaactcagtacgctggccagtggggtcaatatgtatattgttggagaaggcagtcacctcatggcaactctaatttttcattgtccttacctgcaccacataacacgcatgagtcacaagaactcagcaagaaaagcaataataatgatcatatagtatattatttgaacatttatacacaatcagaatcaaaacattaggcattgttcataagatgaaatctgaatcactactggcatttgccatgaataagcatatataaacagatatctagttatacaaaactattatagtaataatcagaatcatattcatttaaaaatat

SEQ ID NO: 134523 - DNA, 1468 bp, Cannabis sativa
  modified_base (129)..(148): a, c, t, g, unknown or other
  modified_base (497)..(511): a, c, t, g, unknown or other
  modified_base (876)..(878): a, c, t, g, unknown or other
atatggttattcatgattatagtgttgttgaaacggtggaatataattatgattatgtgtttcaaaagttttgtcctatgatttatcagtacattggatttattctgacatgataatcagcgataaagnnnnnnnnnnnnnnnnnnnngtgttatgtcctttccacgacattggtaaagtatgctaagatcggatgtatggagtatacatcagactagaccgatatctacattagataagatatcgtaagcttaccattatatctttctaagtcaatatcacttagttgatcttaagttaatagatcttaatcctgatatggttatgtttgatctcaactgtattatttatattcttggagttattcgttaaagctgactaatggatcgacccaatacttacatattgggaacatggcagtgcaattgagtgagagcgctaatcatagatatggaatctataacttttataaatgcatagaagtgaaatgatgattnnnnnnnnnnnnnnnttaatagagataaatgattgagaccttattttagtaattatattagtttactgaaatatcatttataggcagctaagtattttatggataaaatacattgaaaggtagaacggtaaatttatccttactcgatgtagatcatctatagaggatctttaaccttttaaattgaaacaatgggtaaatctcatttatttttggtaatagtgcgttttatgtaattaagagtgtaattctgaattcatagtggagcaaggaggaattaataagttagagaatttacttggtagattttagaactacttattggaagcttaattatatagggccatcccatactagttgagataatactgcttgtagannnagttaattggttttaattaatcgattgtaattctaaaattaaactatgtcttatttatgaattttgtaaggttaattctaaaagaagttttaagatttatttgttaattgagagactttgtaaggtttaattaataattaaaataataattttatttgataattaattataattattaagtaaatagttttgacatttatatgattgaaattggaaaacatagcattagtgaaagaaaagatgaattatcaaataaaatggcaaacttgtaactagtggaatctaccttgtgtgggctagccacttagtgatttttccttattattttatcttttttaatccatatttaaatcctaaaccctagttaaaatactataaaaagaataagatgctctcattctcatccatctcacataagctagttttcattctttgttagacaactagtaaaagagagcctccttccttattattctgaattcctctccttgctcttcatcaatttctagcctttagtgatagagtatcatgcccactcatatcaagtcaagtactcaatcatagtgtggaagactttggttaaccaaact

SEQ ID NO: 134524 - DNA, 589 bp, Cannabis sativa
gtccaagtttcttctctttttgtctaactcacttccttttttctttgtgagtttcgggaatatccccattcataggtccgagatccacatctatgaattgaaaggtccgaatgatcaactctgccatcagttgttagaatcaataggtcttcaaatcgttcatttaaaaaaatggaaaccctttttattggatgatcatgatacttcccaaaaatcgaaattcttgatcaatggaggaacaatatcaccatttttgttcaataagatacaaaagtggatgattgactcattccatactagaaataatcgcaggaaatcttttgataacacggattcctatttctcaatgatatcccacgatcaagacaattggctgaatcccgtgaaaccatttcatagaagatcattgatatcttctttttataaagcaaatcgacttcgattcttgaataatccacatcacttctgcttctattgtaacaaaggattccctttttatgtggaaaaggcccgtatcaataattatgattttacgtatggacaattcctcaatatcttgttcattcgcaacaaaatattttctttgcgc

SEQ ID NO: 134525 - DNA, 857 bp, Cannabis sativa
  modified_base (781)..(788): a, c, t, g, unknown or other
gacagtatgaaagaaaaaaaaaggagcttggacagtaaaaaagaaattattgccgtgtggcagtattattgtaaaacttggggaaaaacagtatttttgtaagtttcccaatattttctcctcattgatccaatctaattaataattagatttggaaaaaaattatctgatccaattcaacttcaaaattcagtccatttactaattggattggatcaattttcaattggacattcaattatacactaaaattttaatattaacttaaaaatataaagaaaaatacttaaaaattaaacatcactctttattttaatttaatactctataaacataccatcattacaattgtaatgcaactaaaagtaaaataattataacaataacattgctaagcaataaaataaaacaaaatatcatgagaataaatacacaaaacaatcaagtgttacaaatttaacacaaaaaatccaataaggatataattaatattgtattttttaatattttttattatataaataaatataagaattacaaatgaatgtaaaaaaagaactacattcgatgaatcgaaaacttaacattgctattacaagaatagcacatccttgtggacaccttaatattttagcagaatttatagccagacaattaaaacttagagtttcatttcacaaagcaatgaaaaggctattgaattagttgaacaggcaggtggttttcggtgctggttatccaatcacaaaaacgactccataggcttttgctttcgcgtctnnnnnnnnttgcagtcatggtaaaatcttggtttatttaatcattaatcatcagggactcccaagcacatgaattct

SEQ ID NO: 134526 - DNA, 1002 bp, Cannabis sativa
  modified_base (220)..(231): a, c, t, g, unknown or other
tcgttaaagttgaccaattgaatcggcccaatacttacattttgggaacatggtagtgcaattgagtggaacgctaatcatagatatagaatctatatcttctacaactattataagtaaaacgataatttcctttgagcttggcttaacgcgataaatgatagagctctcatttcagtaattatattagtttagtaaaatatcatttacaagtagctannnnnnnnnnnnataaaatacattgaagggtagtacgataaatttatccctacttgatgaaaatttacaaactgtccaacccgaataaatcgtctaaaccaaactgaataaatcgatgaaaaatataacctgaaataatacaatgaaaatccaaactgattaacctgagtaaaccgaattaaactgatttatatatttttttaatcaaagtatatatattatattacatttaaattatatttattagttaaactattttgtatttaaaatttgaacattttagtgtttaatttaaaacttaaactttataattaataattgttattgtatttagatattgaagttgaagtttaaaatttataccatattattactttttttttattattttattcaattattttatgtttacttaattatatttatcttatattaaagttcttaaaattaatttaaactataacattttttaacttgaaatataaataatatatttttatttttttcaatttaattatttgaatactagaaactaacaataattgaccaagaaaactttcagcaaatgcataaataaaagaaacattagattttatcatttcaagctccccaaatggcccaagaaaactttcatcttttatcattatgaagtaaatttcaaaacgacataatgatttagtgcatgtttgacatcataactaaaaaactattttttgtttttaaaaacagaaaattattttttgaaaacaatttggcttgtttggccttgtttttttgaaaaca

SEQ ID NO: 134527 - DNA, 710 bp, Cannabis sativa
ttttattttattattcatatttagtttttagtatttttatttttttaaaaaaaatgtagaagaataaatcattagaaaaaattaaaaaaaaaaatcaaagcaaaagatatatagttagagaaaaatttattagagaaaaaatttagattttttttgttaaaataaatttagattttttaaaaaaaaattagaaaaaaaattgaaaaaaaagttattttattattcatatttaatttttttttactaacttgttcttctagttgtggttttaattttcagatcttcctttagaaatatggcgatgtacaatcaacaatattatgatccatattatacctcgccacaagtgtatcaatatgatccatactacgatacttacacatacaatcaacaatggggaaattattctagcacttcctacagtggaatcaatcaatatgttgaaccaacttgttactatcctcctgtaacaccacaagatcaagatcattctcttattgatctactcaatgcttaggaggcttctactactcggatggaatagtataatgcacaatttcaacaacctactcatgttgcaccatatagtgaaaagccaattactactgaggtgattaaaatgttagcatctaataccttgcagtttcagcaaagcgttcatgaaactatgcagagccttcaacaatctctacaaaagttagagaatcttg

SEQ ID NO: 134528 - DNA, 592 bp, Cannabis sativa
  modified_base (543)..(555): a, c, t, g, unknown or other
cttgtttaactaagagaacaaagtttgaatttctgaaatcggataatcgagtagagagttatggtcgttttagtgcgaaaatttggacttttcccactgcctggaatcaggttaaccggtttcaaagagattaactggttcaccaaaaaccagttaaccggtgaaccggtttgcccagtggcagtctcattgttcgcgtccaacggctataaacgactagttttcattcctgcactatataaactcatttttcaatcaaaaattaaggttggttgagcttctattcatcatataacatcattctaagtgttctaaactaaagaattatcatcttttcataaacacaccaaccacacacacttgttcttatcttctctcgtgtgcttgcaattctctctaggattttacattattttttatctcatcagagagagtttgctttttatttaaaaattacatattcactgtattgagagatgaggttggcaccggtagaaaaataactcgactgtaggtgaggttgacaccgattttgtaaacaannnnnnnnnnnnnagattggcacttcaacaatctggtgaggttgatagtc

SEQ ID NO: 134529 - DNA, 655 bp, Cannabis sativa
ggttgatattttgtacgaagaactcaatattgacaaagtgcagtatgatttgaaattgaaaatgaattacaagtacatgaaaggcttaatgtatcgccctgaagttattagagatgataagcatgtaggtcatttttgtctatgcttgcgaagaaaccagatgaattactcccttgtttgtgactttgttaaagaaaaatgtttgtatcgatcctagtcccacaccaagtattgttaaggatactcctagcgaggttgggagttttcttccagaatcaaatccagaggtgttgattgtcgatgtgttacctaaattgaacactatgatgcctagtgctgacattgtagcacaaaagccctttattgatggtttttgtgatggtctagaccttgaatgctatgttgagggcaatgatgacgtaagagacgaccaagataagaggtccctactactgcagctttgaacttgactctactatcgtaccaaataccacccaggaaactgacacaaaaaagaatgcctcatagagaaaatcattaaacacctagtactattggtagtcgtccggatggaaccagtaatgctagagggaccaatgatggtagtggtcctagtgttgctagagggaccaatgagactggatttagcgatcca

SEQ ID NO: 134530 - DNA, 502 bp, Cannabis sativa
aagcttattaattataagccagtagttttaattattagaaaagttgcgaattcacatcttcaactcattcaatcagatattctccattacatatcaatactcttgaagtacataaaagttatagtctattttcttaattatactctttaatttacattgtgcgcaccatacccctgagaattaaatatgtttaattaaatatgtttcttttttctttgtttgtttgtcaaccttgtagatatgacaaaagtatccccattgaagaaagaaaggagagcttcatcaagtcggaaaaaaaaaaaaaagaaatgagaatgaagttcccgtatattgatcttacatttctattctttaatatattttaaatagtaattatttcgaatattataattacttgtttacattccaaaaaaataagccacattctatgccaaatatgtatttcaaataactagatagtaacatgtcccttattttgtgtgtaggatttagatgcaaaaaa

SEQ ID NO: 134531 - DNA, 2572 bp, Cannabis sativa
aggatatctataaatatatttctatttatcagtaatattcctagaataaatgtacaagtttttttctatttttttgaatcaacaaaaaaaattcttaataaatacagttcctataaaaaccctatttcgactaacgaaacaaatccaaatataactcagtttatttcgactataaaaaaatcaatttctaatcttaataagtcacagactttttatgacttatcttatttgtcacaagcatatgtcttttataaattatcacaaccccccttttttcacttttttaatttatataagtcaaaattaagatctgtctttcaatatcaatataagggaacatctttttttcttaagaatggaataaaggattattttgttggaacgcaggaaatttttaattccgaattaagacatagaaaccccagcaattatggaataaatcaatggaaaaattggttaaagggttattatcaatatgatttatctcagtctaaattaatacccccaaaatcgcgaaatatagtaaagaaaaactctatagttcaaaataaacatttcaagaaatttgattcaaacgaaaaaaatctattaattaactccgaaaaacaaaaaaaaaatgttaaaaaacaaaataaatatgatcttttatcatataattttattaattatgaagataagaagaccccatctttttatgaatttccattacaagaaaatcataatcaagaggtcctttataattacaaaaaaaataaacaaaaaatttataatatgttgatagatattcctatcaacaattatcgagtagaagagaatattatagatataaagacaaatcctgatagaaaattttttgatttaacaattctcaattattgtcttcgaaataaaatctatataggggcctgggtcgatatcgatactcaccccaagagtaataaatatactaaaacttggtctaacaattatcaactaattgagaaaatcgacaaaaaaggtcttgtttatcccacgcttcatcaaaatcaagaaatcaacccatcaaaaaaaaaaacactttttgattggatgagaataaatgaagaaataataagttgtcccatatccaatttggaactttggtttttcccggaatttttgatactttataattcgtataagattaaaccatgcgcaataccaattaaatcgctccttttaaattttaatgaaaatgttagggaaaataaaagcaccgctgaaaataaaaaaagaaatatttttctatcaatattttcaaatgaaaaaaaatatcttgaattagaaaaccaaaatcaaagagaaaaagaattcacagttcaagaaaatttggacttaactctgtcaaaccaagaaaaagatattgaagaaaattatgcactatcaaagatgaaaaaaaataaaaaacaatacaagaacaatatggaagcgggatttgatttcttactaaaaagatatttgctttttcaattgagatgggataattctttaaatacaaaaatgattgctaacatcaaagtatattgtctactacttagattaataaacccaagagacattacaatagcctctattcaaaggggagaaatgagtctggatattttaatgattcagaaaaatgtaaatcttacagaattggttaaaaggggaatattacttattgaacctgttcgtctatctataaaaaatgaagggcagtttattgtatatcaaactataggtatttcggtgcgtcataagagtacacacacgattaatcaaaggtaccgagaaaaggaaccggttgataagaaaaattttgatgaagtcatttcaaaacatcaaaagatggctgaaaatagagacaaaaaccattatgatttgtttgttcctgaaacgattttagcccctagacgtcgtatagaattgagaattctaatttgttttaattctagaaatcaaaaaggtatgccgagaaatacagcattttgcaatgaaaataagataaagaaaaaagttttgaatacaagcaaaagagataaaaaaacgctaattaaattaaagttctttctttggcctaattatcgattagaagatttcgcttgtatgaatcggtattggtttgataccaataatggcagtcgtttcagtatggtaaagctacatatgtatcctcaatttaaaaattaaccaaaaccgtgtattgaaaaaagggaaataaagattgactttattttctgtgctgtagtgtatatatgaagacaaaaagatgcacctatagattgttttccattccattcggcttgataatactaatttgacaacctctcaatatttataaattgaatcaatatttataaattaaaatgataaaaaaatcttattttattggttttatttgaaattttagatataattttttatcttttatgagtgcggaaaccttctttttgtatacttattcgaatccaatttaaaatggatataatttttaacaaaattaagattattgtgtatgacaaatcaaaaaaatgagtattattattattgatcaataaaaacatctagccataaa

SEQ ID NO: 134532 - DNA, 590 bp, Cannabis sativa
caactgactgcccctagcactccaaagcaaaatggagttgcagaaagaagaaattgcatgctttcggaaatggttagttccgtgcttagctattcaactctacttacgtccttctggggatatgctattcagatggcaactgacattttaaatgttgttcaatctaaatcagtccctaagacaccttaagatttatagaatggttgtatacccaattgacgcaattacaaaatttgggggtgccctactcgtgtcttaagaaagaaagatgagaaacaagaaaagcgaactgaagtttgcatgtttgttggaaattctaaagtgaataggggtggactattttatagtcacaaggatgataaagtgttcgtttctacaaatgacactttccttgaagaagactatattaagaacttcaagctgcaaagtaaagtagtgttagaggaaatgatttcagaaataactctaactaatgttccatcgtcttctactcaaatagaggataatcaaactccctcagttgaaccaacagaagttgatagaactgagaaaactaccactaatgttcctgttcagaaggtcacgactcc

SEQ ID NO: 134533 - DNA, 1061 bp, Cannabis sativa
  modified_base (942)..(942): a, c, t, g, unknown or other
ggggttgtgcgatgtgggttcgggagaaggagaagaggcggagagagtttgagggaaggagagagaaagggtttgagtttttgagagggatatttttggagttttgaaaagtgatcatatgttttcaatgttgaaaagtattagtttagggaaaaaattatctcctaatgcatgcatagaaattcaaatttcccaatatatttatatataaaaaaaaaaaaaaatcaaactcaattttttttaatattttttttctttcaatccatataatgtagtaataataaaaatttctaattaaatataaaattaaacataaaaaaactatcaatttttaataagtgcacaattaatttttggtactattttttttgcatgcgttcttatctttattagtacttaaaaaacatatggaaataatgaagcaataaattgtgcagaagaaaaatcaaaggatccaataaagtaaatccagaaattgtaattaaactctcagaaaaaagaaataaccaccacagaaaaaacaaaactaaaagaaaatattatccatgggttaatatacatacaggatcggaccctaatcatagcactggaattatggtacctgaaaagagatcattaaagaagattcaaataactttgaattattttgattaattattacccttttcctctcttacaaaacgaattggtaacaataattaataatatatatatatcactctagggctgggcatcatccaatccaattgaaccgaactgatccaatccaatccaattataaaaagttagatatccaattacaattagattggattggatgttaaaagttggattttaattggattggatcggtgattggatgtcaatctcaaaattcaattaaaaaccgatccaatccaatcacaattatatatattaaaaattatttatataataaaaaanattaaaaaatataatatatatttaatatattttattagattttttttatatattgaatttgtaacacttaattgttttgtgtatttatttttatgatgttttgatctattttattactt

SEQ ID NO: 134534 - DNA, 1410 bp, Cannabis sativa
tggaaattgcatgcaaatgttataattattatgggctgaatagttaagagaagtccagcccattgtgcgttttggtccacacatttttgttcctaaatattcactttttgaacagaaaaaaatagttttagtgaaatttcaaaacaacttatcataataaaatatttagattattaacatatataaaatattttaaacttaagtttgtttaattaatggactttcattttaaaaaaattatgtaatttatattttttatttataatttcatttgttttaaataaataatattattataagacaccaaggtatttagcacaatagcagatctaaaattttaagtgaagagtacgtaagtaaatttaaaaagaaaaaaaatatttttaatgagatttgaactctaaaaaaaatagtgtattgttatattttagcacacttaaaaaaaattatactctaatggtgttctaaaaaatgtactaaatttggcacattctaagagttgtgccaaatttggttcaagatataacattgtaccaaatttagcccacaataaatgttactttttttatttactatatgccactagtcattgtgattcattgactttcactaaactttatttactatattaccattatttaaataataaaagaataaaaataataaattttggagaaattaccccatatattgtttttttattttttttttcaaatttacagtttggatttctaaagtggttgcaatggtagttgcaataaggatttctatgtagaattctgtaaaaatacaaaaaaataattttgaagtgtaaaaataaaaaagcccctaaattttgtatattcttaataaaatatgaaatgaccatcaatataatcaattattttttccttattttacatcttgtgcattggagtacaattgtaaatagtgggttaaaaatagcacaaactcattttttgtgtcaaatttagcacacattttagatattccattagagatagtctaacctctagtctatatagcttatcattatactattatgcttataaacatctcatttattataaatatatctttgtttagaggagtgaatgcttcacctcacttctatgtaggtgtactcttaatttagtatctctacgatatcatgtctttataattcactaataattccttataatatttattatattaaaggctaattaggatttttttttcctcgaactttgacatgcactaaatcatggcccctgaatttttaaggtcgttaaaaatgtccctgaacttttaagatcgttaaaaatgccccttgaacttttaagattattaaaaataccccctgaactattgagattgttgaaattaaggacttttgtccaattttagtaaaacaattctaacatggat

SEQ ID NO: 134535 - DNA, 876 bp, Cannabis sativa
cataagagcctcaaaagatcggttgcaaaaatgagtgccttgatcactaatgatagcgcgaggggtaccaaacctcgataacacattttcttttaagaatttcacaacagtcgcgttatcattatttcgacaaggtactgcctcgacccattttgaaacataatccacagcaagaaggatgtaaaggtaaccaaaagaaggtggaaatggtcccataaagtctatcccccaacaatcaaatacttcaatgacaagaattgggttcaagggcatcatgtgccgacgggacaaggagcctaacttttggcaccttacacaagagcgacaaaaatcattggtgtctttgaacaaagtgggccagtaaagaccgcattgtaagatttttgcagcggttttcttcacagaaaagtgaccaccacaagcatcattgtggcaaaaatttagcacactagacacctcatcatcgggaatgcattttcgcataatctggtcgggacaatacttgaataagtatggatcatcccaaaagaaatttcgcacctcgaccaagaatttgcgtttgtcttgtgaactccactcagaagggagctcaccagttactaagtagttaacaatgtgcgcataccacggtaacttagtaacaacgaataattgttcatcggggaaatcatcatgaataggtgggccatcagcgggatcactaaattcaagtcgggacaagtgatccgcgactacattttcaacacctttcttgtctttgattgttatgtcaaattcttgcaagagaaggatccaccttattaagcgtgccttagcatcctttttggaaaggaggtacttaagggcggagtgatcggtgaagatcgtaataggtga

SEQ ID NO: 134536 - DNA, 966 bp, Cannabis sativa
  modified_base (519)..(525): a, c, t, g, unknown or other
  modified_base (646)..(650): a, c, t, g, unknown or other
aatatataggggtgtatattagaatcattttatctacaccaactcataacttaacatcgtagatggtggttactctgggagtggaggaattattctagaaggatgtaaaaactcatctataataatttagctccaccatgaagctaaataacttagttgtttttgaaaaacactagaaagttattcaaactgaagaaagtaattaactattttatctctattccgttttggatagaattagagatatatgtcttttgtatattcagatgaacttaataaatagtaaagaattaagaatccctagaggagtaatgcatatagaaaaatgatgttgcataatgttttatgaacacataggaagtaatagtggctaaagcaattgcttaccacagccttacaattcttgttatttggatatagtaaaatacactacacttgatgatattaagacaatgaattgattaaaatacacttcttgtttcatgttagtgcatgtgggagtttgttgggattttatgnnnnnnntaaaactcatttcaatataatcttatttgttatcaataaaagattataagtcatttatgtttacatgtatttttcatgtttaaggtttaatatacaatttctgttaaatccagaacatatnnnnnttcacaattacagtgatgtcaacagagtggaaggtaattgtgattatatgtttcaaaagactatgtccatgattcattagtacactggatttacactgatgtgatagtcagcgataaagtttacttacaccttgaataagtgttatgttctttccaagacattggcaaattatggtagtatcggatgtatagagtatacattagactggcagcgatattgttcttagtaaagatattatagtcttaccattgtatctttctaagttaatatcactggttgatcttagatcaaaagatcttaatcctgatatagtta

SEQ ID NO: 134537 - DNA, 1371 bp, Cannabis sativa
aacccggacctagacccgaacccggacccagacttgggacccggacccaggacccgaacacgaacccagacctggaccccagaccctggacccgcaccccgaccctgacttggactaagacccagacccgaaacccgaactcagatccagacccgagacccgaacccgggacccgcaccagacccgaacctagacctgggacccgcaccggaccaggaccccgaccctgacccagacacggaccaggacccggacccaggacccgggatctgaacccgaaccgcgaacccggacctagaccccgaaccccgaactcggacccgaacctggacccggacccaggacctcggacctggacccatagttggtgttgggatcgagtgtattaaaaatatattacaactttacacaatcaattaatacaagtcaatacaaaacattgtattgtattaaataatactaatacaatacaacacaatctaatacaatacaatacaatacaatgcaatacaatacattacaatacgaacgagcctttactgttgtatttaattaatggtgttgttattgtaagtatttccaatcaaatataggtgaatacacccacttctataagtgagtgttcttgctttacttagaccatcttcaatgagaattataaaaattgagctatatttgacacaaaaagtaatgttgtagtaaatttacaccaaattttagttttgtgttctcatgcacaattgcaaaattttatatctaattaatgttttattaaaaaaataaaattgaataactttatagtcaattttattattattttaatatgtaagacaataagaaaataatataaatgtttcataatttaatgtgatagttaaatatactaataaaataatagaaatgacataaatgtaaataaaaagtagtgcatttattatggtataaattttacatcataacaaatgttgggccaaatttgacataaaatttactaggggtgtacatcggtcggtttggttgggttattgtatatttttagcaacccaatataaatgctgggttgcaaatatctaattttaacccgtccaatgaaaaaataaaaaaagtgtaacccgcccaataatttttgtcagtttggtcgggataacccgcttaaaccgatctttattttttattttttttttcattgttgttagtttttggtgttcaaataattaattttaaaaaataaatgtatggtatatacctttcaaaattaaaacagttatagtttaggaaatataactgtacattcttggaggccgagttgggtggcaatccgagatttatatggcgtagtgtctttgagtcacaaacgctgctcaaagatgg

SEQ ID NO: 134538 - DNA, 500 bp, Cannabis sativa
tgacataaatcagatagttgttaagactataaaatcaggaatatttcgcacatgatcaaaatgttcaaattgcgtccttagatgtatcatttcgtattctgtgaaatctcttgggtaaaatttttgtaccagtttgcaaatgtcatcaactctgaatgatacacgaatctctctcggatctagagctgaactaagaatgagtaactctactgtgttgtcattgaatttgttgtttaattcttgcagttgaaagtctatcactgcattgaagatatcaactctataataatgctccactgtaatgacaccttgttgaccgcgagctcttcctcttctcgcagtataatgagaattaaaattaggcacaagtatattaataggttcacaaaaggatttcacctcatcaactaattcattccatccatcttctcttaatttttgaatgagaatcttagtagatgaaacaagatgcattgcatttaaaatatcttgagactgaa

SEQ ID NO: 134539 - DNA, 502 bp, Cannabis sativa
aatatccactaaaatccctacagcatgtaatcttgaatatataaaagggctcgattggatttaaatcccagctcgcgtctatatgaatttccctatatgccatagtgccatattgctcagctataccataatatgactcgtgacagttaatctggacgtggaatttagggtacctgcagtcaaacttatgagcaactcggtctacgagatgggaatcccaaatataaaaattaaggcgggtgtctcgaaaggtgaccaatgtgttacgttcagcgctaagtactgtggaaggctaaccacatttattacctcgggatgctccttcaccggcttctcgaggggcagtgttttgaagatactgtgctcaagccacgtgatcccaggcctcatcctcctttgcaacgggaacctgctgccaagaagaatacttgggaaacttataatcatgagtatactccttgtcagtaagaaggcccaccgatctcagattggcctcgttcaa

SEQ ID NO: 134540 - DNA, 781 bp, Cannabis sativa
gttaaagtttccactaatgctttgctttgccctgaacagagtaactttgtcaacccgccggttgcttccttcatgaccactaatcccgctagcgctgtctgtgttgcccctccggagaatatgcctcctttccctacctatggctcccaagaaatcgggccggctcaaggccaaactctgcaagcgggtctattcaaatccggcccatccacccttccaccaaattactcccattggaaccaacccgatcccaacacaccaacccctcagccatcacagccccccccacccgacaccaccaccccaacgcacactgccctccttcatgccactatgagcaacactagtgtccaaaaagcctcaccagcttccacaccgaaccaagtcattacctctcaacactccagtggctcaaactctactagctcaaaatattgccatgtgcctttgcctgagaaccttcccctccttgacaccagcaagagactcgaagccatgaacctcacctaccaaccgggaactgctactcccacaggttccaaggcctcaaggaagagaagcaagcctgactcaaaagaaaaatttaaaaggcaaactgaaatggtcaatggagagcttcgtcaccaaatcaagcgctcccgctccgacacccctcaagccacggaaatcacatctggaagcgcaggccctgccgctgagcgggcctgcccgccgccatgaaacttgtcagctggaatgcacgtggtattgggagtgatcgtgcattccgtaatctctcccg

SEQ ID NO: 134541 - DNA, 597 bp, Cannabis sativa
ggaccctatttttaacatgatttttgaattcactcaaagtatccttttgccaatatggtctccctccggactgcacttttcactccaaaatctatagcccatcttttctagtacctaacacgcatatgtacgaaagctgtcgaagtctaaactatggctcttcacactactatacaatctttccttaaacaagaaaaaattaagccagtctaccaaatccaaatggatattttgtcttggtacgctcctttagaagagtggagaaaaatactttgggatgaatgggaaaagattcgcaacaataggcacatctttgtttatcgatcaggaccacatgtagccaacatgatatattgctacactgtcttccttatcaatcttaataaaaaaaattggacgagaacaagaaaatagtttgcaaccccgcctttgaactatacggctcccaagaagcaccttttagagaaagttcaatgtacagtgatctccaaaagattatttttgagaaaaactagactattctactagaaatttggccaaaaatagaagaagatgctccatgggaaatgtttccctcatatcattcactactcatag

SEQ ID NO: 134542 - DNA, 521 bp, Cannabis sativa
actcatggaaagctttctcctcagagttccatgcacaatgctcctcctctcttcaacttccgttgcaccaaggagatctggtcaaagtaaagcaaagatgtaacgccctaatctataggaatgcgacatgtgtgattttataaaatagtttaatactaatagattaattaattattaaaaacttgactaaaataaaacactaaaaatgggcattataacgacagaaaaaaacatgttccggggatccctgttataaaattttttgcaaaagaactacacaagatgatcatcaaaaatataaaaccaaaataaacaatagatacagcccaaaacaactcttggcaatccgacacgcaggtcggcaagatcaatatgtacactgcaggagaagaatgtcacctcatggttgatctagtttttctttgcctttattggcaccacatagcactcgtgaatcacaaagactcagcaagaaaagtaataataacaatcatataatttattatttgaatattgtcatt

SEQ ID NO: 134543 - DNA, 957 bp, Cannabis sativa
taaaagttaatttagatttttgaccgtgaattaatttcacatgtactaaattatatctttgaatttttttaacgttaaaatttttctcaaaatattaagattcttgaatttaaagacttttatccaattttactaaaaaaattctaatgtgaataaaaatttaggagacgtaattctgtacgtattaaagttcggggatattattttgtaaatatcaagtttaaggggtacgatttagtatatggacaattgccatattagtaaaatcaaataaaattagattaaaatctttaaatccaacaacctcaatagttcaaagaaaatttttaacgacctgaaaagttcatgggaaaaaaatcttaatcaacctaaattaattaaataaaaaataaaatttgatgcaaatataaaaaaaatatacatattgcaagtgttcattggatcacatccaatggatttggacccaattgatcaaatctaattatttattgaatattgaatttcgccatccgatccaatggatgtattggattagattggttccaatcattggatgaattgactgattttttattagattggatttgattcatccaatctattttaactatcattaaagttgattttattaaaaagaaaaatatgtataaagcaacataatttcaaacttaatagtccaacatacacaataaacattagtttagtttaactcaattctcatgatctcataataaaactgctaaaaaataaaatttatttaatacacattgatcattttattagcgttttaggaagatgagaattaatattttagataatcactggatgataattggatcggtttggtcggttatccatttggattttcaaaatttacatccgatctaatctaattatgatggatatccgtaactattggatcgattgggattagatcagtcggttgtaattggattg

SEQ ID NO: 134544 - DNA, 1447 bp, Cannabis sativa
gttggttattaattcatacttatgggctggtctatttttgtttttaaatctaaccctaaaaaaaccaacgagtcacacactaagcatagcaattatattaaatcaactgattaatagaatttttattcaaccttatagaattatttatttttgttttgatttaatagaaaaaagtgttttttcttttttgtttttttggtatattacctgatcgatctaaagataagtcaagtaaaggattattagtcctcatcgacaaatatccaaattttgatacctaataccccatagatagttccaactgtataggaacagtaatcaattttagctcgaatggtttgtaggggtaccctaccttctcggatccattcgacacgtgcaatttcttttccgtcgatacgccctgcaatttgtatttgaattccttttgtacctgcttgttcagttaattcaatagcctttttcattgctttgcgaaatgaaactctattttttaattgtccggctataaattctgctagaatattagggtgtccataaggatttgctattcttgtaatagcaatgttaagtttccggttcatcgaatgtagttctttttttacattcatctgtaattcttccattttttgggggctattaataattttgggaatcccatatagattatgacttgaatcaagtcgatttttttttgaatctctatccatgcaatcccctcgacactagaagatattttcatatttttttgtacataattcttgatacaatttcgtattttttgatcttcttgtagatccttagaataattttttggttgtgcaaaccaaagagaacgatgaccttgggttgcaccaagtctgaaaccaagtggatttattttttgtcccacaatccccgctagtattactatacatataatgtatacatatactgaccttatgaatattaaatcttatataaatataaaaaatatatcatattcatataatatattaatataaattttctttttctacgtctaagtctttcagtacaatagttatatgacaagtgtgtctttttattggatagccccgtccccgagcttgcggttttaattttttcacagtgttgccttcgttgacctcagctttactaataattaaagtagcttcgttgaagcgcatattgtgagtggcgtttgctgccgcggaataaaccaattttaaaattggataacatgctcgatatggcattagttctagtatcataagtgtttccacataggaacgtccacgaatctgatcaataactcttcgcgctttgtgagcagacatagatatatattgtcctatagcatatacttctgtagatcggtttgtccttttcttctttatcataaggttcactcctcactaatgaacgataagcatctatatttcattttattattattatttattaa

SEQ ID NO: 134545 - DNA, 849 bp, Cannabis sativa
ctttttattcacaatattttttttaaaagaacagacaattaataataatttattatttaagctaactttctaataagacaaaaattggatcataactaaaatttatttagggataataacatgatataaaaatttatatttttaattttttttttatatttttatgatattttataaaaatataaaagaaaatacgaaaattacataaaaataacaaaaaacaacaacaaatcaatttaaaaaataatatatgaataataaaaaaaaaattatcaataaaataacaagaatacaacataaaaataaaacgctgtatttttataaataagatctaaaaacaccgtaaaaatattaaaaactctgtacaaattgtatatttatattttttttttattgattttatgttttttggaaatttactaaactagctaagttaatggtgatgctttagtaagagtttggacctaattaataattttctttatcaaagaaagatatctttcgtatattattatataaatgtataataaacgtgaccataatctaatagtataaaatcctcttttgatttaatttattaattaatggttatagtatatataatcaatgtgtataacatgttcaatatttggaacatgatccctcggcaaaatctcacaatggtaagcttgattatatattatataattaagttttcctattaagtcatctctctggactaattgataaacagcaaatatttaatctaaactctagattctgtgtgtcacctgaagcaatattaaataaagtagaaaacacttctctatcttattcttcaaaatattttattaaaagtcaagtacgtta

SEQ ID NO: 134546 - DNA, 559 bp, Cannabis sativa
ttattattatatgatatgagcctaaaaaagaaaaaatgacaagataattgaattttgtatttcaataaaagaaataaaaatgtggaaaacaagacaaggattctctacaatgacactgtagaccaattgaaagggatgtagcgcagctcggtagcgcgtttgttttgggtacaaaatgtcacaggttcaaatcctgtcatccctacctattacttatcttatgagcagtaacgaggaatcaattgagattgattaaaattggatatacctaagcaatagagaataaaattctctaggatagtatatatatctaagttgggttacaaagttattcttgtaataataattaagataattaaggcgctcttagttcagtttggtagaacgtgggtctccaaaacccgatgtcgtaggttcaagtcctacagagcgtgcttcgattcttcttatttgttaggtcgaaaataacacaaaaataattgaacaacaatctgaatttgacctcctgtagattaaaacaagtaggaggtcaatcaaaaaaagagatgttaattaatca

SEQ ID NO: 134547 - DNA, 729 bp, Cannabis sativa
aaatggcacatgggaattacatgtagacggttcaagcaatgtaagaggaagcggattaggacttgttctaacctcaccccaaggcgagaagatcgagcaagcaatcagatgtgggtttaaagctacaaacaatgaggcagagtatgaggctatgattgctggactcggactggccaaagaaatgggagccaaaagaatcaacgtctttagcgattcacaacttgtagtcaaccaaatgcaaggtagctatcaggcccgagatagcaaaatgacagcttatcttgagaaaacaaaagagttgcaatcgaccttcgacgagttcacagtcagtcaggtgcctagggaaaataatagtcacgcagacgccttagccaaccttgggtcttccatccagacaaccagccccaaaacaatcccaatggtgtacctccaatggcctgctgtctggaagaaagaagaagaagaagaagtaaatgacgtcgccaacgaaaagacatggatgacgcccatcatcgagtacttagaaaaagatgtgctaccagaagataagaatgaagcccgaagagtcaaggctcaggcagccagattctcaataatacgaggtaagctctataaacgatcctattctggtccatatttgagatgtgttaaccctgcagaagcaaaatatatactagctgagcttcacgagggcgaatgtggcaaccattcgggaggcagaagcttagc

SEQ ID NO: 134548 - DNA, 711 bp, Cannabis sativa
tttatatcataaaatttccttcaaacaaatcaaaagtcctttgtcaagccggtgccaaacctcttctcgtgcttctaaagtttggagtcactctgctgggcaattttatttctttccaacaaattgaactacaatgtaatattaacaagttctccaatcacgatctcaattcttgttctggttacatttccggtaacctttggtaagatcttttcgttttacaaacttctcttagatctcttcgatttaaagttttcactactaatttacttcccaaagtagtatgtaatcacactgttaaaatttcaattaactctaactgtcactaatgcctcctatccaaattctcccaaaagaaacagtattgcggcttttgtgttctgtatagacttcacattttcaccatacaaataatgtgtccaactttcagtgcaaaacaattattgccaatttaatatcataactgaaataccatttctcatactccttcaattgtctaagtagttaggcaaaaactctcctagactgtgtaagaatacaatctaatccttgtttagaagtgtcacgtcatactacattatctcctcactgactaacaatgttaacattgatacgatagttaacctttgtttcaattctttcgacctaattccactaagagtgtaaacatcgctcaacaaatattcgatagcattctgttaattccagaaa

SEQ ID NO: 134549 - DNA, 1239 bp, Cannabis sativa
tatatattacatcagtataatttgagatccgaacccaagacctccaatacacacgcacctcctattttagttatttaagatattttataaaattttaaaaataaagtttaaatagtatctttcacatgtgtataaaataaaaaaaattcgcgtacaacaaattatttaaattttatttttgacgtattaaatattttcgaatctctcaaaattttataaaatatctttaataatcaggaacggacacatgtatattaatgtggagactatagcccccactaacaaaaatattaccttttaaaaaattaaatgtaattttttaaatttaataattatagatcaaaatcgtagaaaaaagcctcataaaattaaataaatctaataaaaataattataatataagtataatatttttaaatatataagtccttacaaagtaaaaattatgagtccgtcactgttaataattataagataaaatatcgtaaacaaaattaaactaaaaattctgtaaaatagtgtagaagtatcctatgtttttttaattcacgtgtatgtgtttattatatggataaaaatataggtaaagaaaagggtgggggacatgctagtacacttcacgagtactctattaaaaccagcttgatttttttgacttccatgtatcactaactttttttaatgctagatcatcattatttgtaacacaatttgattggatctcattactaggcaaaaatttccaccattaaatgtcttttttgcatattagaacaatatgtgattaattgcactctcttcattatgtcaccaccacaccaccaccacacatataccaaaccctatctaaaaaaaatgttgaagtgagtaacctatctcttccccaaatcctccataatgtgtcctcctccatgcttggccaccgccaagtcgtcgtcaacaccacctctctctctcacgattattgaaaggcataaaacgaattctctgctcaacaatcggagcagagcctctcgtggagtgtcgagaaagccttcctcgaactccacctctctcttacctttgttgagcccattttgatttcgtgtttcgttaactatgaattagaatgaaatgtaactaaccccttgaattttactgctgctgacatgtacactcgtgtacacgtgatatatatacattagttcatataattttttatttaaaaaatattttaaaattttgaaagaaattataatt

SEQ ID NO: 134550 - DNA, 3729 bp, Cannabis sativa
atcagttgtgcactaacaggagacggagtggagatcgccctattgaaacatgggaggcaatgaagagggtaatgaggcgacggtttgtaccacctcattattatcgtgatctctatcttaagttgcaaggccttcgtcaaggctacagaagtgttgatgagtattacaaggagatggagatggctatgattagagccaatgttgaagaggatcgggaggcaacaatggcgaggtttttaaatgggttgaaccgagagattgctgacccaatcgagctacaccattatgtggagttagaagatttggttcacatggcaatcaaagttgagagacagctcaagaagggtagttcaagttcgagatcaaggccgagcacacacaagccaagtacaacaccttggaggtcgaactatccaaagaaggatgaccaacccagttcatcatctacaccaaaaccatccactacagccacgccacctcaaggtaaaacaactcaaactaagtctcattctagtgagataaggtgtttcaaatgccaggggcggggacatatagccagccagtgtccaaaccaaagagttatggtgattcgggaaaagtggagaaatagatttctggaagatgaagatgatcttgctgacatgccaccattggaagatgcttctgacaatgaatatggcccagaatctggagagatgcttgcactagttacaaggcgagtcctgaatttgcaagcaaaagaagaggcagaagaagtgcagcgggagaacatctttcacactcgatgtcatgtgagggacaaggtatgtagtgtcattattgatggaggtagttgtactaaaacgttgcaagtgcttctatggttgacaagcttgggcttacaacgcttaagcatccttgtccatacaagttgcaatggttgaatgatagtggtgaagtgaaggttacaaaacaagtacttgtttcatttcgcattggcaagtatgaagatgaggtgctgtgtgacgtcgttccaatgcaagctggacacctccttctaggaaggccttggcaatttgatcgacgagtacaacatgatggcttcaccaacaagtactcatttactttccgtcagcgggcaatcactctagcgcctttacaccaaaacaagtgtatgaagatcaagcgaggttgcaaaaattgagtgacaaaaagaaactgagtgagcaaaaagagagtggaaagatgagtgagaggaaacagaatgagagaaaaagagagaaaagtgtggaatcaagtgagagaaaacaacacttttatgcaaacaaaagtgagattaagagagcattgtgcacaaaacagcccatgattttactagtgtataaggaggctcttttaaatgctaaccaacttgattcttcgctgccaagtaccattgtgtctcttttgcaggaattcgatgatgtatttcctgagcaggtaccacatgggttaccacctattagaggaatagaacatcaaattgattttgttccaggtgcttccatcccaaaccgaccagcctacagaagcaatcctgatgaaacaaaggaattgcaaaggcaaattgaagaattgatggagaaaggacatgtgagagaaagcatgagtccttgcgctgttccagtgattctagttccaaagaaggatggaacatggaggatgtgtgttgactgtcgagccatcaacaatataacggtaaagtatcgacatcccattcctcgtttagatgacatgctagatgaattgcatggttcttgtgtgttttcaaaaattgatctcaaaagtgggtatcatcagatacgtatgaaagaaggggatgaatggaaaactgcttttaaaactaaacatggtttgtatgagtggttagtcatgccttttggattaactaatgcacctagtactttcatgcgcttaatgaatcatgtattgcgtgctttcattggcaaatttgtggttgtgtattttgatgatattcttatttacagtaagaatttgcatgaccatgtgttgcatttgcaatctgttttggaagtccttaggaaacaaagtttatacgctaaccttagcaagtgtacattctgcaccgataagcttgtattcctaggttttgttgtaagtgctacaggtattcaggtggatgaggaaaagatcaaagccatccaagagtggccgacccctacatcgataggtaatgttagaagttttcatggacttgctagcttctacaggaggtttgtgcaaaattttagcacaattgccgctccacttacagaagtaataaaaaaaaatgtgtcattcaaatggggtgaagctcaagaggaggcatttcagctgctgaaatacaagcttacgcatgctcctttacttgctttgcctaacttttctaacacttttgaaattgaatgtgatgcttctgggcttggtattggcgctgttcttatgcaggatgggagaccgcttgcatactttagtgaaaagctaagtggggctgccctcaattaccccacttatgacaaagaattgtatgcactagtgcgtgccttagaaacatggcagcactatttgtggccaaaggagtttgtgattcgcacggatcatgaatccttgaaacatttgaaaagccaacacaaactcaacaagagacatgcacgatgggttgagttcattgagacctttccttatgtcattcggtataaacaaggtaaggagaatgtggttgctgatgccctttctcgcaggtatgctctaatctctactcttgatgctaaattgcttgggtttgaacatataaaagagttgtattctgctgaccatgattttggggaaatttatgctctttgtgaaaagactgctgaaggaaagttttataggcatgaggattttctatttagggaacatagattgtgtgtgcctaattgttctgtgagagatttgcttgttagagagtcccacgggggagggttgatgggacattttggagttgctaaaactctagctatgttgcaagagcatttcttttggccccatatgaaacgggacgttgagcgaatttgtggtaggtgtgtcacttgtaggcaagctaaatcaagagtgcagccaaatggcctttacacacccctacctatccctagttcaccatgggttgacatttctatggattttgtgttaggtctaccaagaagtaagcgtgggagggattcaatctttgtggtagtagaccgattttctaaaatggctcattttatcccttgtcataaaactgatgatgcatctaatgttgcagatttgttctttagggaaattgtgagattacatggtatgcctagaacaattgtatcagatagggatgctaagttcctaagttacttttggaaaacattgtggggaaaacttgggacaaaattgttattttctactacttgtcaccctcaaacagatggtcaaacagaagtagttaataggaccctatccaccttgttaagggcaatcataagtaaaaacattaagacttgggaagattgtttgccacatgttgagtttgcctataatcgtgcaatgcattctgctactaaattttcaccatttgaaattgtgtatggttttaatcctctaactcctttggatttatcacctttacctgtttctgagcatttgaatttagatggcgagaagaaggcagaatttgtgaagaaattccatgagagggcc

SEQ ID NO: 134551 - DNA, 555 bp, Cannabis sativa
ttaagaaagtgccatctgttacaagtattggtgtacaatggttccatcctcttattgaagctcctatagcaaagaataagtacttgaaccttcctttttcatctgttactaagtctgcaacagttcctgtgatgtaaatattttacaattaatatatttttctatataataacacgaaaatttgtaataaaacttgtaaattgtaactaacagttgcatgtatactgttgtttacatcacaaatacattattagaaaatttgtgaccaaaattgatcacaagggccagaaaggtttgagatgcaaaataaaaagaatccatccatatatgtatatttaaataacaaataagatacaagcttaaagcaaagtaaaattattatatattttgatttgcatctgtaattttcttgtatttttactgttttgagtacaaacaccttaagttgcttgccaaccaaaggttggtcttttctgtcttaactttatagttacagtaagagttgaaggacactttaatgaaagaaccaccattaactatcaagtaatggaaaaa

SEQ ID NO: 134552 - DNA, 543 bp, Cannabis sativa
ggatatgttttaggactatggcatcaagatgagttatgagaaggcttggaggtgctaggagaaggcacttatgtatgtgaggggtacgccagtagaagcttatagttagtcacctggttacgtacatgctgaaatagaagaatccaagtactgttacagacattgtcataaaggacaacaagttcaagtactgtttttggtcactggatgcttgtaggagggtgttatcctaatttttttcttcatgacgtgacatgtttacgtggacagaacctgtgccatatggcagtgtagctcactaaaaggaaggccaagttagcattcgagcaagcaaagaccccggcactcaaatggggataaagtgacaaaccagttcactctcaagagctgactagccacccctggttggccctattatttagttttttgcacattgaggtggcaagaggaccaagtgacacgtgtctcacatttctgatacctaggcggaggttaatgtccctagcagcatgtgcatcgagtagggtggaagattgaacatcc

SEQ ID NO: 134553 - DNA, 618 bp, Cannabis sativa
  modified_base (111)..(114): a, c, t, g, unknown or other
  modified_base (560)..(560): a, c, t, g, unknown or other
gacttaacaaaaactgtacacattaaaccataaacataaaagctacatgtaaatataaatgacgtctaatcttctattgataacaaataaaattatattgaaatgggtttnnnntagggcataaaatcccaacacaacctactgcatgttgctgactcgccctactaatatgtctagacatgctgtgccttgggagttttgatagaagagtgaagcatactcatttctcctccttcttccttgaacttcatggcataaaagaatttatgaatttccctcttttgcaattatgttggttagtgccattgttgttgtgcttgcctcacgtattcttgttgtttgagaattgtagagatcgtttgtgcttgttggcatgataaacactgtttggggcgctatgaggccctatgtttgtttgtcattatcctaccctcttgtctgggttttccagacagcttctaccaactttatgaagccatcagcttgctcaaggaactcctccatgttggttgttaagatcctactgatatctttccagaagtgtaaagcccgcttagttnatttggaaattagcagttaatcttgattaattatgaaattatttaagatcggaagagc

SEQ ID NO: 134554 - DNA, 575 bp, Cannabis sativa
caaccaatcaagaattcttaggtggacccccaccattttaattttcaaaaacataaaataattttcaaatcctaaaccaatcacaccctaagcatccctaacacctattatatataattgttaaatttctcatgaggcaaaaagatgaaacgacaaagtgtatggatgagtgtcaattctatagtaattgagaaaattgagactaagaatttattaattaagttgacaaaggatgaaaagacattaaagggttttaaaaaatttgaatattgagggcatataggtaaaacaaggaggaggcgattaagagtcttattaaatagaagaaataatataatactttgtaatagtattgaggactattaatatcaattaaaatttcatttaagtaaagacattttgaacctatactagcagccagcagccatgaccatgaagatataaatttcactatactacaaagatatgagactataattagaatttagaaccatattatagtacataataatatattaatttaataaattaatattttaattagagtatcaccaaatatagaaataaattgaaaa

SEQ ID NO: 134555 - DNA, 1030 bp, Cannabis sativa
  modified_base (977)..(991): a, c, t, g, unknown or other
ggcttgggtactagtacggggttggctacccaagccaggtagaaagcctcaattatgaaattgttgttgcacagcttttctacctcttcttttagtgtttgggcccattcctcgtctagcaatcttattttttgttgaacaggccgaaagtttggatcgatgtttaggacatgtgaaattatagaaggatcgattccgaccatgtcctcatgtgactagacaaaagtgtctaggtttgctcataaatattttatcagagttaattttacttcaagcaacaaaccttttccaattttaagtttcctgcttggaacccttgggtcaatttcaatttcttctaattcttccaccgacctaaaatttgtatttggttccccaagtcagggatccacatcttcgtccccgccttgggcgattccctattaggcaatgatcttccccttgttcgaactctgactagagggttcttcctttctggccttggttagggctaggttgtaacattcccgtgcaacttgttgattcccttttaggcaccctaccccattctttgttgggaacttgacgcgtgaatggaatattgatgtaataacttttaagtcatataaggttggtcggcccaacatgacgttaaaggctgacaaaacatcaagtaccaggaattgtgccatcacaattattctcttcggagcttgcccaacagtgatgggtaggtgaatttgacctaaaggtgcaacactctagccggagaaaccatatacgggctggagacagaggatcaaatctttgagttggagccctattttttcatacggtgttttgaacaggatatttgctgaggctccattatctatcatagttcgagccactgttttgttggctatctgtacttccacgactaatggatcattatacgggaagcgaacattaacagcatcttctccattgaatgttatagttgttgggttttatgcccnnnnnnnnnnnnnnntcaatataatcagatttgtttattaatatagatcagaaa

SEQ ID NO: 134556 - DNA, 536 bp, Cannabis sativa
gagctgccatcatgggaggcattccggtgagaagtcggctgtgggaggacatatggcagaaaccaacccatactatgagagacttccttggcagagttgatgaatttattaaactagaagaggctgcgtggaacgccaaaggcctcaaccaagctaagggaaagaagaacgaagcaagcactagtggccatggctcccagggttaggcgagtaataataaaaatggctttaacaatggaaaggggaccaataacgataatggtggaaataactttattaacaacaaaaagccaaacaaagcatcttcatgaatgactatgtccttctaattgatacaatcctcaaccacatgcgatattccccttgttcttgcctatgggtatggtaacccatcattccacgaaaggttgacttaccaccgagtatagagtacttgaggtcattccacctagaatatacaagttagcatgttatggtgctaacaaaaagctagtactagtgtcttgccattaaaacggagagcacctacaaaagta

SEQ ID NO: 134557 - DNA, 948 bp, Cannabis sativa
  modified_base (606)..(640): a, c, t, g, unknown or other
  modified_base (763)..(768): a, c, t, g, unknown or other
tagatcaaaagattttaatcctgatatggttaggttcgatctcaagagtgctatttatgttcttagagttgttcgttaaagcctatcaattgatttgggtaacacatacatcttgggaacatgatagtacaattgagtgagagcgctaatcaaagatacaaaatctatagcttccatcgggacatagaagtgaaatgataatttccttcgagcttggattaatagagataaatggaagagctcttattccagtaattatattagtttactgaaatatcatttataggaagttaagtattttaaggataaaatacattaaggggtggaatgataaatttgtccctacttgatgtaaatcatctataaaagatctttaattattgggattagaacgatagataattcatagcgtatccatatcatggaacgtatagagcgttctatataattaagagtgtaattctaaatttatagtggcgcaaggaggaattaataagttagagaatttaccaatctatttattggaagcttggtaatataggcccatggtccccacaatagttgagataataatgcttgtaggactcaattaattggttttaattnnnnnnnnnnnnnnnnnnnnnnnnnnnnnnnnnnntttatgaattttcactaaacaaggacttaattgtgaagaaaagaggttaggatttatttgttaattaagaaactttattaagtctaattaataaataaattaaatggcaattttatttgatannnnnntttaattattaaataaatattttgacatttaaaggattaaaattgaaaattatggcatttgtgaaagaaaagataaattattgaataaaatggaaaaattgtgactagtgagactaggggtgaaaatcggtcggtttttaaaattttataaccgaccggtcggttacggtttttatttta

SEQ ID NO: 134558 - DNA, 759 bp, Cannabis sativa
aatccaggtttggaacactagatagttgtgaagcacattctcaagtatctttggagaacgagagatctcatgcttgtatattccaatggtgatttgaatcttactggatatactgattgagattttaaatcaaataaagatagttaaatgtcaacatatgggtcagtatttactcttggtggaggatctatagtctggagaagcattaagcaaactaatattacagattcaactatggacgttgaatatatagcagcttacgaaataactaaggaagcggtttggttgaagaaattttacactgctctagaagtaattccaaaagtagagaaaaccactggtgctctactgtgacaacagtggagcggtggcaaactctaaggaattaaggagccacaagagaggcaagcgcattgggaggaagtacaatctactaagagatatagtaaagagacgtgatctgacagtcttgaagattgtatcgaaacataacctggtagatccattcacaaagacgctactagcaaaatattttatgggtcatgtaactaatatgagactaagggagatgtccagtttgcttttagggtaagtggaagattgttagggtttatgccttaaaaatgttataaatatatttctatttattaatatatagttaaatattttgatctatgcatgaatactaaattattaatatttattattgaataatttatatttaatattagaaaatttcttattcatatatgaggctgt

SEQ ID NO: 134559 - DNA, 760 bp, Cannabis sativa
tgtattctgcttctgcagaagaccttgaaaatgtgtgttacttcttactcttccatgagatgatagatgatccaacaaaaatatagaagccaatagttgatctccttgtatctaaacaagctgcccagtctgagtcagtgtaggcatgtaatttgacttatgtatctacagcaaagaagattccttgtccaggactactcttgacatactgcaagaccctttgagaaacatgtaaatgtatgactcgaggtgtggacaaaaactggctcaactgattaacagaacaggagatatctggtcttgtgattgttaaatactaaatttttccaacaatgcttttgtacaatggtggatcaacaagtttttctttctcatcttggccaagtttgagattagcttccattggtgtattcataggcttacttcatagatagccaagatcttctaacacttgcagtgcatagggtctttgggaaacaaagattcctttctttgatcttgcaacttttagccccaagaaatactttagttttcccaaatcttttagctgaaatcgagcatacaatctaacctttaatgcttcaagttcatccaagctattacaggctaggatgacatcatccacataaactagtagaaagatgaaattgccattgaaatgtttgatgaataaagaatggtttgtggctgaatgatgaaatccttcttcagttaaagcacttgagaacttggcaaaccattatcttgaagcttgcttcaa

SEQ ID NO: 134560 - DNA, 1183 bp, Cannabis sativa
tctctctctctctctctctggtcgttagatcttggggattccaagatctttattgaccttatctttcctgagccaattctttgtgattaagttttataacatagttggtcgtgctatttctcttatttgtgatttatatataaaaaaaatttacataattaaccaaattttttttaaaaaaattacaaaaatacttaatatggaattatttatttttacgctttaaagttttttatttacaaaaatatctctttactaaaaataataaactattttttttggttattttataatttctttatagttgtattatagttgtcatgagattatttttctagttattttatactttatttatagttgtgaggttgatttctcgtttttctttttaatttttgttgagcaaagtgtattttgtaatttaaaaattttacaagtatatttttgtaaataaaaattttaggccataaaattgtaaataaacataaaaaatgggtatttttgaaaatttctcaattaataatagggttgttttgtcccaatgcttattagaagatcttgataaccattgatgggttaaatttgtcaaacgcacatttagtttggaaacctaatatagttcttattatttatgtttaatttctcgtggcttattaaacttttagttaaagttactgttagaatttttttccattctattgtaaacagtttgataagcatatcttcaaatttttgtcaataaaaatatttactaaaaattaatgagaacttgactatcaaaccctagctcactattgctatcctcttagtattcatttccaaatcatagttggggtttagtattatttcatatcctattctcaagtttctctacctcataggatgcacctattttttttctcctaaaaaaaatcttttacacatttttttaagtggaacataaacttgtgaaaaattagtcactaggctggtctagtggtgaggaggatttggaaatggaggagacttcaaacttgaatctctagagatttaattgaggttcatgggacattcatagagcctcaattaagcaccaagtgtatttatatatttaatatagggaaaaaaacagaaaaatacaaaaaaggaaaaaaaaattttacaaaaatactatgggtcggcccattaaacatttatacagtcc

SEQ ID NO: 134561 - DNA, 960 bp, Cannabis sativa
tatatatatatacacatgattgttacatctctatggcaaaataaattatatgaaaattagtacagcaaaatgtgattacatactaacttttactattacaattagttaataaatatcttattaaaagccttagacaaagatgagaagttgttcacgcgcgccatccctaaagcttgaaattgtagatttgcagtaaatcaaagctctgatttgttgatgataccaactacaaaaaataaaataaaaatctgcataagaataacatgaaactttatgatattcatgtgtatataatagatattcagtgcctataataagaagagagtacaaaacaaaatcatttcaaccacaagacagagtaaaaaaatgatgcaagtaaacaatttgaaagaataagtaccaaaggattattaaagaattatataaagaaattatagtgaatagttaattgcctgggtaaactttaagatatacgaagagaaattgtagtaattatctgttaagtaatcaaaaagaaaaacatattatgatgcttattatgaagacatgagaaaagataagagagtatgaaacaattagagaactaaatgaaagaagttaagaaattagtggttagtttatattgagaacgtgttacatgaaatctttattaatattatcaaattaaaatttcaaaatttatcaagcgggcacttactactgaaaaaaaatattttataattaattatctatttaattttaaactaattggcaatgcatttgtagaaagcgttgctttctattgctatttcattcaatatacaataacacttaataaaaaagtgttgtcctataagcaatttgtaatttatttatttatttgtattatttagagcaagtctttcacaacactttttttacaattgtttctaattcttacaacaaagaaaattgcaacactctttttttaagtgttactaa

SEQ ID NO: 134562 - DNA, 1254 bp, Cannabis sativa
cgctcttccgatcttaacaataaagcaattcgaaacgaatctattggactaaaagaaatacgcaaaaaagttcctcgttggtcatacaaattaataaatagttttgaacacgccgacggcccaattgaagaaatgttaggaagaactcctgaaattcgttcaagaaaatgcaaacgtgtagtgatttttaatcatgacctaagaaataccaatatttctagtaatacatctaataatccacaagagattactaaaaatattaaaaataacgacgattatgaagaaccaaaggtaatttctttaatacgtttttcacaacaatcagattttcgtcgagacataatcataggctcgatgcgcgcccaaaggcgtaaaacgcttatttggaaatcctttcaagcgaatagtcattcccccctttttttggacagaatagacaaagatttttttttttctttttccgcgccggtgaaaaaaaaaattcaaaattggttatggaaaaacaaagaatttccagtttcagattatagagaaaaaagagaaaacgaaaggattaaaaaaaacgaagagaaaaaaaaagaagaagaacgtatagaaagagccgaagcctgggatagcattgtagttgttcaaataataagaagtcttgtgttagtaatccaatcaattctgagaaaatatattatattaccctcattgataatagttaaaaatatgggtcgtatactattgtttcaatctcccgaatggtctgaggatttaaaagattggaagagagaaacgcatgttaaatgcacttataacggcattcaattagcagaaaatgaattcccaaaaaactggttaatagacggtattcagataaagatcctatttccctttcgtctgaaaccttggcacaaagctaagcttaagcgacaagaaacttctaataatccgatcaaaaagaaagaacaaacaaatgatttttcttttttaacagttttggggatggaaactgaacttccttttggttctccccgaaaacaaatttcattttttgaacctatttttaaagaaatcaaaagaaaattaataaaattgaaaaagaaatgttttagagttgtcaaagaaagaaaagaaagaacaaactcaaaagaaacaaaagaaggggttattcaaaatcaaagcattcttttttttaaaaaaataataaaagaactctcaaaaataaacctaattttcttgaaagagaaagaagtcgaaatatatgaa

SEQ ID NO: 134563 - DNA, 892 bp, Cannabis sativa
  modified_base (821)..(821): a, c, t, g, unknown or other
gtacctcgtgaacaaaactcgaatgtcgatgccttaacactgttggccaccactaaggaagccgatacactcaacctcgtctcaatagagttccttcctaaatcgagcatcaatgtggaggagaacgaggaagctaacatggagctggtggatactcaaataacatggatggctccacttattgattaattaaccactgggagtctcccttctgataagagtgaagcaaggaagttattgtataaggtaccaaggttcactttgggggatggaaaattatacagaaggggatactccatgccattattgaagtgtgtgatagttgaagaagcacaaagcatattgaaggaggtccatgaagggttttgtggggaccatgtcggaggggatggcttagctaaaaagataataaggcaaggatactactggactaatattagtcaagactctctccagtatgtaaaaaggtgtgataagtgtgagcacttttcaacaataccacgagccccttcagtggaactcacttctatgacctccccgtggccctatgttgtgtggggaataaatttgattggatctctaccacaaggaaagggtggagttaaatatgcagtagtcgcagtagactacttcacaaaatgggctgaggcggaacctttggccaccataacatcaaaaaaggtactcaactttgtcgtgaagagcattgtatgtcgctatagagttccacaagaaatagtatcagataatggaaaacaattcaatagtgatttatttgcggatttttgtaagaagaatggtatagtcaagagttttgcttnagtagctcacccacaagcaaatggacaagttgaggcagtaaacaaaacattgaagactacattaaagaagc

SEQ ID NO: 134564 - DNA, 773 bp, Cannabis sativa
  modified_base (52)..(55): a, c, t, g, unknown or other
agaattgtaacattagatatttttgcctctaaaaataaacattaggtatttnnnngtataaaatctgaaacattaagtatttatgccgcaatttgccctaacttaaataaaaaaaaaatatcttaatgttactaaaactttcgcaacatagactataaatcagaagttcccaaacaattaagcatataattaataacatataataatccagaaaatacaaaaataatttcaatccattcaactgcattctatgtatccgcagagcctacttcactacgaatgagtatttaagatattcaaactcctctagcatgcatatatattccacacatctgaccgcagtacatttattcacaaaacatacttcactacggatgaatatctaagatatttaaactcatctaaatgtattttaataattatttaaacaaaaagttagtaaatgtatacctctaattagctaaaaccaatcaccacgtacctctccctccaattaatattcttaaagcttaactttaaaacctacaaacaaatgattttttttttttgaatagtcgaaaatctttattaaccatgaacttctactatcaaataaggtagcaaatcagttggaacatgctccaaattgaaatgacgatcaggaaataaaatagcagccttagcaaagttatgggccactaaattagcaattcgtttaacaaaagaaatagaaacatttgtaagagaagcaagcaagcctttacagtcttttacaatcaaaccaaaagtagaaa

SEQ ID NO: 134565 - DNA, 820 bp, Cannabis sativa
attttgggtgccgggtcacgagctgggtcctaggttcaagtcaaggtctagggtcgggtattgggtcccggtcctagtttcgctgcccaagtccctgtcctgattttaggtcaaggtcgcagtttttgtcgggtttttggtcccaatctaggtgcgggtttgggtcctagtcacgattcgggattgggtctagctctacgtttttaattaggtttgggttcgggtttcggtctttgtgctcgtcctagtcctagtccttgtccggttctagttccagttgcgattccgagttcgagtttgggttagagttcgggtcgtggttcgagttcgggtcgacgttcgagtgctggtccgagtttgggttcaggtccagatcgggctacggctatgggttagggtcctatgtctgggtccaagttcggatctgagtcccaggttttgatctcgatctaagtcagggtttagttccgggtctaggtcttgggttccgttcctggtctgggttcgagtatatgtcttggtgcaggtctaggtttgggtctcattttgggtttaggtctgagttcgagtcccgggttcgggtttgattttgtgttcaggtctaggttcaggttcgatcctagtatggattcgtgtccaggttcttgtcatgatttgggtccagggcaggtttttgttctgggtctaggtctgactttgaattcttgggtccaagtcagtacctggtacgggtttgaatctcggatttagatctaggtttgggtttcgaggcctgggtccccggtttatgtcccccatctatgtctggttcctaggtctt

SEQ ID NO: 134566 - DNA, 1051 bp, Cannabis sativa
taagggcaaggttaaagctgaggagccgtgagagcgagcagatgaagattgtacatgtcgggccggttaggcctggagcgtacgatctttgggacatggaggcttgctgtataatcgttgggcgacaaacttttgtttatgtatatagtaaacttttaaaaagtattttgtaaacgggatcccgaaattgtatatatgtaatactttaagtttctaattaaataagcaaattttaattattcacgattaaatctaaagttacaaatcattcaagattaaatattatagtcatctaaagttctaaaaactattaagattgtccataacaaacataaagaaaatcaaaatcagttttgatatcggcctcagtcaacaatctcaacgtcaattgtctttgcttttggtgatgattcattaaccttatttttttgttctgcaattataaaaatatagttaccagttagtcaacttattataactaaataaataaaaacataataaaaatagaaacatatttaatattcatgaagaaaattatatttacctagaagagaatcataagctccctcataaaaaaaaacagattataataataataactaccaaaaattttgtttattatatactaaatatcatagtaaaaataacaatataaaaaataaccaaattcataagatcacaaataaataaaaaatcagtagaaaagaaaagattataatacctttgttttatgctaattgctatatgctcaagatcatagcaaaaaaataataatacaaaaaataaccaaatcataaataaataaaaaaaaatattagacagtagcaaaatgaaaataaaaaattcatatagactacatttttatcaaaaaaaaaataataaacaaacatcacatacctaatcaaaattcaaatcatattatattatttatcaaaaattaaaaataaggtcaagtgaagaaagatcaagatctgcatttgtggtgacttgaaacgaacagcacctgtccaaccgccaagatacttacgaaatagaaaaaaaaaaaaaaaaa

SEQ ID NO: 134567 - DNA, 1184 bp, Cannabis sativa
caccacagttgacttagatcttcaacaagaggagctaagtaaacatcaatattgttaccaggctgtgaagggcctgatatcaacagtgtcagcatagtgaacttcctcttcattaccaaccagggcgacaaattatacattacaagcaaaactggccagcaactgtacttactgctaagattagtatgtggattaataccgtctgcagaaagaccaagacgaatattcctaggttcattgccaaagtcaggccatctagcatcaattgctttccaagcaggtgaatcggctggatgtctcatcataccatctttcaccctatcgttggcatgccaggttaagtttttagaaatatcgacattttgaaagaaccgaaccaaacgaggtatgggtggtaagtaccataatacctttgcaggtataccaacctttacctcatcagaattcttcttcttttgccacctagactcaccgcacgtcggacacaacgtttcattttcaaatctatttcgatagaggatgcaatcgttaggacatgcatgtatcttttcatattgcatgcctaatgaacacaatgtcttctttgcctcatagaaagacaaaggcatttcattaccttcaggtaacaaatctcctaaaaaggctagtaactccgtaaaactcttatcgctccacccatatttggctttcagattgtacaatctaataagtgacaataacttagtaaacctattacaattagggtaaataggtttttcagcatcttctaaaagggatttaaatttcactggatcagctgtattggattcaaattgtgcatcatcaatcatttttgcaatgtgatcatctccgtaatccaaattaacgcacttctccttcctagacttggaaggtccctcatctgaagttctaattttttccccatggtgataccaaattttatagcttttgtctataccgttcctaaacaaatgttctttaatcttaaaaattttcatacgctccatgttgccacatttcatgcacggacaatgaacaaaattaggattagaagccttcttctcagcaaactccaaaaacagatcaacaccttccctatatttcattgacaacctatctgcactcatccaatctctatccattctgaagtttctaaaaaaaaaacattcacgttttaatcaatt

SEQ ID NO: 134568 - DNA, 636 bp, Cannabis sativa
ttttaagctaaaatatatatatatttaatatcatatttatttgattaattataattttttaaaatacatatttatatatcaaaaaacatataatgaaagaatatttttttaaaaaaaattgtatttataaagttatgtttgtgtaacttgttttatatatatggaaaattttattttcaccgcacaaaattataaataaccccaataataaaaaaatatatataaactagaaataattttagaaaattagtcataatattttttaaaaattttcttttttacattattttgtgttaatttctttgcctattatactcatataatatcatattttttttctaaattatgtacatttttttatttatttttcataatatttaaaatataatttatttttattttcttggtatattttttaagaatataaaaataaaaaatgtctttcaaaaaaattaacataaactaaagatatatattttatataaaataaaatatttcttatttttttttacataaaaatgagaaactattgaatacaacaattatttaaatactacactttagaattcaaatcaagaattattttagtgtaactcatttctaatacaagtattacatatgtaatttactataaaa

SEQ ID NO: 134569 - DNA, 510 bp, Cannabis sativa
ctacggtatatacgtcagttttataaaccgacgtaaattctttaagtgacacttaaaaaccgacgtgaattatactttttgtagtagtgattatttggtttcacatgtttcttggggtcatccatgatgtaaaaggatatactatgtattttatagatattcctaataatattaaataattttcatctaaatcttgttgttggtgtgtatatgtatatgtataggagattgcataaatctatctactctaatcacaaccaactgatccagtgacaactaactgatctaatgacaacaaactatcaaatattggatatatctaatattatgatcagcttaggttatattttcgtttgctttagataattcattagattttatattgttatacttaaaatatatacatgcttatatgaaaatagattaaaattttacttaattttttatttctttaaataattttttaaaatatcatttatctttatagtaagggtccaatttttttttttt

SEQ ID NO: 134570 - DNA, 704 bp, Cannabis sativa
tataataagggtataattaaaataaattaataattagcaaagcatcctactatttacttaattaattaatttttataatattaaatgagttagatatattttagtagatattttaatatagtagatgaattaattgattaatatttattaatttaaaaaaaattaaaaatatgagagaattaaggagaaaataaattaagctatttattttatttattttattatatataattaaaaagtgacccatgaatttctcataaattattttatttttaatataaataaaaagtcaccatgaatctctcataaactaagaatttctgttatataggcacattttatatagaatagatagatatgagaaatgataacagacacttaaggtgtgaaataccatatagtattttttttttttttgatgaagaataccatatagtatactcctattagtatattttaatattggtttttatatgtatatatatatattttaatttaataaattataaaagaaattggtaattattatatgatataatatatacggtgtggtgtagtaacttaatgtagcaatatatatttgcacaaattgggagtgtgtgtggttccttcttctagtactttatttgtattgggaaatttgattttctatacttagaaaatcaaaaaatttgatttctaaaccaataatttaaaccctaaaa

SEQ ID NO: 134571 - DNA, 662 bp, Cannabis sativa
agcagccgaactgggtactcccagcactagaatcccttcagcaacaaatgttcagacaaccattggatatgacactgagatccagaatctccgtaatgctcttgggatcatgcaaggtcatactaataccttgcatcatgatcaagaagagctccgtgctgttatgaaccttgcgtttgaagagcaaaggcgtcagatcgccgaatggagggacaaaaagatggaaacgctgaaggctcaacaggcagccatggatgacaaaacaagcaagccaccgtactaatacgaagagcctaccaagtttctaaccagcaacctgcatccagcatcccactgggtagctcggaagaaattcttgctgagcatacttcccaaactctgaacggtcagccgtccaatccccagtcacaggttccacttgtggaccaagtggtaggcgagcaaaccttatctggcaattcatcaggtggggttatacccaataactccgcccagactaccagttttgtccaactgattggccaaaccaaccagtcactgagacaacccgatgtttcagtatttaacaaattggaaacagctcatcatctcaggtaggggtgtacaaaaattttcgtaaaccgcccaacccgtataacctgcccaaaccaaaccgacaaaac

SEQ ID NO: 134572 - DNA, 790 bp, Cannabis sativa
cagaatgacttggatgaattgaacatggttccagtggagatgctaagtgagccaagtatatgtgaaaggaacatgtagagatgatagacaactttcctacatggatgactcttaaaatcaactatctactcgacggacaacttccaactgacaaaaatgaggtgcgaaaactcttgtactcagtgcctcgctacacaataattgaaggcaaactatacagaagaggttattcgatgcctctacttcgatgtgttctccttacagaaccaaacaaaatcatcaaagaaattaatgaaggcttttgtggggatcatgcaggttggcaaagcctatctaaaaagatcattaggcaaggatattactggccatctatcaataaggacacccatgagtttgtcaaaaaatgtgataagtgtcagaggttttcacatatacctcgcgtgccgacaacagaactaaggatgatgacctcaccttacccatttgctatatggggaattgatctaattggggcattacccactgggcaaggaggagccaagtacgaggtagtagcagttgacttcttcactaaatggactgaggccgagcctcttatttccataagctgcaagaaagttctcgactttgtcgtcaagaacattgtctgtaggtttggcattcccatgaagatagtatctaataacagaacccagtttgatggtaacttgttcactgagttctgtgagaggaacaaaataattaagagcttcttctcagtatccaggcctcaggcgaatggacaagtgga

SEQ ID NO: 134573 - DNA, 1056 bp, Cannabis sativa
  modified_base (230)..(232): a, c, t, g, unknown or other
cccgattagaagccaaaaatgtcataatggttttagttagaaatattgatgggactattaggataaattgattttaaaaataccaaagtattttgggctactcgaaatcgaccaaatacacttaaaatatagatttcttagcggctaagaaataataaaataattattaataataaagttttttattaatattattattaatattatattattaatattttattattatnnntattattattattatatgaaaaacttatcacgtaccataatattaagttatgtataaattaagaaaatatttaaatgtggttaaccaatcataaaatactactagaaagtgttaagtactgttaatatccaatagcaatcttatatatatatatatatatgagaaatacagtattagttatatttagtatttttcttattattagtgtaattaaatatcgagttaatatcactaactaaataagtcagtgtccatatacaacaaattaaagaagccaattagttacaaagtaagttggatgatagcagagtaaactaacaaaacaaataaatgaaccccttaaaatcaaaatttgaaatctttaccaataactggaataaaacaagagagctaattactgtaagtatgttttacaatttaaaaaattgacctttaaaagtgtgagagaatattttgtaagccaaacccaacaaaacagagttaaaacatgcctgcgaaaaagaaaaagaaaacagagagagaaagatgttcagactcacagatgcaactataagagtatataaataagaaaaaaagacccaaaaagattcacaaagattcaaccacaaaccgagaatatacacatataatacccatcaaagcataaaacttaagtacataataataaatttcaccaaataaaatcatatatacttgaaagcatgacttaagaatacatcaaaacaagtctacataatgactcagtaaaccaaacctgagagtttgaagaagcaaagttccatttcttaaaacagtttatttgataagtttgatcatgttagaat

SEQ ID NO: 134574 - DNA, 713 bp, Cannabis sativa
acattaactaaaataataattaataactaataattattaataaaagaataattaataacacaaatatcaataaatcaatagaaaatacattaatcatataataaataataaataataataattaattaaaaaaataaaaaaaaattaaaagaagatgtcgggtccgattggtccaaccatcggaccccatggacgagcatcagaccctctattaaaaaattaaaaaaaataataaaaaaaaatccaaagagccatcgggtccgatggggtccgattggtccgaccatcagacccatattggggatcatcggacccaggttccaaaaattaaaaaaataaataaaaaatagccatcgggtccgatgggcgtccgaccatcggaccatcggaccatcacccctgctaccaaaatttttcccaacatcgggcccccatcgggccagcatcggaccccatcgggcccgacgaaaaaaaaatgcaaaaaactagcaaaattccaggtttcacatacagcaaacattttaacagaaaaaatagtaaaataacagcaacaatccacagatcaagcaacaaacacaacattcttaattaaatataacaacagcaaaacagatttaaataaaaaaattaattacttacccattgatggagcttgtagtgttctagcttctaatgttgtggattagtgtggtggcttgtagtgtggaaggttg

SEQ ID NO: 134575 - DNA, 909 bp, Cannabis sativa
agctggagtcccatcttttcataagcaattttgaacaagatattggaagaggctccgttattaatcatggttctggccaccatcttattagctatccggacctctacaaccaatgggtcgttgtgtggaaatattattttgatagcatcttcgtcgctgaaggttatggtaggccctcctgctcgtggaattttgggcttcctttcttctacggtcaggataacttcctcttgctcgtgcttcaccattcgggcatacctctctcgagtttttcccgaatctctagctatgtgcgggcccccaacaatgacttgcagatgtccatctacgagtggaggtagcaagtcttggtcattgtcgttcctctgattctgatcggccttgacatacttctgtaactttgggttgtttttccttaacaagaattcattttcccacttcaggttgttgcattcgttagtgtcgtggatgtagtctctgtggaaacgaaaaaactttgtcatgactctcttgctgacatctttcttcatcggcacaagcttcttatacggggctagcgactgagtggccatgtaaacactttctatgccttcaatcaagatggtaaatgcagtgtactttgcttgattctcacggggagcttgctcggttttgttggtgagctttccctgtttcccattcccttgcctgttgttgttgttggaacgtttaacatttgagcttgaattatttgtgtaatgggggatttgggcggacgttccagtggaaggagcctttgacttgccaggcttttgctcaccttctgcttgttggaaagcttgttcgagcttgatgaagccttcagcacggtcaagaaaataactcattgagtctactggtccgttcttccttatgtccttccacagttca

SEQ ID NO: 134576 - DNA, 601 bp, Cannabis sativa
taacatttttgtttttaaattttttaatcacaaaaatagaagtaaaatttttgttcttaaaattttgtttttgaaaaaataaaaatgtgttctgtaaccatctttattttttaattttaaaagtaaaaaacaaaattgttgactgtagatatcatttttatttttatttggtaattttatttaagtcgggtccaaggaggtcaggatcgagggcgggtccaagctcaatttctaaggtctaagttggaatcgcagtttaaaatattgattaaaaaattttgaaagtgattttttttatttttaaaatttagattcttaattaaaaaaataaaaaaagtaaaaaatagtttgatagaacatgattttggaaaaatatttttactttttaattttaaaaataaaaaacttcttaaaaaagtgataacaaacgtatcataaatacttccttaatttttaaaataaaaagaactaccgtttaagttgggtcaaggcttgttttattttaaatgaaatatcaacttcatcgaataaattagcattctgaatataaaaagatgtaagagttcaccagaaatagaaatatcagaaatgctacgatcag

SEQ ID NO: 134577 - DNA, 1405 bp, Cannabis sativa
actatcatcaataagaaaacccttaggcttgttatccaggaacttgttcagaaatactgtaatgaaaggaacataggagtttgtcgctaggtatttgaccaaataggatcgtccagttcctatagaacctatcactaaaatacccctagagagggatagggctaagcggagcgaaaaaggttttccatgagatgggaaatgaaaactattagccccacaggaggtttgtgaataagtgattgtctgataatgagaaaggaatatccgtctttctgctaaacaggatgtattgaactcataattcattagagactttttatgaatgtcaactaagtatcgtaagtaaattgctcccggttgttcaatcatttgataaccagagtcattctttgataaatgatcactatgagtcagactcaatagaatttgatcaatccttttttctgtcgttaaggcggagaactgaaccaagagctctctttctttatcatcaatcaaatcactgttcgagacccaggattctattttatcatcaatccaatcactgttcaccttttttctttttcttatcaatgaataggtctctttacttgtatgacttagatgtctcgtatttatcgaaaaagagattcgattgatgggatttggtatgatacttatgaaatcgatgatatcgatgagattgatattcaaatatttcttcttagaacgtattgatttgaccccataagtgggaccgccaccccatagcatgttgccgccagaagcagaaccctgtatttcttctagagaatctcctaattgttcccgagcaactagaaagagattctttaaccagaaagaattcagttcagatgtaggatacctatccagaagttttcgcaactcaatcatgtatgatggaatcatcaaagatttgaccctttcgaactctgtctgtaactcactataggctcgagaaacaaaaagaagatgtgtacgaacgagatatccagcaacaagaagaaggaaaaggattgaatagaggaactcccgaacccgaacatttggcgatctcagatgtgtcgatatcaatggtgactcattatttcgatgaatcatttctttggacagaagaagattatgtaaacacttactcgaaatctcacttatcagattccattgtggaagacagaattttttctgaagaattcgccatgatatatctaatccatgcataatatcatgaaaaatggatacaaattttgggctgctacttagtatcggcaataggtctgaaaaagtatctaaaaatatcaaatttagatatttgtatcctgtcgaagtaaggaaccatggcatatatgtttggaatatattccattttgagagagttgaaaaagcactatctcgttgaaaggttcta

SEQ ID NO: 134578 - DNA, 853 bp, Cannabis sativa
  modified_base (27)..(27): a, c, t, g, unknown or other
actaatcagattgtaaagagttttatntagggcataaaacctaacagatatatgctcacttcctctccaaataagacttggaaaagtcttctcccgaagacccacacttgttcaaagcttctcttcaacctattttatgaatagtatgagatcataataagaaaatcaaaacaaaacctagttgaacactctaagtttttacaaaagaaacactcttctcacaaagaaagatatgaaaatatgagactagaagagataaaattgtttggctactctctaggtcctatttatagaacatagcaaccctagagacaactacaaaaatgatttcccagttgtacaaaactttcttaaaaaaatttctaatttgcagcatcagaaagaatcggggttcgcagtagcagatcaggaccaaaaaggaaactttctaaattgaaccaagatcactaatttggacttcaaacctgcccaataaagataatttgatttgttctaataacggcaaaattgaaatcatcaattagaaaaaggaaaagtcaagtttcccaaaattagacaactttccataagagaatttcttctcttacaagaagtttccaaacaaagaaaattccagctgaaaaatatttttttcctaagatagaaaagagcaataaaatgcacaaaatcaatgaaataaaaacaaggggttttttcatttttacacttcaaaacaaatttttttttgcatttttacgaaattctacatagaaacccctattacaactagcgctgcaacctaaattgcagcaaaaaatcgtttaaaaacccttgcaactagcgctgcaaccattttagaaacccaaaccgtaaa

SEQ ID NO: 134579 - DNA, 3113 bp, Cannabis sativa
  modified_base (750)..(759): a, c, t, g, unknown or other
  modified_base (2425)..(2437): a, c, t, g, unknown or other
cagtaacaaaattacattctgcttctgcaggcgtatacagttttatattttcatatatattattgacatttgcaaaaaactcggtttttcaaaatttaacgcaaaagtaatcttcatattcatgtcttagtagaacgaattcattgtgactaatgggaaaaaatatgtcgagatgggtccagccacatttcacgaaggggtaccactatcagaaatgtgagattcactatttcgattgaaatgattagtgcttgaaaactatttttttttctcaatatgtccaaaataaaagtgatgcacaatagtcttagttttgtccctgtaaaattttacgattttttgagaagtgtagggtgagattttaagagaacactgatgagtgtaaaagtaaagaaaaaacttgttaaaatctaccctgaaaaaaatatttttaatttttgaatcagggggtcattttaaccaaatttaacatgaaatcaatcttcatatttgtgtgttactagtatgaattgtgactattggtgaaaaatatttcgagatgggtctgggccacatttcaaaaaaggataccgctatgagaaatttgagattttcactatttcaattaaaatgattgttagtgctggaaactactttttctctcaacatgtccaatagaaaagtgatacacaatagtcttgactttgtgcctttgaaatttcacgatttttcaagaagtgttgggtgagattttaagagaacactaacgannnnnnnnnnaaggaaaaaacttgttaaaatttatcctgaaaagaagaatatttttaatttttgaattaggtggccattttaataaaatttaacgtgaaagtagtcttaatattcacgtcttagtagtacaaatttattgtgactaatggggaaaaatatttcgagacggatccgagctacaatcacaaaggggtaccattattagaaatgtgagattttcactatttcgattataatgattgttaattagtgcttgaaaactacattttctctcaacgtgtctaatagaaaaaagatgcacaatagtcttagcttcatccctgtgaaatttcacgattttttgagaagtgtagggcaagattttaagagaacactaacgagtgtaagtgtaatgaaaaaacttgttaaaatttaccctaaaaagaaaaaaaatacttttaattttttaattagggggaatcaaccaaatttaacgcgaaaacaatcttcatatttgagtcttagtagtacaaattcattgtgactagtgggaaaaaaatatttcgagatgggtccgtgccacatttcacaaatagttaccactatcggtaatgcgaaattttcactatttcgattaaaatgattgttaatgcttgaaaactactttttctctcatcatgtccaatagaatagtgatgcacaatagtcttggcttggtccatgtgaaattttacgacttttcgagaagtgtagtgtgagattttaagagaacactattcaatttaagagtaaggaaaaaacttattaaaattttccctgaaaagaaaaatatttttaattttataattagagggccatttaaaccaaatttaacgcaaaagcaatcttcatatttgagtcttagtagtacgaattcattgtgactattggtgaaaaatattccgagatgggttcgggccacattcttcaaaggggtaccactatgagaaatgtgagatttttattatttcaattaaaatgagtgttagtgcttgaaaactactttttctctcaatgtgtccaatagaaaagtgatgcacaatagtcttggctacgttcatgtaaaatttcatgattttttgagaagtatagggtgagattttaagagaacactaacgaagtaaggaaaaaacttgttaaaatattttcatttttgaattagattttaaccaaatttaacgggaaagtaatcttcatatttgagtcttagttgtacgaattcattgtgactagtgggcaaaaatatttcgagatgggtccgggccacattcacaaaagggtagcactatcagaaatgtgagattttcactatttcgattaaaataattcctagcgcttgaaaaatattttttctctcaacgtgtccaatagaaaagtgatgcacaatagttcgggctttgtccttgtgaaatttaacggttttctgagaagtgtagggtgagattttaagagaacactaacgagtataagagtaaaaaaacttgttaaaatttaccctaaaaagaaaaatatttttaatttttgaattaggggacattttaactaaatttaatgcgaaagtaatcttcatattcgagtcttagtagtacaaattcattgtgattaaaaaatattccgagatgggttaaggctacatttgacaaaggggtaccactannnnnnnnnnnnnattttcactatttctattaaaatgattgttatagtgcttgaaaactaattgttcactcaatgtgtctaaaagtgatgcacaacagtcttcgcttcgttcctgtgaaatttcttggtattacaagaagagtagggtgagattttaagagaacactgacaactgtaagagtaaggaaaaacttgttacaatttactctcagaagaagaatatttttaattttgaattagggggccattttaaccaaatttaatgggaaaataatattcatattaatgtcttaataatacgaattcattgtgacaagtgtaagagtaaggaaaaacttgttaaaatttaccctgagaagaaaaatatttttaattttgaattagggtgctattttaaccaaatttaacgggaaaataattttcatattaatgtcttagtaatacgaattcattgtgacaagtggggaaaaatattccgagattggtccaggacacatttcacaaagggttaccattatcaggaatgtgagattatcactattttgattaaaatgattgttagtgcttgaaaattattttttctctcaatgtgtccaatataaaagtgatgcacagtagtcttggcttcctccctgtgaaattttactattttttgaaaagtgtagggtgagattttaagagaacactca

SEQ ID NO: 134580 - DNA, 1753 bp, Cannabis sativa
cattgtattgttgttatgttatatatataaacagtatttttgaaaaaatttccgtgtgacagtatttttgtaaaaattaactaaaagtccaatacttttataagtttcccttttattaaagatacataaaacaaaaaaaaaaaaaaaattccataaagacattctataatactaacaattcaattattcttataatttcatttcataataaaaggttattttgcaaacaatgactaagaatattccaaacttcatagtttatgatgttctaaaaaatcaaaattttctaataagtttttgttaaaaaacaaataaaaagttagcaacaaattattgggtaagtttattgtgcacttaaatttgatagatcctctctttcaaaaaaaaaaaaaaaaattgatagatcccctatttactttagcatacaagaaagctttttagtttttttttttcataatcgcatacattataattatttatgaccacctataaatttttagaaaattacgagtaatttacaatactcaaaataatatttacatattttgttgcatgtatgccaatttttaactcaaaaacttttcctggtgacgtggacatcaatgtttgataggtgacatgaaggataacgtcacgaagttgagtaggcccgagttatagaagtcgacctgggaggggaccctagccctacgcccagattgacttcaggatctctaggatggaagttcagactttaataacttgaatctaactaactatctttaagtattttgtagcatgaagacatggaaaaacctaatccaaggctcgagagctaaaattacacgaacctgcaacccagaagccaacttaggcacttagggcttcacccggcgcgcaagttgacataatcaactaggatttcagtttcggagaccgtcttagagcaaaagggtcaaaacttatattgggacatcaactagatataccatggacatatctgagacatcaaaattaaaatcagagcaagttcatttttgagcatctgaagccccgagcacctagtgcccaagttgacaatatgtcaatttggacaccttccaagtatcaaatcggagatccgacttttgcatcttcttggtcttcatcaaaaacaagaaatatatcctttcaaagaagaaacaacacttcttgggtacaaaaaaaaggggcccagcacccaggttgacaccttgggctggccctgcgcctaggttgacatttttcaacctatgccattttaaatggagtttctcaagaacacttttgatcatcttcttcgtttttaaaaaatattaagattcaactatattcgagaaccaaacagaatttttgaaggagcaaaattaggacctagcgcccaagttaacacctggagctaggcccagcccctaggttgacatattgtcaacctgggttgtttttgatctcctcctccttgagcttctaatcctttccacaaaaacttgactcaagaaaatatatatatgtatatatttatatatattcttcttgagcaaattagtaaacacacacatatatatatatatatatatattaagcaagcaaactagtgaataataaacccaaaatcgtggtggactcctttttttggtgtggtttatgttgtttttcaacaatcaaaccagcgaataatgaaggtatttctattatttttttagttattttagggtttattttttcttttttgctgtagatattttggatttttttt

SEQ ID NO: 134581 - DNA, 527 bp, Cannabis sativa
attgagtcacaaacgataataatcgttacctcgatcataatcgagtcacaaacgataataatcgttacctcgatcataatcgagtcataaaaagtaataattgctatctcgatcataatcgagtcacaaatagtaataattgtttctcacttaacatgtacaacacatatagcttttcttacctcagtccagaaattaagcatgcgccgaccaatgaataaagctcgacgatcccgggtcctatgttacgacaaagaaattctataaacgacttatccatattccaaacaaaccctagctccataactggacaaatttctaactccccactggtttaaaataactcaactgtcattaaaatatcccattctaagctctgggaaacacctcgaacaaaatcggtttcgaagcctaaaaccaggatttcctctgttggcaaaactggttgaccggtttcactatgcctgtgaaatcggttaatcgattttccctgctacagaaacgggaaaactctaatttgttgctcc

SEQ ID NO: 134582 - DNA, 612 bp, Cannabis sativa
ggttgcagtggatgccttcctcttctgatccatggccgagccactacctcccctgctaaagcctaatgcaggaggggtaggagccccccaaccactggagtcctaaccgactcagtcatgcacccaactgcgccctcaactcgcaatgccttttccaccatttcagcataggtggttttgttttcagtagtaatcatcaaatcatgtcgtatcttggcttttaatccatccagatatttctcctttttactaaaatcagtgggcactatacccgaggccaacctcgccaaccgataaaactgtgttgtgtattcagttacactcatgttttccttctgagtcaagtgagtgaactcttttcttttggcacttctaatggcctcattataatacttggcattgaaaagttcctgaaatttttcccaggtcatcgtagtgacgtcatgtatcatggacaccatgtcccaccccattaaagcatcctcctgaaactggaaagtggcacacaccactctatcatttccggtgacgcccatgaattttagaatttcggtgatcactgttagccactgctcggctttcataacatccggacctcccagaaaaactgga

SEQ ID NO: 134583 - DNA, 575 bp, Cannabis sativa
atatataatacctgtcaagggaagggaagatcaatgattggggactgagcatgaaaaggaagcgaaggagagagacactccggtgaagataagacatagtgaaggaggcagaggactggtttgaaatcggggaatgaagggggaagaggaatgaaatagagatggaggaacgaaggaagaaagggcgatgaaggcagagggctgaaattgcaggtggtgcgcacgactccgatcttcgacagtggtggagaggaggaaaggtggctaggggatcgatcgtcgatggtggtggagaagagccattgtttctagagaaaatatccaataattttttcaaaacgtaagggtataatgggaatatgagcaataaaaaagggtataaattaaatactacaaaaggagaggtaagaataaaatggggtaataaaaaatgggtatagaatgtaattttccccctattttccccctattatatatatatagaagagttttcaatggttacatttttattgtaaccatcatggttaacattttttttaagccattggattaatattaaatggttgtgattaatt

SEQ ID NO: 134584 - DNA, 1057 bp, Cannabis sativa
  modified_base (187)..(201): a, c, t, g, unknown or other
ttttaaccaaatttaacgtgaattgaatcttcatattcacgtcttagtaggacgaattaattgtgactagtgggaaaaatattccgagatggatctgtgccacatttacaaagagatatcactatcagaaatatgagatttttactattccgattaaaatatttgttagtgcttgaaaactactttnnnnnnnnnnnnnnncaatagaaaagtgatgcacaatggatttggattcatccctatgaaatttcactatttttctagatgtggggtgagatttaagaaaacactaacaagtgtaagagtaacgaaaaaacttgttaaaatttaccctgaatagaagaacatttcaatttttgaattagggggtaattttatccaaatttaatgtgaaactaattctcacattcacgtcttagtagtatgaatttgatgtgactagtggaaaaaaatatttcaagatgggtccgggccatatttcacaaagaagaaccactattagaaatgtgtgatttttactatttcgattaaaataattgttaatgcttaacaactacttttttctcaacgtgtccaatggaaaagttatgcatgaaggtcttggcttcgtccttgtgaaatttcataattttttgagatgtctagggtgagattttaagcgaatactaacgagtctaagagtaaggaaaaacttgtttaaatttaccctgaacagaagaacaatttaaaattttaaattaggggtcatttcaaccaaatttaataggaaaccaatcttcatattcatgtcttagtagtacgaattcattgtgaatagtggtgaaaaatatttcaagatgagtccggaccccatttcatattagaaatgtgagatttttactattttgattaaattgattgtttgtgcttaaaaatgacttattctttcaacgtgtccagtagaaaagtaatggaaaatggtcttggctttgtccctgtaaaatttcatgatttattgagatgtgtagggtgagatttaaagagaacactaatgagtgtaagagtcagaaaaatactt

SEQ ID NO: 134585 - DNA, 585 bp, Cannabis sativa
acaaatagccccttcacaaaaagataaaaaaaaacaaaacccactctacatgtgcaaactaactcattttggtcaactttaaaccatgtgaaatatcaaaagcatataccccactgatagacaaaaccctcgacagagagaaaagattcttcttttcgtcagaggtttgtttgtttactcaatattcaaactcactttaatactcatctaagtatttgacctaacaacctaatcccaacctattataaaaagccatttttcctacattaccctacgtggacaagaaacactcaaaacaaacactaacgaaaaccctaaaattttaaaagtttagaaatcttaccaggtgggggatcgtgtgaatttcccctctggaatttcattgttgttgcttcgcctccttacaccgtcgcctgaaggggtagtgtttgcgtttataatgttacagacgtgaatggtggaagagatgatggggttttggttttaggagttcgaatgtttaagtcctaatgtttttgtaaagcccgcttagttaatttggaaattagcagatgtttatgagtaattatgaaattatttatagct

SEQ ID NO: 134586 - DNA, 636 bp, Cannabis sativa
aatttacttttggctttatcttttgttgagttatgttttgttacaagatctgcaaataagttggctcattgcttggcaagagactcttgtttctctatagattgtgcgcttcagttggatgattgttcctcttaagtgcgttctattgttatgaacgattttattatttaataaatctccttatttattcaaaaaaatatatatattttttaaaaaaaaataaattaaatagcatacacatatgaaatggtattgtataacataaaataataataataataaataaatgatttagtcaggtgtttttctgtttttcttcttttatcatcatccctaaaattggtgacattgataatttgatagaggcacatttcaaaacaattggccaaatacgcactagtacaaggtctcccataagaaaataataaaaaataaaaagaagagatcttaaactaatcaattttcatagagcaactagaaatatatgtatatataatcactacacacataaaagatagggggcatggcctcgcaaggaacaacgtagttccgctcctgagcatacttagaacatgtttagtattgttttctgttttttgtttttaaaaaatattttttagaaatgagaacaaaaaa

SEQ ID NO: 134587 - DNA, 607 bp, Cannabis sativa
aattttcttgcaatcttccaccactgaaccgaaagaagaaacaaacacctctgcactacgaatggcttcagcacaaacgaggctatctgtctcgacgatggcctgggagaaggagtgatttttcagccaactcaaagcttcccgtatgcccattacttcggccaactcaggagaaacgctgccaggtttcacaccaacgaaggcagcaatcaaagtgccctcagtatctcgaacaacacacccaaaaccgtgctttgaagagcgttcaaaaatggctgcatcgacattgagtttgatacctatactcggctttaaccaaagctccgaaccatctccatctttgagaggagacaacaagggaatgttaccctttccttgagctttcaaccattgatcaagactcgaattagcaaatgtaaccacgtccttcacgctacgagaccgttgctgccatatgggatcattgcgagcacaccaaatggcccaacacaccattacaactctgctgtgaaggtcaacttgcaggcggctaaatgagtcattaagccactgtccgagagaagaaacttctcagtttgcagccgccaaaccagcaaactcccagcac

SEQ ID NO: 134588 - DNA, 567 bp, Cannabis sativa
gagactgcttcacaaaaatccacacccacagtctcccagtagtgcttgaagaacataactgacatcccatccggtcccgggaccttgtggttactcatagcaaaaagagtccgacgaatttcatcatgagaagggcctcttactagctctgcttgatcatcagcagacaatctatccctaatgagaacatcaaaatttagctcctgctcattattcgatccagaaaaaattccttgaaagaactctaggaattccttgcaatcaactcccgactagaaatccaaacattatctttatttaaaatacattctatagcattccgtctccctctgattgcagccgagaggaagaagaatttcgaacatctatccccttcctttagccaggaaatcctggcccgctgcttccagtacagatcttttcgagcgtaggcctcattaagagctcgccaaatatcgcactcagcatcccaatctcttgatcccactgtcaatccccggatggcgttgagtttaccttccagatctttaattaagctatcaactttaccaaactgggatctactca

SEQ ID NO: 134589 - DNA, 775 bp, Cannabis sativa
acaagggtaagtctttcttgacgattttctttagtcctctttactgggctcaaatactatagtttttcctctgtgcaggccgatctgaagttggactacacctactcccgggttaagtctgcttcttccaagagcacggctttgtccaacaccatgagggcggaggtggacttggccaggaaggatgttgaagacgcaagagcagaactcgaagctattcggatggagttgggtgaacccaataagaagctttttaccgcccagaagaaaatagcggggctgactaaggatcttgaggcttctgaccgacttaaggagaccgtcgagattttatctgctgaagtgaacagtcttcaggtctagatgacatctcttcgagtcgtccttcgttgggtggaggaggagaagaaagctaaggatgaggagcttacgaccaaggtgactaagctgaaagagaaagttcaagccttggagatagccggtctcgagctcttctacgacttttggaaggctaatcctcaggtgaactttgactacttgggagaagctaaggacatgtaccttgagttctgcgcttctcaagtgacttatggtgaaaccaaggcagctgcttctacctctaaccaaaatgctgatatatatcccgttcaaacaacagatcctgtagctcctgccggcccaggcagtccagctgtttaaacacttcttcttttatccttttatttttatatatcttattcggccataaggccttttctaagacatcatgaccggc

SEQ ID NO: 134590 - DNA, 969 bp, Cannabis sativa
  modified_base (153)..(159): a, c, t, g, unknown or other
  modified_base (188)..(196): a, c, t, g, unknown or other
agagagagagagagagagaactacaaaagcatagtttaatttatgatattctttattatgtcaaatgattcttccatgacttaaatgtttttttttggaggatgaaatattttctatattatggtaacactcactacaaaaaaatcttacttnnnnnnncaacaaaatttgtgattaaaagtgaaaannnnnnnnntaattataaattattattcttatcttgtgactaataggtcagtggcaatcaaaattagtcacaaaaattacagtcatgttgtgactaaatatatttttagttacaatacttattgtgactaaaactaaattagtgacaacctgtatctaaagattatattttaatcataagtaacattttgttgtgattaaaagtcgtatttagtcacaaaaaaattatattatgactaagttatatgtaactaaaagtagcagttttttatattgactcaaatcaacacaaataacgtatgttatagtgagatttttctcacctagaaactcgagaccagattcctatttggaggacacttgtactcaatttccctaaagaaagctgaaatgtcaatgagagattcctcaagtttaaacctcgcctgaactagactcagcgagatgatgcggatatgacctagtctagccgcatttgtacgactcgcattatgcaggaccaatgaacaaatttaacccgcatataccgatatatatatatatgcgagtatccccccgatcctcctgcgatgacatagagatcgattctctttgatgcgagctggtcccgatgacccagcagcctcgataaaccaatatagactcgcatgtcttagttctatcagctccttatacgatgtccgtgaatgcgaggttacaagaacgcagacatcttagactcaactaagtgttgagtgtattctaagtccacgagcttacgcaagaatatgaacagccaactcg

SEQ ID NO: 134591 - DNA, 544 bp, Cannabis sativa
ggccatggtggctccatgagaatcgctttatagctcgactcatgagttcttgtgaaaattgcttcgccttggcgatagtttccgccttgagtccatgagagaactaacggagcctactcgacaagctcccatgaacattgacagaggtcttgaaactgaagccagagtttcaccttcaacggcgatattatcactgatatcataatcattttggcttgttaataaatagctttaagcattgttgtgatgatttcaacacgcaagtatatgtgtcgtttacaagtaatagactcacaaagtgtgaggttgatcccacaagaattctagttaaatactttaaaattaaatctttacttctatttagtgaatttaaaattaagagaaaagtaagattaaaaacactaaataaatagtgaaagtatgaagcaaataaatcaaaaggaaattaatgatgattaaagttagggctttcgatttcaattgtatctattgattatgacctaatatgattatcttccttttaccaatttctatgcaatagcag

SEQ ID NO: 134592 - DNA, 795 bp, Cannabis sativa
tagaaggaagacattcatggcataactaggtaatgattgagccacagatttaattagcaactctttccccgctttagacaagaactttccttcccagctctgaattctttcctcattttgtctttcaagaaaccaagcatagatgttttattgcgtcccaaagtgttgggcaaaccctagtaaaaactattctccccagcttcaacaattcccgtcaaggaacagattgcattcttgacattcggatcagtgttgggactgaagaaaatagtggatttctgatgattcatccacacaaaactctccactatttcttctttctcaaattctcaatttctattgggaaatttacatggtatactaacttttgccatttttttacaaaaatactgttaggcggtattttttacttttttactgtgtatttttataagtttcatactgcagtatgctgtgttaagttttcactggtgttctactggtgttttttaattgttctactggtattttgagttgttctgttttgtgttctactggtgttttataaaaatacagtatttttgtaaatttttccgtatgatagtatttttgtaaaaattacccaaaatttcagtatttttgtaaatttccctttctatttgttctgtctcactcaaaagtcatccacacaaaaaatagtattggtataaatgtataaatatatatatatggcaaattatgtaattcctcaattactttttgagggatgaaacacttcaaataagacaaaataataataggttccttttatgttat

SEQ ID NO: 134593 - DNA, 735 bp, Cannabis sativa
aaaacctcataacacataatacctcataaaaccgattatatttttttttttttttaaaaaaatggagattagtttcaaaaaatgttgaggcataaaaataaaaagaaccagttccataacaaaataataaacacaaataataacatacaataactaaaatataatataaagaaaccgtatatttagcaaccaattaaaaatttaagacaaaaaattggttccataaaacaactaagataaaaactcacacacaaaaactagttatataaaatagcttaaacagaaacatccattcaacatgctccaacccaccaaataattacacccatgccatatctacctcaaaaatactcatccattatgtctatataactagttctattttagttacaaccagtttgcgttattttgtgttatttatttttattaattataacattgttataaaactggttcattataacactgttataaaaccggttctattttatttacaactagtttaagttattttgtgttatttatttttattcactatgttacagaactagttatattttaattgtaaccggtttgcgttatttggtgttatttatttttattcattatgttataaaatcagttctatatttaaattataaccgatttttgagttattatgtgttatttgtttttagtcattttgttgtggaaccgagtctattttaatttatgtcatctggttttttatttaat

SEQ ID NO: 134594 - DNA, 1580 bp, Cannabis sativa
gaacacctctatttgctatagatcaaccacgcctcaacacgagtctgtaccaccatcgtgcttatgattagatttgaaataaagagtgatcctatgattcacgctctcaatgaaagcaccaaaatattgacctcactttttgccaatgacagtgagtcttgattgtaagcgacaagcagtataatatatatgcaatataatgaaatgaataaagatacaagagttttatagaggttcggccccgagcagttcggtaatagcgtactccctttagtttgtattgacttaagaacaaagaatatactgattccttttcttagagttcttataataatatctctaaatatgaatttttagataagttttttcactctttgcctagtgagaatagggttttaagcttggagtgacgagtttcccttctgattaaaatagatataattggcaagattacacattaaatacatcatacactgatcaagggatttggacagcttgcaatatctcagttatatgatccaaaaattatagggatttcttcaatgattcacgatgcgagtgttgaagctgctaagtgttggcgtgctgttcggactgctcactgcccagttaagaaggcttcacccctaggaatatatgtggtgtctgttcggcatatctcttgtgaatagatatgtgaagttgattccacgtgtcaccatcgtgtgatgccacgtcagagtacaaaaattgggataacattatttttattttcttcaatttttaactcgaaacctagtgatctaagctctggtagtagtgggatagcatatatttgaagaggaaaagcttaaggtatggtttaattacgttttaagctaaaaagattggttttatataaggactttatgatttaaaaaggttatggagattctgattttgtagaattgttcttgggtaactgtgggactagtatatatatttacttgttgaatttgaggtgattttgagttagaaatcgattttggaactttttaaagcttagtccgaacattaatgacgtttttcatttaagggctcgattttaatttctattacgcaaggatggtattatttatagtatatatgcgtgatgtcgcccaattagttacactgcggtcacggtggtaaactggctatgtcgtatccacagggaggcaaattaccattaaagattagtttagtagggagaaaatcatagaaattggaatgaactaaaaataataaaatactgagtgagagagagggtgatcagataaagagcttggtaaggtagaaaggtagttatgcaaatcctatcctaataccgatattaattcgaacgcagttgcaattctagaatattaatttcaaccggaagatatatatatgttaaaaatacaaattaattaatcttgcataaattgaatctcacctctaacttaacaacatatcatattatatatcataaatcgacaaatatcactattggcaaaatgcagtaaacgacatacaatataataaatataccaaaatattaatagtctaacttacataagaaaaacatgactgaacttatataa

SEQ ID NO: 134595 - DNA, 1068 bp, Cannabis sativa
cgctgagatggctgaggcttttcgggccatgtcgcctacgcagactcaaggcggtggagggaatctgtttcccgaggatgctgatgctgcgaacaatgaggatatcgtggacgaggctatcagcaaagtcgcagatggatctgcccctgccgctcccaacgcttaacttttaatatttacttctgttaaactcttttttttatatgtacatgtggtacaagggtactcgcaatttgtactttggacaagtttatatttatttctcttttgagcgaatttacatcctctcggggatatttatcgataacatttttgcagtacacgggtactcgcatatttttttatttataatatctccattgcgacttaactacagtttggtgtaataagtattaaggtagaaaaatttcaaaacttcgaaaaaatttcataactctttacttatcaatagtacatagtggtatataccccttatacttagaatttttatgagaaaatgactaagtataaatacatagcgagtacaaatgatacagtgcgagtactattgataatataattttaagctctcaccattccaggctcttcgaatcgcactaccatcgagttctgtgagtatgcatgttgcgttgccaaccttttctgcgatgagaaatggtccttcccaattgtctccgaagaccccatgcgctgggttcttcgtatttggcattatttttcgaaggactaagtctcctactcgcaggactctttccttgaacttagagttgaagtatcttgcaattcgtcgctgataagccgcatttttcaggtgagcctgatcgcgcttttcttctagaaggtcgagatagagcgagtgcttttcttcgttctgttcaatgttaaaaacatctcttcgtagggaacctgccccaatctcaactggtaccatagcctcgcatccataagagagcgagaatagagtgtcaccagtcgtggatcggggggtcgtgttgtatgaccataaaacttgcgaaagctcgtctggccatacccccttacgttcttcgagttttcctttgatggtgt

SEQ ID NO: 134596 - DNA, 511 bp, Cannabis sativa
aaaggaaaatttgattttttatgcatataataccttaaaattaatctcctaaacttatatgtattaatatttgctaaataggtcaacatgtatttttttcccaaaatacactcctcattttcaaacagccattatctttctaacacccaaccaccaccaattttccatccgaggatttacgcgacccaaccaccaccacgaccatgtccacgactcacgacccaaacaacacctttctccactacccacgaaaattgtgaatgacaaccatcgtgtttgacggactgaagacccttttctcgacgaccatcgtgacccacagacccaatgtcaaaggttagtgtttttgaatctgtgatttttgggttagaaaatgcattttctagacaggcccgatgtaggtctgatgcaagtccgatgcaggcccaatgcatcatgataaaaaaaattggatctgggttgaagacaaaggcccgatatagggtccgatggggcccgatggtcaaaaaat

SEQ ID NO: 134597 - DNA, 588 bp, Cannabis sativa
ctagagccatcatgtttgtttgtccaagtgtaattcgacccacctcttttcatttcttcaacatgcgcttgactaacccacaaggtagaatcaatcaactcttgctgagaaacactattcccacctgttctatcatcaaacctgaacactgaattaaaatcacccaataaaatccacggtttgacaggctgccttaagattagtaagtttgaccaaagactttttctctcatctatggtattaaaaccataaatgaaagtggaacaaaaagcatttgtcatccctaccattttgatgtaacaatggacatattggggattttcagcaatcactataactcttgcaaatccttttctccaaagcaccaacaatcttccttctgtagtaggactcgtgaaatagtcccaattagagcatttattttccatcatatctgtaacattactacccttcaactttgtctcaagtaaagccgcaacacccactttattcttgttcaaaaactccaccacagagtcttgtttattcttattatttataccccgaacattccaacttgctaaattgcaattatccattagattcaac

SEQ ID NO: 134598 - DNA, 594 bp, Cannabis sativa
cctgagattcttttagagcaaatgggaacccctaaataagtaaatggcatgcttttatgcttaaagcctgaggctaataagattctatttacctcctcctgggccatgttactgcaatatatcgctgacttctgagggttagggtgcaaaccagatgatacagaaaacaattttaaaccctggagcatatagaggatgcttttgaaatccccattacagaataacatcacatcatctgcaaacgccaaatgattaatcttcagttttgagcatctctcatgaaagtgaaagccacttttatcacccaccactttaagaattctcgatagatattccattcctagcacaaacagaagaggagacatgggatctccctgtctcagtcctctttttgcctcaaagaacccatgagtggaaccattaaacataatggagaatctgggtgtcctcacacaattcatcacaacctgaatgaagttagaaggaaattggagacctctaagcatctcctctaaaaaatcccattcaattgtatcatacgctttctggagatcaatcttaatcatgcaattagccttgcttgatttccttcca

SEQ ID NO: 134599 - DNA, 761 bp, Cannabis sativa
tgtgtgatgatgtgatggttgaagaaaaatgtcaagaaaatattgaagaggtcatggaagctagaaatttcaatgaagatttagattatatttatgatccgggaagatgggaaaatcttgataataaactaatagacttgttagtagaaaagggtccaattagagtaataattgattttagtttaattaaagatgaaaatggtagacacttttcaacttcttattatacaagaatattgtcaaatggagaaaaatatgatagaaggtggttagtgtattcaaaagagtttaataaagtatattgcttttgttgtaaattgtttggtaaaaagtctaatatggtgagtgtgagtcaattgagtaacaaaggaactaaagattggaggcatctaggtgataagttaaagaatcacgaaacaagtaatgatcacatacttaacatgagtgcttggattgacttagaattgagacaatcgaaaaacaaaacaattgataaagatgctcaagaaagacttaataaagagaaagagcattggaggaatgttttagtaagaataattgcaattgtcaaaaatttagctaaaaataattcggcctttcgaggatgtaatgaaaagatctatcaagaaaataatggaaattttttaagcttaattgaaatgattgctgaatttgatccaataatgcaagaacatgttcgacgtattcaaaatagtgaaattcataatcattatttgggacataatattcaaaatgagttg

SEQ ID NO: 134600 - DNA, 811 bp, Cannabis sativa
  modified_base (418)..(424): a, c, t, g, unknown or other
  modified_base (567)..(570): a, c, t, g, unknown or other
tagaagctatagattccatacctatgattagcgcttccacttaattatactatcatgttcccaagatgtaagtatctacctgaaccattagtcagcttttgcaaataactctaagaacataaataatacaattgagatcgaacttaaccatctcaggattaagatatatagacctaagttaaactagtgatattgacttagaaagatataatggcaagtttatgatatctcatcctagatcaatatcggtccaatccaatgtatactccatacatccgatactggcatactttgccaataccctagaaaagacataacacttatctaaggtgtaagtataccttatcactgattatcatgttagtctaaatccagtgtactaacaaatcatggaacttaaacttttgaacatataatnnnnnnnatatttcactgtgttgacaacactataatcatgaattaaatatatgttgtgaacttaatagaatttatacattaaacatataattatgaaataaatcatgtaaaccatgcaacataaaatgatttttgatcttttattaattnnnnaatctgattatattgaaatgagttgtatttagggtacaaaatccaacggctattaccatcaatacggggctgaacctctataacaatcttggtgttctttttactttatctttatcactagggaatagatccgcgctttgcgcgatgttaataatttttagttacaaatgaaattttaagtctaatacttttttaattatttttttatgaataatataaaattatataatatattatgtaa

SEQ ID NO: 134601 - DNA, 630 bp, Cannabis sativa
agccgccaaaaattcagtttttgtggttaagtgttacaaaccgtaaagttcaggtggtttagccgccaatatcccaaaaataaaattctagactgaaattttggagccaaaaaggctgaaaatttcagaccaatatacccaaaatcaatatccgaccatttgtctcttaccctcaatttcagaccagcggcctctgtccgacgagctcctcaccacgacgtcaaggaccagcggcctccgcttctcctggttctcccacgtctcttcctccaccagcgtcaacgacggacgaatggtatacctctctctctctctctctcggacatattgcaaagagaacatattgtctttaaaaaatctgcttgaggtgctgttagttttgatactgtggaggttgattctctaaaactgaaccagttagtcagattacattttaagaatcatttcctcttcaactgtaaacaaagtgtattatcaaaacaagtataatacactttcaatactgtacatatgggttttgagttttgtaatttcttttctattgattccaacaactctagttggttggacatggggttttatgatttatttggtcttagttaactgcattacactctcttattatgttta

SEQ ID NO: 134602 - DNA, 759 bp, Cannabis sativa
ttatttttcaatagcttttattttttctgtgttgaattatcatcgcgaggctcgaatttggttaacgaaaatctgcgttaatataaagttatacctcttcatcgttaaattcatagcaagtgtaagagtagaaagtattgctcgaaatcgaaacctcaaggaactgaaagtaagctactaccttattatacttaaaaatttgaataattagcaaattttacccctaaactttcgacaatactgatttctcccctcaaatatgcggtttgataagaatcctccctcaacttttacatctacggaaatttagtccttctgtttggtttcgtctaattattctgtttaaatgacgacgtgtctttgtaaattagcaattttgctccctaaactttgacaactatcgaatcgtaccccctcaaaataaacatgacaaatatttaacactgtttttagtaattcttaaaaaaataatttagatcttaagaaaaatttattttgaatgattaaaaagattaaaaaaaaattaaaactaattaagcaattaaaaaaataatttattttttatttaaaaattcatttagataataaaaataatatattaaaaattcaatttttgtaaaaactaaattttacagcaacaaacctgagtatattttgtttttctcaaaaaatgtagattattttaagcaaagataaaaaaaagtttagtttgctttataacttttttcaaaataatttatatttttattgaatttttaa

SEQ ID NO: 134603 - DNA, 1157 bp, Cannabis sativa
attgtaagcctcactgagaagatgcctgaagttaattgggggaagttacaggaatgaaccttctcatagcaagatagacacctcgcttatcaggtctcaagccaaccaaaatgttatatttagtttgtacgttatttattaagtgtttccgtagtcaatatgtgtcacttttgtctttccagatgtaacgtacttaatgcctcgctatatgccatcaatgacatatggtttctccttaatatactaagcaacagtttgtatatcttttccttcctcgaataaaactttacagtcggtgggttgtgaatatactctgctacttacgcaattaatgagttattccacaaaaagtgacatcatcgatctatattccctttatctgacacgtgtcgtccactgagatggtagccaaattttgggtgtaacaattgccccttaaaaagttcttttttagtaaaaagcgctttttaataattatagagggtatttttgtcataatccctttttgggaaaacgcgtcctttgattctggcagttgtacggtttctagggtcattatgagttgtcttctcatcttctgccccactcccaaccgttagatttcccaacctttagccttcttgtcactggacttcgtgtataaaatggtggcttaagcttgccatattccacacacttcttgttttttggtgagatccattttgagattggatcgttattctctcgtcaagatgtctcatctgagtttagaaatttgttcctctagattcataacacccaaatttgccaactacctctcttttctatacgttcccaggaaattcgaatcataatttgaattggaaatgaaggggattccaaggctgagcagagcgcttccaatcaatccaaaccaagggaaccccgttgattgttgtgggcgatcctcacaagtgattgttgagagtaagtattatttcttgtaaaaggcggtctgaactagactctttttttttttgttgctccactgatcccttgtttttttacttttacagaaagtgacatagatcttgcgagtgattttagaggtcctcctcaggctgacaaggaatcaaagaagaaagttggcatggtttcagatgaatctagggggaaagttggcgtggtttctatcaaag

SEQ ID NO: 134604 - DNA, 780 bp, Cannabis sativa
taatagagagaccccaagtttgcttgcatctttgttatttatgattatggaaaaaatgctcggaacactttttcgagaaattgattagagaaggccccgatcaacaatatgtcaacctgggcgttgggtttagtttcaggccacttagaagttctatttggtccctggaaatagttcaatcttaatcttttctaaaaatggagaatatgcccgaaggacttctcgggatactccttagaattggcctaggttaacaaaatgtcaacatgggcgcttggccttggttctgacacccaagctgtgatatttcttcccctaaaacacttttttctccatttttgatgaagatgaacaagatgcacgaatcgaaattttgatctgatgcttggaagtggcctagattgaaagactgtcaacaagggtgttggggtgcccagacaccaggtgtccaggtgcttaaaaatgaaagttctccgactctgattcggatgcctcacatatttttgtggtatgtctaattcatgtcccaatgcaaagtttgacccattacaccaagaatgacttggaaactgaaaccctagttaaggttgtcaatgtgggctctaggtgaaaccctaggtgcttaagttgacttccaagatgctggttcatgtattttcagctcttggggctcggagttatttgctcccaagtcaactaatatgactcgggactactcaactccgagatgttatcttccttgccatgtgtcaaacattgatgtccacatcaccaggaaaa

SEQ ID NO: 134605 - DNA, 701 bp, Cannabis sativa
gtaaaataattcccaacatcaacaacatttatggatatgatgaatagggtgtttaaggagtacctagacaagtttgttgtcgtgttcatagacgacattctgatctactccaaaactttggaggaacctgaggaacacctgaggttgacattgaactgacttaaggaaacccatctatatgccaaatttaagaaataagagttttggttagagaaggtagttttcctaggccatattagggctgtgcatgggttgggttggccgggttaaaggtatttcaataacccaacccaataacatcgggttggagatttataacccaatcacgtactatattttgtccaacccaacccattttttacttcatgggttgggttgggttgggttgggttgggtcgggttgggtcataacccttatttcataataaaaaaaaaaatcaaatttaaataaaacttcaaacattaacttatttacaaaatattaaggatcaaatattacagtcatccattaaaattatatattgtaaatttaaaatggaccataacaacttcaagtctttatttttgatgaatggtgatgatcccttgaccttacttttatttttctacaattataaaaaaaaaaacaaaattagtcaaattattataaataattaagcataataaagtaaataacatacaaaaatacaaataatatatgt

SEQ ID NO: 134606 - DNA, 528 bp, Cannabis sativa
  modified_base (456)..(461): a, c, t, g, unknown or other
cagagtatatttataacctgctgattgtaaggttaggcaaggaatcaatgtacaaactgccacttagtatattagcgagaaaccatatgcgaaaagtgagacattaaggacagtacacattgaaagacaaaagtgacatatatcaattgcgaaagtccttagagtacaaactaagtgcaattgtcgtttcggctcaaaaccaagtaagcgaggtgcccatctcgctatgggaaggcttcctatagcttcatccagttagcgttagcaagccttacaaccctcacgagccaaaagataacattcaaatgaacctcgaagacgtgcatcgacgacctcggaagaaaaaatagccccagctcgctattgagatcactggaaccaagtttctgtcgagataactccaggaaaaataattaaagatgtgatttaaaacacgattattttgacccagtaaannnnnnaaaatcacaactatatgattttcaaatcataaactacatttagattacgtaatatgtaatcaaatcc

SEQ ID NO: 134607 - DNA, 887 bp, Cannabis sativa
  modified_base (50)..(57): a, c, t, g, unknown or other
  modified_base (296)..(310): a, c, t, g, unknown or other
tcattgttcttcatcaattcgagccttagtgatagagtaccatgcccacnnnnnnnnagtcaagtactcaatcatagtgtagaagacggtagttaaccaactcgaaggaaagaaggagatccagactcagatcttgttattactctgggacaaaaaggaacaagggttagaaatctgagtgaaaggagtcatattattttgctgccatcaatgtaaggttttctaaaatcctatgtgtttaatttcatcgtattagagaattcatacttagggtgttaatgaaacatacatgttannnnnnnnnnnnnnnggtaaaataaattccaacaaatctgtatatttttctggagtgttctaaggcactgagtgccaaatatatttttgtacaaataattatgcaggttatgattttcgaatttattcaaaatacagtcgttatgctatcagattttctagaaaataaaaatggaatatgttcttttgttattcttattattttgcttgcttttggttatatagatgaaagtcatgttgataatgatttgtgcatattattgtttcacgacctagtcttcgtgtcatcataggtagtgttaacgcatattttcgttaactaaaattgagcctcacgatattaatttcacacagaaaaaataaaagctatagaaaaataatatatgaatagaaggttttttacgtggttttgcagtttaaattctgtatagtccacgagtcaatcttattcagatttctgattttattttaggaactttcctgtatgagtttttttgtcccttttttgctcttgtttgtcactatttataattacatagtcgacaattaattacaaagttgaccggaatatgtttacagcaattatccctaaa

SEQ ID NO: 134608 - DNA, 684 bp, Cannabis sativa
tacgggacattaacttttgaagcagataatcacaattaccttccactgtgttgatatatctataattgtgaataactatatgttctagactttacagaatttatatacattaaaccataaacatgaaactatatgtaaaaataaatgacttctaatcttctattgataacaaatcagattacattgaaatgggttttatttagggcataaaatcccaacatctcgctcttggaacaaaaggtttcctaaaataatcaaaacctacgactttcgccaaaatgaagatgaaccttgtgtttaccaacttaaggataatcaagtggtcgtattcctggtcctttattgtgatgacattttgattattggtaacaatactaagaaaatgattgacattaaggaatggcttaacacttagtttgaaatgaaagatttgagtgaagctagtgatgttcttggtattcatcattagaaactggaagaacagatcatttgctctctcgcaagcagcttacattgataaggtgctagagaaattctgaatgactaacattagagggggagttatgtcttctatgcctggtatttgtctattaaggaacagtgtcccactaatccccaagagatagaagacatgaaaaaggttccttatgcttcaacagttggaagtctaatgtatgctatgtt

SEQ ID NO: 134609 - DNA, 552 bp, Cannabis sativa
aaccatattctcaacaaaatgaatatttgataaattagagagctgatttttcttgatttcctctaccctagtcgacctctctctctctctctctccatttttattttctttcatgatcatttttggaagttaaagattattttggtgaggatttgtggggaatttgcttgttgaagcttgtgaactttggtaaccccctttaatctcttttaattatgttattttgaattatatttgaagttttgagcttgtgttttatgcttgatgttcttgagttggttttggaagcatgttaattagaattgaagcgtaaatggggtttttatgttgattaagcttgtaggtttgtgagatatgcatctagaatttttgttagatttttagagtagaacttgtgatttaattttaggtttatacattgatttttctgggcttttgtttgttttaaagctttttgtttgttgttggaggaatttagacaacactaaactaaataatatatcaaaaatataaatagaaaatatgcgagtactcaacctagaatggcaagta

SEQ ID NO: 134610 - DNA, 639 bp, Cannabis sativa
  modified_base (464)..(468): a, c, t, g, unknown or other
cggggaacatgagacaccccttgagaatcaggatgaacagccaaaaaggaggcaacaagaaactaatgaacgagaaatccctcatgaaaatgaggatgatcttggaactcaaccgggagaacggagatcacctgctaggaatcaccaatgttcttcccaaagccatagagcgaggactcgtacgtaccttgatggggaaaatacgagaaactgctctcgggaggaaagaatagagcgtgaagaggcaagtgtgacttgaggcaatccagaacccatagccaatcaactcgaagaggagaaagtattcaacgagctaatgatcggaaagtatgggaacaagtaaattcgtgagccactcaaagacaaagtctatgagtaggatgcgttctatgtgtaagacgagatctgccagcaattactcccaaccagatctgtgagagcacttgaatcggaagaaacctgannnnngccaacagcttggtccaaagcaaaaggatccaatccaattgcggataaacgagttggaggacaagttttggagattcaagtgggggaattagggaaatcatctggatacgactctaacgaggagcttgagccgtatcacccagatattatgaataccccttttcctttggg

SEQ ID NO: 134611 - DNA, 744 bp, Cannabis sativa
attactaaagcggtcattacactgtgattttcctttgtcatggtttatgcgattgcatcgtccgtaatgcttatctgttgaactgcataatgcttgtctctcatcctgcttattctaagcttcatgagattttttgccctaactcgtgaaaatttcaaactttctgagttttgacttttcgttgaatattctcattcttgaatttgttgagtactcctggtcggcatatttgcttgctttaacattcgatattccgaccaaacactcaccttgtgtgttatcttttgtagatgaacccatgtgagttttggggaggcgaacaccaaattgatcaggatctgcttaaactcttgcacgaggatcatcctcctcttcgttgtaatcccacttttacaagtgactatctttcttccttaagtctttcgtccagccaaagaatgatggctcgtaccaaaaagacaatgcgtatggttgacgcatctgaccctcaagtggctcagcacgtcctttttcccgaacaagatccagtcggccaggggggaggatcatgaaggggacgctgaggtccaagagattgaagagcaagacgatgtcccgtcctagcagtagtcccttcgaggaggcagaggaagaggaagaggttgcacccccaaactatggggggtatagtgagcctagggagccagtggatgctgatggcaatgtcctggttgagggcatggactatgtcagtgaggaacttac

SEQ ID NO: 134612 - DNA, 531 bp, Cannabis sativa
  modified_base (185)..(188): a, c, t, g, unknown or other
aacattcaccaatcactcaattacatatttaataaattgcatctcaattcataagcttttccccattctgggtgagaatgtctttccataattgcttaataaagcaatactttcttagaattttaatggtctccttatatatataccacactaattatccagtcaattataaagtactctccatnnnnaccgtatcaccttaagtaattcaagtaatcctctttaccttagtaataccactactcttcctgacattcttttatacattaccttggtaatgtcctcgcttcaagcctctattgggcccttatttcctcagaatgatggctcttatacacgagtgcattgctctagctgcttcccgaactgacgattggccccccatagactaatccaagtgtttccaacgtgctttgctcagactcgcatgcttcattgggaaatttcctaaatgaaatcacccctagtcaaggacactcaaccatggagttccttcatggtgagctaccaaaacaagatgcttcttgctaa

SEQ ID NO: 134613 - DNA, 695 bp, Cannabis sativa
  modified_base (55)..(80): a, c, t, g, unknown or other
atgtaatatacaatttttgataaatccggaacatataggtaccgtttggtaacannnnnnnnnnnnnnnnnnnnnnnnnnaaaataaaagtaaaatttttatttgtaatttttttttcaaaaataaaaatacgttctgtaaccacttttgttttttaattttaaaaacaaaaagtaaaagtgtgttttgtaaagttcatttccatttttattttttgattttatttaagtcgggtataagtctggggtcgaattcgggttcgggtcagaggttgggttcagtgctagggtcgtgggaggggatttgggtccaggtctaaccggagtctaaaatattcattaagaaaaaaaatttaaaaatattgaaagttatttttttttttgtttttaaaattttgattctcaattaaaaatttaaaaagtaaaaacagttttttagaacatttttttgaaaattattttcacttttccaatttaaaaagtgttaccaaacgctatcatagttattcacaattacaatgatgtaatcacagtatagtggaaggtaattgtgattatatgcttcaaagtttatgtcccacgattaatcaatgcactagatttacactgacgtgataatcaatggtaaagtttacttataccttggataagtgttatgtcctttctagggtattggtaaagtatgctagtatcgga

SEQ ID NO: 134614 - DNA, 1506 bp, Cannabis sativa
  modified_base (69)..(81): a, c, t, g, unknown or other
actttatatgtgtttttttcatatcgttttagaagttcatattcaggatgttaataacatacttgttannnnnnnnnnnnnctggtaaaataattccaacatccaatactgtcaaaaccagctgatggagaaccattgcttttgtacctggcattgtcaaataatgcctaagcattgcatttgtgcgagaagaaggaaaggtacaaattccagtatattacgtaagcaaaagactgctaggcacagagtctagatatcctatgatcgagaagctctccactactacaaaactaactttttgcttctgttgtaaaatgacacataaacattttgtgttggttgtctaaaccgacgtaataacggcagacgcaaatagtcaagttatttgcttcatttctaaactgacgcaaactgttttttgcttcagttgagaactgaagcaaaaagtatgatctattaatgccagttcttaaataaagcaagaaacttagcttcaaattgtaactgaggctaattagattattgcgtcggttacaatttgacacataattttacgcaattttttttttactttttgtgttaactataaaatgacgcattactgtaggtaggggaaaattacaaatttgtttgcaattttctccacctgcatttttaaatattagaattggcttgcataacaatatttatatgactaacaataacatttataatatattattataatatttttcatgtaactaagaaaatgatataattataaagtacatctaatataataaaagtaacgatcataaaatttgtatcttacatgtcataataaaaatttgatataactacgaagtatatcaataaaactaagtatcaccaaaagtaacgttcatatagctaaaagttttatatcctacatgtatcataataaaatataaaaagttgtgtactcattctttcaatatataagatttcataaaatcagcccattcatcccgtctatcgtttatctcctgcttgttgtaaggcttatcatctttgaactgtataaccagagatagataatattgaacgtatttgaaataaaaactaattatcaaataaaaatcatatttttttaaacaatctaatcatactttttgttatcccaatttttgcactatgacgtggcatcacatgctggtgacacgtggatctgattgcccacatctacccgagagagagatgcactgagcagggcatagcatacacctgcacgggcagtgtctttccagtcgagcagtggataagccgagcaacgaatcaacacttagccattccagaatttgcatcgtgaagcataagacaatccctataaatctgggatcgtatcacagagatatggcaagctgtccaaatcccacaatctttgtattataaatatgtaatatgtgttcttaccaataatagaaaagggaaaccttccctcaagcatgtagccctataaatagtgatccatttgttgggttttatgcc

SEQ ID NO: 134615 - DNA, 865 bp, Cannabis sativa
ttatttactattttgcttcttttattgttattattttattttattacacaatcttttctttttctttttctttttactcatcaacattagccccttgtttgtgtttaagaaagaaaaaacgcttaatgttttttctttacacagacaatttttttactgttcaaagttgataactcacctctcttttttttactacgtcgagggttggtgttcctcctgtccatggatcatcatgctcttctttcacttccaggcatcacacttatcttttattgctcaaagatgattactcatcaatcttttcactcccatgcatcatactaatctttttactgttctatgtgattactcatctctttaattttttactatgtgcaggcatgggaaggaagctcttccacctataaattaccacatttttctttcatttccatgcatctccttcattcttcccatgcaacctcccttttgcctcttcttttttttttttaatatcaatcctgaggtatgtcttttggaggccacagtttatctcctcactttgcacacaacatgaatcccattactgaactaaaagaactcccttctaatgctcttttgtaccttaacgattttacgaaataaagtatattttatggagaactctctttctaatttagaggatgttaatcgagaacgggctatggagtgtcatggtcactcctaatggaggtaatagaatattcttttttattttgcacactcttacaaaattttacaagattttccaatacatcacttttgagtgtcaagaaaataacccatgtaaatcttgaaaagtcatcaacaattacaaatgcatagtatttaccaccaagactagcaa

SEQ ID NO: 134616 - DNA, 794 bp, Cannabis sativa
  modified_base (369)..(376): a, c, t, g, unknown or other
agttcctggtaaaataacttccaacagtttgctacttccctaacatatctggaccctacaattgagattgggattttattatcctcttgcagcatttctgaaatcagaacccaggcatgtgaatcatcgtagtctttacagtgaactttgattggacgctcatgcttgtacagatacgctggggccataatattgtcgatattgtaagagcagagatatacttgctgatcaagggccctttagtcatcgaaattgtacaggagaggtggctcattgagggaaacaaactcctcagcatagatttgtggtcaaacctcatcctcgcgagcgtattcaacataaacaaacacaatataaagtaagctatannnnnnnntaccaattagacacgttttcttttttttttgtttgtttatgttttcttgaatcacaattgacccatattccctcattgatatcgtttctaatgtattcaacatcgtcttcctcaaggttacgatcaattcccataacttgttcatgaattggttgcccaacaaggaagtcatcataacatagattagcattctcctcatcctcttcattatctaagaccctcctctctggtgtcgataaaacagcaaactatttattattagccggatcagaaatgtaaaaaactggaactgctttgctagccatgatgaatggatcattcttgcttcctctcttacttaaatcaaccaaagtaaaaccaagctcgtcagtttttactccaacgttgttgtcaacccaagaacacttaaaaagtggaa

SEQ ID NO: 134617 - DNA, 1442 bp, Cannabis sativa
ctttacacgccatgcgtgatatttggcacaatctttcttcacatgtccaggttggttacaaaagaaacaacccttagaatcatgttgttgtttcttttatattggaccctcagcagttttattctcaaattttcttttcttgcccttatccttaggggtagtggccaagtgagcactttcagttttgtcattttcaaccttttttccttttgcacacaatgggaaatgagctcattaagagtcaatttctctttttgacaattgtaactaattttaaattggttaaactatagaggaatcgttaacaaaaccatgagcacaaacacatcatcaaaaagctcaatcttaagtgtctttaatcttgagacaatatgatgcatttccataatgtactcccttacatttccttgacctttatacttcatgttcattaaagaactaagaagtattatcatttcaaccttatcgtttttagcaaaacgttcctcgatttgttcaaaaaaattcttgggcataataacccctttggattctgtgccccaaaaggcttctggaatgctatgtttcataatcataagactcatgcaatttcaacgatcccacctctcaaatttcattttatcatcacgggtactttccttagtgacaggtgcaggttgttcacctcttagtgcatggtctaaatccatacaccctagaattataagtaagttctttttccaatccttgaaattggtcccattaagcatatgaatagaattataatattagcatatttgatacagttgaagatgaactagctgaatatagaataaataaaacaaactcacatcaatatgcataatgaaacaataaatttaaaaattggttaatcccatctcaagataccaaacatattaatatcaagtctttagattgtaatattaactgtaagtggtactcatggtgtagcaatcatttattgataataaaattgtggcaaacaatagattaatctttggactaacatattgctcccacaaaatatcttataattatcacgtatttatcaccgtagatttgtttaaaatctgataaaatattcacttatttctaagtcaattaatatatacttccattacaaacacaaaatcttaatatttaaataaattattttacacaatagagtaaaaaaaaaaataatagtatacattttttttttcttttttaaaaaataatattgatatatataaggattatttatagtagggcatacaatttttaccctatgctatagggaaggaaatttagccaatgaataattaaaaacaatgtattgtacaaaaatttatttatgcatttgcaggtgattatttcataatttttttttatgatgatttatttttttgaaaaacttgatgatttttttttattttattcatttttatattggccgctcaagc

SEQ ID NO: 134618 - DNA, 751 bp, Cannabis sativa
  modified_base (648)..(670): a, c, t, g, unknown or other
agcttttagggagtatcgctaaccaatcgcaacgtgacatgtcgagaaggtgctaggcatcactggtgcctcatagcaatgctcataaaattagcatttgacttatttattaattagacttcataaagtctcttaattaacagataaattctaaaacctcttttcttcacaattaaatcattgctaagtgaaaattcataaataatgcatagtctaattttagaagactactacaaaactcacatttagcatcggttttaaaatgatacataaagaatttccttcggttggctaaactgacgctataaccgtagacgcaaatacttagatttttgcttcattcattaaccgacgccagaagttttttatttcagttcataattgaagcaaatagtaatgcactgacgccgaaagtttttgcttccgtaataaattgaagcaaaaaaaataaaaataaaaaatctgaaccaacaccaccaccacacctcatcaaactaccacaacaacccatcaccaacaacaaatattgccaccaaaccccatcggaccaccaccacaacccatagaatcacctaaagtaccacatcgaacctccaccatcccatcagaccaccaccatacccctatactgttggaaattattttacnnnnnnnnnnnnnnnnnnnnnnntatgtttattaacatcctaatatgaattctaaaataatgaaaataaacacatataaagtttagaaaaccttacagtgggtg

SEQ ID NO: 134619 - DNA, 761 bp, Cannabis sativa
attaattgttagagttggtggaattgaaattctagtttgcacaaagaagaaaacagaacatgaggcagtagtattgtgattatcttgtagcgtagttagtagtttttattttctttatcttactcgagggcgagtaataatctagtttgggggaattttgttaggttatatttagcctatgtttcgggtctaatagctaagcattttctcagttattggtgtattttggagcgattttacgcttgattttcctggtttcaggttcccggggcattaaagttcaaattcagtcaattgacgaaaagacgggacaaactggtgaaaaattggccaaagctgctgaaagggagtcagtagtcgcgaccagaaggaagcctagtcacgatccttttatctggtcgcaactagggagatttggcagaaacgccaattttcgagttatgcctgtggtcgcaaccagcccttaaggtggtcgcgaccaggtacgaaaatcgagatttttgacctaattcagatttttttccaattggaggcacacctttcattcctatataaggaacacgactcagaaggccaaaacaagcaagaataggcctgaaaagtgaatgaaagaggagagaaagcaatcttgaagacccggagcaatatcaccatctagtttctttcttttaccctctatttatcttctatgtctagttttgcttcagaattaatcatggatgtttttattattgttatgagctaaatttcccatttaggga

SEQ ID NO: 134620 - DNA, 1203 bp, Cannabis sativa
tccccatcccagtcctgggtctcgattctggttctaatttcaggtttgggttcccaatctaggtttgggacctgggtccaagtctcagtctccaatctcggttcaggtcttgcgtctgggtctgggtccaagttcatgtttgggtccaagttcatgtctggtttttgttcttgtcctgagtcataatgcgagttttgatttgggtccacgtcctggtcctggtctgagtctgggtcctagtcccctggttttattcccatgtcccagtccgcttttggttccacttccagtttcaagtcacgaggtacgggtccaggtttgggtctaggtttggatttgagtccgggtctgggttttagttcgggtatggatcccaaatccaaacatagactacgggtcaggtccaagccctaggtccagatcaggatcccagtctttggtcctagtatagttccacttctggtccaatgtcctggtccgggtcccagttcagggtccagtttcggggtcaagtcctgggtcttggtgctagttctgaagaccgagtccctactccaggtcccccatctaggtctggttcctaagtctcgatccgagtctaggaccccggtcggggtttaagtcctagtctgagttcgggttcgggttttcgatcctggtccaggtccaaatctaggttctagtcacggttcaagtccagatccaggtccgggctgactctcgagttccgatctgggtctgggttctgagacccgggtcttaggttccagtcggggtccatgtttgggtctgggtcctactaccagttctaatttcgattctgtttctgggttcaggttagtgtctgggtctgggtcgaggtctgagtgctggtctgagtcaaaggttgggtctgggtccatgtcttgatccctgtcagggtcttggtttgggttcggccctggtttttgggtctggttttggcttcaggtccaggtcgcggtcttggtttaggtcctaggacataggtcccggtctgggtccaagtctcggtatgggttctggtctgagtttgggtttaggtttgggtcttgctacagtcgcatgtccgagttctagtcccaatcctggtccgatcacggtctgggtatgggtccgagtatgggttcgagtccaggttcgtatctagatccatgtcaaggtccgagtctgggtctaagatcg

SEQ ID NO: 134621 - DNA, 612 bp, Cannabis sativa
tgtttaaaatggcctcgggcgatgagactttctatggtgacattcatcggtcgtatgccctatatccttatggaatttataatatttgttagtatctctttttcttctcgaattcctcatagcctcgggcttgccaaagcatgtgagatgtaaatattctcccaagtttcattaagctcggtataaatagtatacactggcacatattgctaggtttgcctctcgagcttattttcaacaaattcattactttccaggcttcttctttctgaacgaacacctgagccctttcgttgaactcagtgatacttctcactaaacgtccttgtaagtcatcccacaactcaccccctgcggtcaatggatcagtagagattcttgactgaagggctgtaagttgtgtgctatcatccaaatttctaaccctggccgcagccgtgctaaaacgacttaagtaagccttaagtgtctcgcaaggctgctgttttatattggttaacaaggctacttcgggtcgcctatccctagcagcctaaaattactttttgaaatccctggacagctgctcccaggaagttattgaatgataagtaaacttgttaaaccagctac

SEQ ID NO: 134622 - DNA, 1107 bp, Cannabis sativa
gagactaccttcagtaacagctcttttgtactgttcaccttcaaatcaaggcggaagacctcatctttcaactcacagacaactttgtatattgtgtcatttgttgattgcccaactacaccgaattcaaaactttgcactaacacataagtgttagtcaatttcacctgcttagttagcatatctcccaaattaaattctaacgcatcagaaaattaaagtagtaaatgtacttttccactagtgtgaccaccgtggtctcgaatccacttgtacactgattcgcactgttttatgttccaaaaatcaattggagccacaatgcggtccatgtgactagcattccagtcaagatgagtcaaatatacaagctgccacaaaacaaaaatacatacatctataagcactgcagtacacaagcaaataaaattaataccatcacaataaggggaaaattgacatgtaaaaatatggtgcagccaaaaatatatttcgtgttcttagtcttgtaccgctgtagagagttcattagatatcaaaagctagcagtcacccaattcttcttcttaattgaccttgtatcaattaaagagtgcatgtagctagtgctgaccttggtattattcttgggcagcaagactgttccaatacaaacaagcaaaaatttaatgagaaacaggtaatttctctcgctgctttccttcagctccttctccagcagagtgagggaaaacctatagtctttggccttcaaaattttgtcaaactcaaggaggtcacggtcactttctgttaccacaggttctcccccatccctgattctcatgacatcctcaaagagcttcgatgatagttgaatcgttcttccaaatatccccagccgggaagtggttggatccacgtgatcgataagccaactaactatcttagcatcaatgtacgggtcatcctcccttaagaatgtcgagaaattggtatttctaatcgtttcttttttagcatcgttgagaagtgggactattctacccaaacgttcgaaggagcaacgaccagatacttgaacatcccctaccccttcattgttttttagagattttattacaatag

SEQ ID NO: 134623 - DNA, 1036 bp, Cannabis sativa
  modified_base (368)..(395): a, c, t, g, unknown or other
taatatatttaattaaataaatttcatattgatttacagatatattattaattaattttatttatttgatggaaaaaaattaattatataccttaggagaatttggtaaagaagctaattccataaatccatttgatccccatgcatgtctatattcacattcatcgccttttgtacaatgtccaaccgcccaaaatttacaaataatattgatcgaataattggtagtacaagaataacacattgccatatctgtaattttatggtacatatatgtgattagttctttgtatataatatcaaatattaataaattatagtaaaaaaaataaattctaattatatagttaattattattattattatnnnnnnnnnnnnnnnnnnnnnnnnnnnnattattattattattatgaataaggtatatgcatgttttcatgattttcatgtgtatgtgtgtgaaaatgtcctttaattgttaaaataaataacacatatcaatccatataaaaattcaagaatcacatacaattaatctcataaatgctattggttttaatataatataattcacagaactaattataataaaaccaaataattcacattacataacattaattaagatgtaatatacaataaaattttatcgttatacttaagacctaaatttaatcaatcaatcaataaaaattttatgagaataatcaaattgttgtaagtttcaaatcaattttaatattcatatccgattgtacaaacaattaaaagaaatgaagccctaattaaaaatatgaaaacaattaagctcacgtactatatatataaattattatttcatatgaaaaaaagatgatatataatttatattcattagaaaccaaaccctaattaaattaagttgaagagagaatataattaattacgtactttgttgtgtgattattatatgaactccaagagatattgaaaaacgtaatttaatttgatgaacaaaggggaaaatgtgtattaattagagagtttattagctgcaga

SEQ ID NO: 134624 - DNA, 689 bp, Cannabis sativa
  modified_base (232)..(232): a, c, t, g, unknown or other
ggcgtaccaaatgagccctaatttcattattttacccttctcgggtcaaaattactaaattacccctggcttaccaacgagatcttaatatagcataaatcatataaattctcatatactaaattatataataatataatttctcaatgatacataattatctaattagggttttgctaatccatttacataattttagggtattacaattgtgttgtcaacacagtggaangtaatcaagattgtgtgattaatagtattcctatgatttatcagtacacatagtttaactgataggataatctacaatatagttttctttcaccttggataagtgctatgtcctttccagggcattggttaaagcaagcttggtttggatgtgtggattatacatcggaatggaccgatattgaacttgggtaagatataataaacttaccgtaatttttattcaattcaatgtcacctagttgatcttcaaatgatctcaatcctgagatggttaggttctagatcagttgtattatttatattattcaatttgtttgttatagttgactaatagatcttctcgtgacatacagattaaggacatggtagttcaattgagtggagcgttaatcataaatacataatatatagcttctatatgtacatagaagtgaaatgatgatttccttcgagct

SEQ ID NO: 134625 - DNA, 1360 bp, Cannabis sativa
  modified_base (68)..(69): a, c, t, g, unknown or other
tattaaaatgggttttatttaaggcataaaatcccaacagctttgtgtttatgggaacactggtgttnnatgggacactgtaagccaaatggttcaaagaacatatgtcgatatgagatagcggattgggatgacttcaagtcttaagagtaagacttcgtgttatcaagtttgtcgaaatttagtgagtcatcagaggatgcggggttggttttgggagatggacttgtgaaacagtgttagagagctgacacaagcaggagccagaggacaaattcgtggttttgggtgattgttagatcattgaccatgcgaaagaagctcagaggagcacgcatgcaaggggtcagaagggtcttttgcatgaagccgtgagtgtacggtagggctggatggctaatataatgagtactttgtgaagagattgtgtgcaagagttcacttggtgctgcattgggtgcagctggcttgcgagcctcgtctaggtgggacgcatcaaattttatcctacaataagagtgtcttgctcgattgccatcaggagaatggtgtgccatggagttggcatgtgaagtttccagagggacttggcttcagtggaagcatgttctgtaggtgcccttgagtacggttggtttgcgaatctcaccccgatgggtgcaccatacttattccttatcaaaaggagtatgtattggtcaattagcgagtgagctactatcaaaggatgtgttagctttaaagtaagtgttgcaagagctacttggttgactggaggtacattgtgaaggactcgaaggagttcatgttgggggaagtattctagtgtagaggcactactccatgggtgattctgaatagtgatagtggcacagtttctttgatcaagtccaagagtgggggagggagatcgtcaccaagatggtggttctatggagatggaaggaaaagtgcagacttaggattaggatgaagcttggactaagcttaggagtcgagattaggtagattttcttgcggttcgttgatgagggcatcaacatgttgaagtggggtaacgtgcgtgctaagatggcacgttacaagctaggtgatgcccacaagttggccaagtggtggcacatgttgaggtgcatgctggtggcatgcttatgcttagtttgtacgatactggaattttcgtaaatatcttcaatattattcggattgggacaagacttagtattcgccatttatttggttctatgaatacaatggcacaatcagttttaagaaactctatgatttggtatatggtttgaccatatgtctacagagaaaaaatcatctatgttcttggtagaaggctaaaaacttagaa

SEQ ID NO: 134626 - DNA, 1355 bp, Cannabis sativa
aataccaggagccagggtaactcagttggatctagtggtggtcagggagttcagattcccctaaatattcgtggccaaggtagatgtcctagaggcaaggcacgcggtcggggtgatgttaacccatcacaggctgcccaagattgggaaaataggtttgcagaaatgcaagccaggagtaatgaacaaaatgaagagatccgacacttgagatagcagggtgctcctgcaatccctgttccagaaataacggtagctcttgcccctgttgtgcaggcaggactagtcgttgcagtgaatcgaatgaaaccactgtatgagaggttctggaagcaggcacctccagttttcctaggaggtcccgatgttatgaaagctgaatagtgactaacagtgattaccagaattctgaactttatgggcgtcaccgacaatgatagagtggcacatgccacattccaattccaagaagacgctctagtgtggtgggacatggtatccctgactcatgatgttacaacaattacctaggaaaagttccaggaactgttcaatgcaaaatattacaacaaggcaatcaaaagtgcaaaaaggaaaaaattcactcagctaactcataaagaaaatatgagtgttactgaatacacaacacagtttgaccgtttggcaagattggcctcgggaatcgtgccaactgattttggtaagaaagaaaagtacatggatgggctgaactcgaaaataagacatgacttaatgatcactactgatgataatacaacctatgctaatatggtggctaaggcactgcgagctgagggcgcagtggagtgtaccctagagtctcaaggtactcaggttgttggtggggttcctacccctcatacattaggctttagtaggggaggtagtggttcgaccactgaccagaaaagaaagccacctattgcatccagtggttcaggtcacaacaagaggtttcgagggaaccagggtcgaggcaatcatcagggtggctccgaaacccgatacacttacctagaatgccctagttgtaaaaacatcacctgggagagtgtagagggcaggggtgctttcagtgtggtatgccatggcattataaaagggattgcccccaacttaagaaggaagaacagaagaccgtagcgaaaccttctctagcaagggtgtttgcgttaactcaggctgatgcagaagccagcccctcagtggtaacatgtcaactctcgatcaataactcttacttctctgtgttatttaactctgggaccactcactcttatgtggcaactagaatttttagtaaattgggtagacaacacgatagttatgaa

SEQ ID NO: 134627 - DNA, 714 bp, Cannabis sativa
gaaccgtcgaaggataaaaaaaagcagaagaagcatgataagtatgtgccagtgtatactatttacatcgagcttaatgaaactcgggagaatatttacctctcacatgtgcaaaaggttacctttggcaagcccaagctcatgaggaattcgaggagcaaaagagatcctaacaagtattgcaaattccacaaggatggtggcatacgaccgacgaatgtcaccaattgaaagatgagatagagagtctcatcgctcaaggccattttaaacagtacgtgaaaagatagggccatggatacaaccaccccagtttgtctaataacccaaacaacttggggttaaaacctcttccggttgaaggagaggacatcctagttatttttggagtgccacatatggcaaaggaaagaaataacacccagaaaagatatgtgaaagagataaagaatgcgtagtcggcctttgccccagaaccttccaacaaggtgaaaaccgaggaacctcccattgtattcacagaggaagacgagaaaagtgtgaggtatcctcacgtcgatccattggtgattaccattcaactcgcaagtaaaaggatcaagagtgtattaatagacaatgggagctcggtaaatatcctttataaggagactctacgaaaaatggcgctcgaaaaagccaaattgaggacttgtatggtgaacctttgcgagt

SEQ ID NO: 134628 - DNA, 1513 bp, Cannabis sativa
taacacaatctttcaagccctccaatacatcatttaaatctgaaaacttcttatccaaatacaaaaccaaaccctcttcaattttagaatcaatgtgagccttcattttactctcaaaatgaacaaacttatcatcaatatccttcctcagctccttcaaagaactcccaatctcagattgcttattgataatacgcatcacataatgtttaacatcatcaaacataggacccccaacagtaactttttccttaacacctgaagactcacccttgtctaactgcctcttaggtactttcacactctcaaaatcatcatcagacaatgaaaaataagaaaaattaaatccagtaagatcaaatttctcattctcctcagcagaaggaaacacaggagtaactgaaagctgaaatacaaacaaaacataactcaaaaaacagataatgaaaaaaaacacacaaaaaaaaacaacataataaaaaaaagcaaccataccttagatgacaagtagattttcctctctacctcacttgaagtaacttctttcgcactggaccacatacacaccctatatgttgaagaagggtcaaaagtacaaatgttttgacttctaaaaagaggaataacctcatacaaccaaacttggaagatgaaaggaaacccagccaatttgtaagttttacaatttgaatcatccccttcttatcaattccttttgccttagcaagagctttcaatttagcacccttcttacctttcaaaccaagcctcaaatagtacaatgtagtatcataaacaaccttgccccatgggaaactatcaaactcacccgaacctaccaaatgtaacaactcaatactaacatgtttatctggaggtttgcttaacaagtagttagtaaccaaatacaacactgccatcctaactgcaaagtcatcatctttaaaagtactactcagaaaacgctgcttaacggctccatgagtcaccgtcatatcactaaagtacttatctacaaacacgtctcccttcccaacatacttcatcatatcaatatcacccttacacaacagaccactaataacagcaaactcccctaaaccaaaacgaaccctatcatgaccaaaatcaaaccacatctctttcgaatttggttgatggacttccctattcaatgcagtgtgaaaaatctgatgctgcaacttataagactgaatatccaataaatgcccaaaacaagttgcaacaaacatagcacgctgcttctcagtcaattttgctctaatatctactaaaacatcatcattatgagcccagaatatgattttaccacaaaatctttcctctggcttcaagtaaaattcccacaactgcaacataaacgtgtaccataaaaccattaaaaatcacaaaataagtaacacaatagacacttacaccgcataaaacacatgaacagtttaaaagataatgtcataatgaactcttttgttacaacttaactagttgagac

SEQ ID NO: 134629 - DNA, 720 bp, Cannabis sativa
ctcatttgatttgatggtgcaacaaattgatcccaaacttgtataacatttatattatattcttttgttagtgtgtcttggtgtagttttgatgtaatttctaatccttattatgctattattaaaatcaagtgtaggactttggtcatgttttgatactatttgaatgcatgtgataaaagtttaattttatagctattggccctagtaaagttctctgtatttgatttgtttcttctacaaaccaaggccaggtaatatttttacctacttcccattgctctctgattagatccatgcatggattcgttgtttgcaaggctaggaacctccttttgcttcaagatggagtctaaactaatgaagacttagtattttgctaaataaaaaagtttgtactgttaaatgtttatattagagtctcgacgtataaatgtcaatttaattagttttagccttaaaaggagaaaaaattcttaaagaaatttggtttatgggccttgcggtgacccgcccctaatgcggcgggattccccgtctaaatggggaacggggcgggaacgggaatcaaattttgtctctgaatgttaaacgagacgcgaactcgtttaggtggcgtttggtaacacttttttaatctgttttttgtttttaaaattagaaaagtgaaaatattttttaaaaacatgttctattaaactgtttttgcttttcaatttt

SEQ ID NO: 134630 - DNA, 1834 bp, Cannabis sativa
  modified_base (614)..(616): a, c, t, g, unknown or other
agtcgacagactcagtaagaaaagcataaataataacatagcaatcacccgaattataattaggagcccatacccccaatcataatcctatccccgtgcccaacacggtgctgagtctgaaacgttcgtatgatagtactattaaatataatatcagcctatactcggtacgttagtcgtactctagtcgtactgatgtgatactgccaagtagtacagtactatcgaccataaaatcagcctatacttggtacgctagtcatactctaggcgtaccgatgtgatattatcgaatagtacttaagccaacatacatttctaatgtaatctaacaggtttaactgacatgcacgctaaacatgtaaatacatatgcataccattatactaatcttacctggtttccgaatttaggtgtgccgaccaacctgagtggaacaactgctcgacgaattataggcccctaaatcatattattcgtaaaactggtgagtgacacgctaaatcactttccatggacttaaacttgaaactaaatgtttctctattaataaataacatggaaataccctaaatatcataaaaagggaaaaactagggttcccaaaactgccnnnaccggtagaccggttccccaaccagaattttgattctacaaggtttcttagggaccaactggaattacagttcctacaagtcccacagaaccgatcaaccagttcaggcatgaaaacttcaaaattatactactcactcaattcaaccccaaactctaccaaactttccaaacctgttatatataccataataataccaagcaactttacaaagaaaatgtgctaggatatttaccttagattaattcacaagaaatttgctaaacttccagaattaggctgaagaatcacaagccctagttggcttccatggagctcgagagagagaaatcgactagaaagaaagagaagttattctcttgaattttttctatttttgaataatgaataaatctattttattctttcatttatctaaagtcttattcagattagtaaagcttaactatagctcacaaaaagacaaaaactaattggtcaaaaagaccaatttgccccccagtaaaaccaaaaagcatctaagccacctaggggtattttggtcaattctaaaatcacaatttttcccgacactcccaatgtctaactatattgtctcactatactaaaaatacaaaaaaaaaaaatgtgattctaatggccaaacgttgcgttccgatgttgtcgggcacaaaacatgcaaaaatataaaatttcatatatgacatatataatgcattctaaattcaaataaatctccgtaaaatgataattcataactattatgtaagtttcataattaaaccttatttgtctgctaatttctaaattaaagttaagcggtctttacaattatcccccctttaaaaagattttattctcgaaatctaacctgcacaagtctggatactgagccctcatgtcagattctaacttccaggtggcttcctccaccttgctatttctccatagtaccttgaccaaagctatggtcttgttccgaaggactttatcttttttgtctaagatctgaactggtttctcttcgtaagataagtctggttctagctcaagattctcataatttagtacatgagcaggatttgaaatgtactttcataacattgaaacatgaaacacattgtgaactgtagatagagctgaaggcaaagctaaacgatttgccactagtccaaccttttcgagagtctcgaaaggtcctgtaaacctagggcataa

SEQ ID NO: 134631 - DNA, 621 bp, Cannabis sativa
aagaaaaaaaaaagtacaattaattgaatgtgtcgtcttctttctttaggctagtgaaaacttagtgtttttaggcatttcatcaaacacataacatatgtgtttttatatatgtgcacatatatacacacacaaaaaaaagatgcaaactctcatataataatatatttacagaacaaagtttgcaactgaaatgacatcaaaatcaataatctattttgaaaaaaaaaatgtaacttacaaatgaatagaaatggacaacaaacttattctaatcaactttgaagttcaccatcactaaaaatcaaattttttcattcaactgcagcaggacaacaacataaatagtgaaggcatttacaaaataacatataaacaacttataaacaacgccaacacaactctatatcaacactatcattaaaaatttatagataaattgactaaatcataaaaccaaaatgaacaaaaaattatgccagaactacgaaaagctcaacttaaaaaagaagaaaaaatacagttgaataggtcttctttctttaggctagtgaaaactcaattcttttgggcatttcatcaaacacatagcatgtgtatctttatacacatttaaatata

SEQ ID NO: 134632 - DNA, 1346 bp, Cannabis sativa
caccaggaacccagcgcatggggtgtttggagataattgggaaggacagtatctaatcgcggaaaaaataggtgatgctacataccgactcgtagcactcgatggtactgcgattccccgagcttggtatggcgaaagcctaaaattatattatcagtagtactcgaattattaaattatgtctgctttgtacttatacttagtcattttttataaataaaaaaatcctaagtataggggagtataccataatgtactattgattatataaaggaaatgcctcatatttgttaattcttcaattttaagcaagcgattgtcaagtcttgtgagattttctacttattacaccaggctataattaaaaccgaatatatattaaaacgcgagtacccgtgtactgcgaaaatgttaaacattgattatccccgcgaggatatgaatttatccaaaataaattgcaaatttgtctaagtacagagtgcgagtacccctgtaccgcataaaaaaaaactagcaaatttaaaagaaatatagttcaaacatagaaaaaatcaagcgttgggagcagcaggaacagagtcatccgcgactttactggccacctcgttctcaacctcctccgcctccgcaacttcagtctcctcgagaaggatccctctaccgccttcggttggtgtgggtgacctagcgcgaaaagcctcggccatttttgcagcttccgctccaagaatcgacaagtcgaagtctggaactttggaaagagtagtatagatgtagtccgagaccgcctggtcgtactgtttcttgccgttctccgtctcagtttccaggtcgcgagacatctcttcaatcttcgccttggcttcaagctcgacctgctccttggccttgcgaagtccctctaattctttggccttggaagacgcatcttgcttcagcttcttaacgtcttcttgaagctgagcaatatgcttcttcgcgatttcaaattatctgggccctacagcaaaagccttcggaaatgtagccatgaactgcgaagctaactccggagtgcgaggaagcagctcctctgaagatgacttgtcaatcttcgacaaaaactcatcgctgacaaacctctcctgaaggtacagcacatgacgagctcgagccgctggatcgatcacgaccttcttccctttctcttgaacacccttagcaggcctcttggaggaatctgcgataggagtgaccaccacatcacttttcctcttctgggacgtaataggagaagtcactgctgtcccgggttttagtttgcggttgagcataggagcggactttaggaaagtcatttctgc

SEQ ID NO: 134633 - DNA, 850 bp, Cannabis sativa
  modified_base (222)..(222): a, c, t, g, unknown or other
ttccaatgaatgttgtcgggcataacataaaacaaacatatgcaaaaatatgaaattccatatatgacatgtataatgcattttgaatttaaaaaaatcttcgtaaaataataattcataactaatatgcaagtttcataattaaaccttatttatttaataatttctaaatcaaagttaaccgatctttacagagtgggtcggtgcttctcgcttcagganacgcgaccaacgcggagctacctcaatcgtctccttgatttttgtagatagttgaagtctgatttttatgataatatcctactatttttgtgggttgacaactttctttgagccttccatgggatttgaacatttgaaagagttattgacgacaagggtatcttatgggtgtgacatggtcgtcgaccacctttggggataaagcccatacttggggtcaatacccccgagacccaaattgaggggggcgacaatcgtcatcgtggggtgatcccccgaaacccaatttgaggggggtgacaatcatcacctcggggtgaccccccgagaccccttgttcgttgtcagtagtgatagtgtaatgtggatgtctccatatacctttgagaatgtcattgtgtctatggtaaaatgcatgacctgtaccatgagggtgtagggggtagtggtatacccctagactaaccttttaggggggataagggtgtacccctaggttaacccccttggggttaagggggtacccctagactaaaccccatatagttcattgtagttgaggtaggggtagtagtatataccccccagactagtttgactatcataggtgtgtggtgatcgttcattc

SEQ ID NO: 134634 - DNA, 1371 bp, Cannabis sativa
ataggccacaaggtactttgcctagtgatactgaaaatccaagaagagatggaaaagagcattgcaaggcggtaatcttgaggagtggtaaagttctggagtcaaacgaggaagaagctaaggataaaaatgagcccacttcaatccaaagtcgagtagagaaaaatgttgaaccttctaatatggcaaaggagcaacctgaagaaaatgctgcagcaattcctcatcaaaatgcagcagaaaagttacttagcaagccacccccaccatttcctcaaagatttaaaaagcagcaagaagatggtcaattccgaagatttcttgatgttctaaagcagctccacatcaacataccattagtggaagctttggagcaaatgcccaactatgtaaagtttttgaaggacattttgacaaagaaaaggaggctaggtgagtttgaaacagtggctttgacggaagggtgtagcgccatgttgaagagcaaaattcctcctaagttgaaagatcccggaagttttacaatcccatgtaccattggcggaagagatgtgggtagagccttatgtgacttgggagctagtattaatttaatgcccatgtctattttcaagaagttgggaattggagaagcaaggccaaccaccgtcactttgcaattggccgatcgttccatggtccatccggaaggaaaaattgaagatgtcttggtgcaagttgataagtttatttttccggccgatttcatcattcttgattatgaagcggatagagaagttcctattattttgggaaggccattccttgctaccgggaggaccttgattgatgtgcaaaaaggggaacttactatgcgggtgaatgatcaacaagtgacttttaatgtgttcaatgccatgaggtttccggatgagattgaggaatgctctcgcataagtgtgattgattctattgttgctgaaaaatttcacaaggaagcttcgaaagaggaaaagatgataagttctcttgaagagcttgaagctttaagtgaagatgaagaaaccaaagttacttgggtagagtcaaagcagcctttcactaagtttaggaggccatttgaatctttggagttgtcagagaacaatttcaagcctcctaagccttccattcaagaaccacccgagttggagttgaagccgttgcctagtcacttgaagtatgtttatttgggagatggagagaccttgccggtaattatttctgctatgttgggtgcccaaagagaatgcttgttagttgatgtcttgaagaaatacaaaagagccattggttggaccatggcggacatcaagggtataagtccttcgatttgcatgcataagattctgt

SEQ ID NO: 134635 - DNA, 527 bp, Cannabis sativa
aacaacaataccaacctgaacagtaacattgagaagctcaacaaactgttcactctcaaagatcttggggctttgcatttcttcctcggcatagaagtttccagagatgcaacaggtctttacctcactcaaacaaagtacattgaggatctactggaaaagaacagaatgcagcatctaaaaccttgtcccacacctatagcaactggcaaatctctttctctcacagatggcaagctgatggaaaatccaactaactatcgaagtctcattggtgcattgcagtacttgaaccacaccagacccgatatcagctatgttgtgaattcactaagtcaattcctcaaggctcctacagtttcacactggaatgctgccaagagaatcttgagatatctcaaaggaaccagcactcaaggcctgcatctcagctgttgtgacaagctaaatctaatgggtttttctgatgctgattgggccaataatctcgatgatagaaggtcagttggtggatattgtgtttatct

SEQ ID NO: 134636 - DNA, 846 bp, Cannabis sativa
aagagttatgactcaagcacacggttaagatttcaatccattgcacaagtaaacaacaatagttcaatcaattttccagctcagatatcaacatatgacactaacaataacaaaaactaactaaagacaacgaaaaactgaacaaacaaaaagaactaaaaaaatttaaatctctccccccaaactaaagatgcacattgtctccaatgtgttaaaataaacttgtggttgaaagagacttacttgagccccatcagaaggggtttggtggaggtggctggtcataaggattgaagcggggtggcattggaaagtagttgggctcttccacaccgacattcattcttgtgattagcgtgttcaattgttgcacctgatgcttgtcaaaaatactcctttgggccatgtaattttgaatgtgcatgttctgctgaataagataattcagctgatcatgcgtgtactgtatgactgggtcgagaggcccagcaaaatgtggtggtacagtttctgcatgctcttctcgttcttccgcaggaggatctctctgagctggcggttgaccatgggggtgcggtggtttaaatcgaatcactgtggccatggagatactgcgttgtggcactgcctttgtatcatagaagtattgtggtactccatgtgcctcacacagggtagtgataatgtcaactagcccgagtccacccccacaagatccctgaatcatcatatcaaaacttactctaattatgtcccccacattcaggttgtaacccttcatgatggcataaacaaatttaagcctgtctatctgagcatcaaaatagtgtttgtttggtaccaacc

SEQ ID NO: 134637 - DNA, 635 bp, Cannabis sativa
aattatatagatatataaatagattgatagtttttatttttaagttcatatatattagttcaattatttaaaattattagtgttaatattttattatattttctgtaataatacctttaataagtttaaagttaaattaattttcaacgtttcaaatgtatatatatataatacttgattttttaattttttaatataagttataagtttaattgttaataaaatatataagggtgtacgtagtaaaaaaagatatgagtttggaaaaagaaaagtgcttcaaattatatttgtgtgcatattttgaatgatgaaaattattgttgtcattattaattattattaatattaatgaagtataattgattctaaaagtatatatataaataaaatataatgatgtgataagttacacaagagttagtaaaaatttaagtttttaagaactattatctatattgattttgtaaaaatttaagaaaataaagaataattaaagaatgctacggatacaattcaagagaaataaataaaaattgaaaaagtgtataaaataaattagaaataagagaaaatgaataataatagagaacaaaagaagattaggatgtcacttaaaatattttatgctttcc

SEQ ID NO: 134638 - DNA, 873 bp, Cannabis sativa
ttaacaaggagaaagaacattggaggaatgttttagtaagaataattgccattgtcaaaaatctagcaaaaaataatttggcatttcggggaagtaatgaaaagatttaccaagagaacaatggaaattttttgagtttaattgaaatgattgctgaatttgatccaataatgcaagaacatgttcggacgtatttcaaaattagtgatattcgtaatcattatttgggacatagaattcaaaatgagttgatacaattgttagcaagtgaagtgaaaaatacaattttgaaaaaaatcaaagaagcaaaatatttttcagttatacttgattgtactcctgatttaagtcatcaagaacaaatgtctcttatactaagatttgtagatacttcagttagtcccataagagtggaagaatattttttgggatttttgaaagtagatgatacttcaggaaaaggtctatttaccgaacttataagagaaattgaaagtttgaaacttgacattaatgacataagagggcaaggatatgataatgggtccaacatgaaaggaaaacaccaaggtgtacaaaaaagattattagagataaatcctagagcattatatacaccttgtggttgtcatagtcttaatttagtgatttgtgatgttgctaattcttgtgttaaagctgtaacattttttggtattttacaacgtacatgttcattattctcttcttcacctaagagatggacaatactgaaaaataatatatctacgttaactgtgaaatcattgtctcaaacccgttggaaaagttgtattgaaagtgttaaggcaattagatttcaagctccaaaaataagagatgctttgcttgaac

SEQ ID NO: 134639 - DNA, 752 bp, Cannabis sativa
  modified_base (681)..(704): a, c, t, g, unknown or other
atccacgtataacttccaagtttccgcatctcgctgaataggtggaatttcttctggatttataccttctgtcaagaactcagccaaagcttggcctttgatggaagttcgaggatgatatgttaggtcgaacatccccagttcaatcgaccattttgtcaatcttctagaagcatctagtttcgttaaaacttgtctcccgggctgatcggttaacacttttatggggtgcgcatggaagtatggtcaaagcttacgaaacgcatggactaggcacaacgcaagtttgtctatagggggttatctagattctgcccctagtaaccttttacttacatagtaaatgggttgctgatgcttgccctcttctcgcactatagctgcactaatcgcatcttccgagatggctaaatagagaaacgacctccttccaattattggttttgccaaaattggaggcattactaaatgcatttttatgttctggaaggcctctttacactcttttgtccactcgaactttttgttccctcgcaataaattaaaaaacaatacacacgtatcagttgacttcgaaatgaatctgttaagtacagccattccttgatggcatatctattaataccttgattttttcaggatttcgaaacaacttagtgttagagtagtgtccacacacannnnnnnnnnnnnnnnnnnnnnnnaggaagatcgtgaagaaagacatagaacaagaaggagtttcagcacta

SEQ ID NO: 134640 - DNA, 690 bp, Cannabis sativa
aatatttacaaatttaatgcaataaatataaaaaaaaattgaaacacataaactaaaaaaatataaaaattacaccaaaataataattttttttaaaaataaagtggttaataaaaaaatatgctcaattagaaatcaagtagacaacaatattaaacatttatatatataatttaaacataattaactcaaaatatatctatcaaaaattatacttaagataataatcaattaaaatataaaataaaaattaatttgatatttgtttattataataccattcaaaaactataaagtacctaaaaataaaccaaaaacaacattaaaaattaaaatatataatatgaaaactaaacatatatatatatacatatgtatttatttttttttcttctcttagttaaacatttaataacaataaataattagctagcagtaaacaaataactatataaaaaaacttaaatatatatacaaaaattgacttttaactttatttggcaacaaaaatataactacacaacaatactaattaacaaaaaaaaatatgcaaatcaattggacatgaacaaaatactgtcgacaaccttaaaaaaacataaacacaacacacacaaccttaatacatgtttaaacatctaattaacaaccaacaaacaactgtataacaacacaaaaacaatcttaata

SEQ ID NO: 134641 - DNA, 683 bp, Cannabis sativa
gaacgagtattcgatctttgccccaaaaccttccaagaaggtgaaaaccgaggaacctcccattacattcctggaggaagatgagaaaaacatgagatatcctcacgtcgatccattggtaataaccatttagctcaccaacaaaaggatcaagagagtgttaatagacaatgggagctcggtaaatatcctttataaggagactctaaagaaaatgggactcgaaaaagccaaataaaggccttgtatgatgaacctttgcggattcattagagacagcatcactagccttggcaaaattcagctcgcattaactttaggcaaggcacctttatatgctactgttatgccagacttcttggttgtcaacctgccctcggcttacaacatattgttaagtcatccaacactgatcagactaggggtagtcagttcgatcaagcttctatccttgaaattccaaacaccaaatggcatgtgagtagtgcgtggcgaccagatgctggctcgcgattgctatcgcatagagctgcagcatataaaagctggtcatccgttcatggcgatcatggcagaaaaaacagaacaaaaagatgaagatcttgacccccgagttcaagatgagagaaaccccttgaaactaattgaggaattggaataggttattctcgacccaggaaatc

SEQ ID NO: 134642 - DNA, 1410 bp, Cannabis sativa
  modified_base (482)..(484): a, c, t, g, unknown or other
  modified_base (1031)..(1032): a, c, t, g, unknown or other
aaaaaaaaacaaactaatttctccacagcattaacagcagatgcaatagttgcatcaacatcaattttctcctcctgaacttgatgttgttcagactgacaacaaaaacaacattaagaaaatattaaaacaacaagataaaaacaacacagaaaggtgggacaaaaaaatatacctgtttaacctctgcaagaggttccatagggtcagtcttcttggcatcatcaattttggcatctttagaagaagaatcccccttgccagtatcatcatcctttgaaacaacttcggcaacaataacaccctcatcattacgatcatctccagtaggagcctcatcctgcccaacagcaactccaaattcatcaagatcattgttgacctcgcttttagccaacgatagtgagtataatttagtaaacgacaagtagtttataacgattgaaatataataaagcaatataaagacacaagaattttannnaggttcagccccgagcagttcagtaatagcctaattctcgttatttgttaatagcctaatcctcgttatttgtattaactcaagaacaaggagaaagattccttttcttatagctcttacaacaatatctctaaatatgaactcttaagacaatatctctcaagtaaaatctttcgatcctttgcccagtaaatgtgcatcactatttatagggctacgagctcggaaaggaagtatttcccttctcgttacaattgatataagcagaaagattgcatagtaaatacagaatacactgattgtgagatttggacagcttgccatatctctgtaatctgatccccaaattatagggattttcttgatgactcacgatgcgaaagttgaatgcgctaagtgttggtcgctctgtgcggattgcagattgctttgcctcgagcatgcacatgatgtatcctgttcagactatatcttgcgggcagatactcagaatcaattccatgtgtcaccattgtgtgatgccacatcagagtgcaaaaattgggannacatttgccccccaagtttgtatgggacttccaaagttgtgtgtagacttcatcagagctgtctttgcgtttgaatgggtgacacgtgtcaggcgcatctgttcgcgactcgatgtgaggctgactgggcctttggttttcgactaataaatgctctgacataattaatattttgaaatccgattttctctcaccacggttgacgactacacttgattgcttttgatttcccatattcgcatttggggggaaccgagtcgtctgaggttctttatgaaatgattaccccttttcgttgtttgcctataaataccagtgagcatttgtccacaaactcattttcaccaaccttccttgctaagtaagttcagagcgaaa

SEQ ID NO: 134643 - DNA, 596 bp, Cannabis sativa
agatcaaaagtaaaacagtaaagagagatgagaaaaacaaacacaggagttatagaggttcgccctaaatccaggggtacgtcctcttttgagctcgccttgaagaacgatctcagatctgcacattaatggtgaatcttacatcaggtgagaaatccaagtcacaactcgactggtatttctgatatttctctcgattatttctgttctgtgtttttctttgattctcagtaacactctctttcttttctttgcatgtacaactaaaacaacaactttgagaactcctctctcaatcctgggtcttctgctttctggtatttctcaactcgagagattggtaagcctttgctccctcttttatagctttaggtttagtgtaaagtgtgtaacagaatttctgttgcaaaacagaaattcaattacactaggttgttgattgttgttttgtctggtgagtgagtaaagtcacgagccttttatttgtatttttatcttctttgtaaaattgtaaaacaagtggtccaggggagatctaatttaacaatttccaccttagatttctcctgggacacttgttcttatagtgcatcatt

SEQ ID NO: 134644 - DNA, 1003 bp, Cannabis sativa
  modified_base (68)..(68): a, c, t, g, unknown or other
aattgtaattggatatctaactttttgtaattagattggattgaatcagttcggttcaattggattgnattggattggatgatgcccactcctaattaaaatggtgtgagctaaaagcatcaactgcaaatgttgttttaccaaaaaagaaaaaaaaaaatgcaaatgttgaggcctcatcttatttaccgtccattgccaccgtcaccaagtgatttttccgtccaatcaccacaaaatctaggaaacaataattaaacaataaaattagtatcaatttattttttaaaatatatacttattaaaaaaataataaatttatataaaaaactctaaaaaattaaaaaatatatatattatcatacaattttttatataaataaataattaggtaatttttttttaatatacattataatgaaaaaaattaaaaactaaatattttcttacacaaaatagagatctaaaacagaaataagttaataaatttatagaaaattcattatataattataaaaaaactatcattatcgtatctcatttgtagttactattgtatttaaagttaatgtcatcaccgtatcttacttgtaatcatcattaatattctttctaataagtttactttgtacataaaataaattaaagaatgatcagtaattacttttattatgtgagggaagagagtgtggtaaacataataagtttagaattttaatatttttggcatattagttaataatttttttttgataaattatattagttaatattaactattatctctctctggaaaaaaagttatatgtagattaatttttttaatacatatatatttatttcttagttattatatacaaatatatagttatttttactattttttaattgattggtgatctttaattaaataaagtaaaataaaaaaaattagaaaaatgagagaattaaggagaaaatttaaagtagaacaaaaaaattagaaaaatgagagaattaagaa

SEQ ID NO: 134645 - DNA, 1024 bp, Cannabis sativa
acaaccacaacaatggcagaacacaaataatgtacaccacacactttctccctcagagtatgtacacaaaaagaagtgaagaaatagaaaatgggagttttgcctaatctgaaatgaaaatggaaaatgaagagttttgccctaatgtaaaagaaagaagaagaagaagtttgaagaagaagagggtgatgagtgaagaaggaagaagaagagaggaggacggttggggttgatatgactgatggtggtcatgtcagtttttacattttaaaatgtattaattttttattacaaaaagtgaaccggttaccaatatatttcatcctaaatacccctatattaaccccagccctcagattaaataactaatccatctaacggtcagggtgcattaacggaataaatacccttaaatacattaacaggacaaaatcgtgtccgctctatattcattatacataaattttatgcgaatggtgtacataaatcacatagtattagtaaaaacagtttcgatctttattaatgaaataagagaggtttatatacacactcgtgtattacaagactaaatagaagaataacataatcagttagtaaactaactgtaactgacaagagaaacaaacaaaactaacagtctaacaaatcagctgtgtctaagactccccctcaagatggagtgtatagattagtgacactcatcttggacaacaatgtgtgaaactgattgggtaaaagagcccttgtcataatatttgagtgttgtgtcaagaaggaacgtaagatagtttgattcgatttttgttgacttgttcacgaacaaatgtggcagtcaatgtcaacatgttttgtacgttcatggaagataacattttcagatatgttgatggagcttgattgtcacaataaagaactattggttgagtttgggagatgcctaaatcagataagatgttgtggagccaaagtatttcacaggtggtgttggcaatggaccggtagcctctgcagaggactttga

SEQ ID NO: 134646 - DNA, 522 bp, Cannabis sativa
gacagtatttttgtaaaaaaatttcgtgtgatagtaaaattataaatttttgcccacaccgaatcccattttttttttaacaaaaaggctctaaatttgatttttcaaaaatactatattttgtatttttactatttttttaaaaaatatacctaatttattttttaaaatattacattcgatattttattaaaaaaagatttaattataaatttaaaatactatattttagatttttaccattatctatacacaaaattttaaaaatttcattataaaaaaaaacctaattagattttttggtccaaggttcccaattggcttgagacgggcttagagattgtcactgtgtacacgtgatactaaaacctcaaagtcaatgaaaacatgtcacgcatacatgagtgtatataatgacaatccaattggcatttaacattaaaatttaaatggcgtctcaaatttacaaacaaaagtaaaattaaaaggtattgttacaaagctaatcaaaaaaaaaaaaag

SEQ ID NO: 134647 - DNA, 569 bp, Cannabis sativa
ttttgttttagaatttatttctttttatccaacaatagtcaaaaataataacaattatatatcaaatcgaaatagtataatatattttgttattataataatgaaagggagattcacgttaattacaattaatatatcaaattaaagtagtataatatatattttgttattattataataaatgggagattcacgtggtgcaagtagttcttttaaaattattattataataagtagtaaattattaatgatttttttttttgaataaaagtagtaaccttttattaagaataacaatcattcaaaacaactgaacgcactttagaagaacaatcctcaaactgaagtgcacgacctgaagagaaacaagagctcctggcaagacagtgagctgctttgtttgcagatcgtttaaacaaaacaaatttccacaaaattcaaaagacaataacaattgaacgcacatcaaattacaagtaaaccgaattgagacaacataggaatgttgctctttatagcttgaacacacaataaactatcagattccagaacaacattttgccaatgat

SEQ ID NO: 134648 - DNA, 3975 bp, Cannabis sativa
aatcactgaaatagtaaaattgaatgaaattagacaaaagttcttaaaatctaataattttaatagttcaagagaaatttttaacgacaaaaaaagttcgattttgtagatgttaaagttgagaagcaaaaatcctaattaaaaaaaaaaaaaagtcctcctaagatagtagctaggagacttggagagttcgaactacaaaaaaacgttttgctactacaactgattattgaatgccatactctgctcctgagttccattctatccgtaaagtgtttcacaccctaaaatactcatcttcgcttttgggcagctagctagctagctgcaacaataccaaactccaattccaacccccaacctcaacctatgttggattcatttcgaaactcttccaagcttcccaagaaggtatctaaattctcttattttttttttctcgggtttcctttatacttatacatagatatgcatatctatctattgtacatgtatcgcttttcatagaattgggcaaacgaatgcttcgtttccaaaattgtttaaaccttccgtttggttgccgaggaaattagagctactggaaagaaagtgaatttgcgggctcttctttttttgtcgttattattttttcaagtaatccaattcaactttgttaaaaagaaaaaacaagtaatccatccaattcaaatatattgcttaagcttcacagttgtgccatatgagccaaatgatttcttacttaaatatttgcgtctttatatcaaaacaaaattatgacaaattcactcttaccattcaaaacagcaacaaaatcaagaaaaagaatggttagggtcgagtttcaaggcagagaacttcattccaggtcttgttattggtttcatatgcggtttgctttttgatttatcaaaggccggtggaaaccagacaaatacaacgagaaaatggtcgtcaagcaagctccaaacccaagatttggtcttaaatagtggtgatcaagaacttaaaatggtcggcccctgaattgcttctgttcttattctatttggtgtgttatattatattattatggtaccctgacccttatattttgtttccggcttaaaatggtagacttgtgtagagtttcatgtgttcttatttaaggatatcataccatattacccaatttctctcaaaagtttaaggtgttagaaagtatctttataacatagtaacaaggatgcatgtgaattcaaagaatacttgacttaatttgcggcaacatgctatctttagagctaaaaggaaacataatgttgttttatcatgtaaaaaagaaccaggggatgtctcaagcttccagggtaactttctgttgaactctataaattctggggaacatagtttgttagccagtagctatttaagtttctttgtcctcctttttaaaattttatttggtctatttattaaatggaattctctgtttatgctctgagtgttaacgccttggttgctcatggtaggttctgatagttagacaagatctgaagatgaaatcaggaaagattgcatctcaatgtgctcgtaagatatttattagtttctgctttgtgacatatctttccgtttgtactgtttcagcacctgcccttttgctttcgttgaatttgtattcatcatttactttgctgatctgtgatcatttgcctaattatttatttcacaaaaatgcagatgctgccactggcatgtatgcagaacttatgcaaaggtgattgttactatgttcttgttatattaccttgccttgcctctataccccaactcaccttttctctttctgtcttaattctcaagcgccttttttttttccctttctttcaacatttttggaaggagaaacagatatgtaattacctgtctgctaatagttgattagtcaggtttttcttctacattgtttctacttttaacctaaggttgatctgaaaccttacgactctagttttctttctctgttcttaaaacttcgacaacactcatctagtgagtgttctgaacttaaggcttaaaatgatacacataattgcatctacagaacatttattattgaatctttctacttcgtataaatgatatttcatgattgttcctttttgtgcatattgcagccgccgatcccttttgaaacaatgggagcaatgtgggcagccaaaaatagttctcacctgcaagaaccaacaagaaatgttagttctcccttgaaatgtattaactccttttccgctagttatgtgagctaatttttctttttttcaggaataaactgaaggaagaagctgacagcattggccttcctacttttgttgttgctgatgctgggcgaacacaggtatatatatttgttactgattcaaataggatagctcagatattcaaaggtcatctaaggaattgaagtgcaaataggccgtggtagtattagtatttcttataataaaaaaacatttctttttcgaaataaaaaaggtctggttttgtcatttttaatagagaaaagaaaactatcttgaggtgaaaatggtttgtcaaataaatctgaatggtataatgtccacttggagacatactcctgctgctttattatccttcttctggatttggggttgggatggaatctgatttcctctcccattagttgaggtttattatagaactttttactggccttgttatgctaaactttacactttttatcatctttaggttcaaagtaatgcatatttagtttgtacatatagttcattgcctgtgccatatgagaacattttgagctcttttaggacaagaaatggactctatgatttaggtgtttttttaatgctcgagatggctgtatatattacatgatatggtacattttgggttcgaattaggtgtattcattcttacctgaacaagatactaccattcttctgataaaaaaaagatgttaccttagtcggtctaaaattttggccaatttcttgtcattaaatttcttactttttacccaggtttcatcaggttcaagaactgttctggccattggacccggtatgtacttttctgctttcttctctcttaacacagaaatattggatgcttttataccaagtttgctatgcttcattaatcccttgccccttgtattagtgaatataatggaacctaaaaatatctctgcctatgttgtgtataaacacatctctgttactgagcaggaccgaaagtcattatagattcggtgtcgggaaaacaaaatctactttgaacttataaggaggaggtctagtttaactggcttacaacaatttaagttcaagtatggttctatcacaatgagaacaatttcttatctcttaagggatttgcagccaaaactgcaagatgtctacaaatcaggtttcgttttaatttgtttttatttttaacagtcactatattccttgagtagaaagctcccatgttagcttggctggagtaagagaagatatgtgtaggttgagattttcattgtattaaattattgtatgcagtgtagatgtttcttaatgatgaaaaagaactcaattgtatcttaaactgaaactattaactagaggttggattgtgacaatggaattccataatttttatttcaatgatgaatttaaaccattttaaagagtacaaaaacacaatgacctgatcatctacaagcacattcaattgccaaagactcaatatagaaataacacgtcttttgctgtttttagctcatagcttgtaacgcccgtattttatatttactaaactcaaaagataactttaatattttatagcttaataaccataagggttgggatcccgagtatcaaaatacaatttaaaagtattttgctaatatgtacatataatatttttttaaaaaaactcgctagtatgcaacttcaaaatacagactcc

SEQ ID NO: 134649 - DNA, 980 bp, Cannabis sativa
  modified_base (31)..(52): a, c, t, g, unknown or other
ctctctctctatctatctatctctctctctnnnnnnnnnnnnnnnnnnnnnnctctctctctctctctttgaattctcttcaagaaaaatccaagaaaattcttcaagttctcctctataacccaatgccccacaagtcaccatttccgaagatttttttgctccttttgacgatccaatcttctcgcgagcatccacagtggacttcattaatgggtaaatctttaaatctcatcttctcatgtcgaggaccaaacaaacgtgctgtagggcactcccttgcgaccctcacatcgctcagttgatgatgagagggagggtcggtattgttaggaggctaaacaatctcaacatgataacctaggggccgaccaggttgaaaaacctgtggccaagcagcccatggctagccaagaagaagaggcttcgactgggatatatagtgcatctgaaggcaaataggttgtacttgttgggaggcagtacaagacttacaccatgattttaggaaaccatttgggttcttatgatgaggatgggcggtctttgaatgctctaggtcacccgtttgaggtcaagatagaccacatcttagaggaggctcctaagccatagattcttgagtgagaggatcaacaaagatggatatcccctccatcatctctgtcgaccagaaaacttgatgagatctagaggggaggactcgtggaaggagtccattgtgctaggcctaccagagataagttggtgcattgcttggcattcaactagatggcatggtcgaatcctcacttggagcaagggggaatactacccttgcattcttacattagcgacatcgctaacgttttcgcgctatatcctactcagatcaccctaaaaggtattgttgctccagaattcgcccctgatacgtggaccagtcgagaggggacacgtggatcagataactggtaaacatttgctaagtctttgtgcgc

SEQ ID NO: 134650 - DNA, 846 bp, Cannabis sativa
acccgaaactagaaactgaaaaagaactgaaagaccaggacccggacccaaacctagaacaaaactcagacctagccccagacccaaaacgagaccataactcgggcccaaacacattcgtgtacccagaacgggaccgagaccttgacccgaacccagaccaggtcctaaacgtgagacccgatcccaaacccagactcggacctagatagggatctcgacacgaacttggactcaaacccaaacaagccctagaccgagattgaaactcgagaccttgattttgaccgagaccctgacccagacaaagacctggacccgcacccaggacccgaacttggacctaacctgaacccagacccagaccgggatctagaactgcaccaaaacccagacctagactcggaccaggattcataccccaacccagacccagaccgaaatcttaacctagacactaaatcgaaattgaaactgggagaaggacccacacctgaatggacccagatcaggacgtaggacctggacctacatttgggacctagacttgggcctcgaaacctagacccagatcagaactcgggactcggacccgagcctggaccgagaataaaacctagatctggatacatactgacatcaaaacccaaacccaaacacggaccaggacttgaaccccgactgggtcccgaactcggacttggatgggggacctccacccgtgacatgggcataaaaattgggacagagacccgacctcagattcggaccctaacctaggacccggacaaggacctgggacccaaagtcgaactagactgggaccctgacctcatggcttggaac

SEQ ID NO: 134651 - DNA, 774 bp, Cannabis sativa
acattgaactaagaaagaagcagcttggagtgagcgactctccactttgcatcacaagaattgaacagcatgcaatgcaactaaatccacaacaattcactgacactggaacagtaacacaaaacaccgatgttcaacaactggttttacaaattacaaaccagccatcatttcaagacatagaatatgaagatgaggcatccgaaacaaataaccagttcctatcaatgtcaaacatatttcaggtagctgacaatgttgctgattttataattgagaaaacagaagaacacaagaagaaaaggaatgaagaagagaaggagattataacagatcatagggttttcaaaattgaagaaggacaaatttacaaagataaaaagatgctgaaatgtgcactatgcttttatgctatattgcacaactttcaatttaaaacaaagagatcggaaccaagggagtacctggttacatgtattgatgataactgtaactggttacttagagcatcaaaattcaagaatacaacaacattcaaagtgaggaagtatgtccaggatcacaaatgctcattggatgtaatcatgggagaccacagacaagcaaatagcaatatcattggagaaatagtaaaaaaaaaattcctagatatcaaaagaatacatagaccaaaagacattgtaatggacacactatatgattatggggtgtcaatgggatatcaaaaggcatggagagcaagagaaaaagcattagaattggcaagagggagac

SEQ ID NO: 134652 - DNA, 789 bp, Cannabis sativa
actgccagaatttagaggtaaacttcatatttctatccgaaactatagtctttggtacaccatgtaatcttactatctctttgacgtacaaatctgcattctgatccactgtaattgttattttaactggtagaaaatgtgcagacttcgtgaatcgatctaccacaacccaaattgaatcaaataaactcgtggttcttggtaatccaaccacaaaatccatggtgatatcctcccacttccactcaagaagtgtcaaaggctgcaacaaacctgctggtctctggtgtttagccttaatctgttgacaggttaagcattgagatacaaattctaccacattcttcttcatcctgctccaccagaagtagggtttaagatcttggttcatcttggtggtgccaggatgcaaggagtatggagtggtatgagcctcttcaaaaatcacgtttctaagttccaacctatttggaacacaaaccctggtcttaaacaacaacattccactatctgacactgtaaaatctctagcttgaccagttgaaacctcttccttgatcttcactaattctggatcagttaactgagcagctttaattcgttctaacagatcagattgcagcgtcaagttatgaagtttgcctacaaccaactcaatgcttaatatgaccatgtcctatgctagctgaggtgaaatctgaatcatactagttacctgcccgggacccctccttctcagggcatcaaccactacattggccttcccaggatggtaaaggatttcacaat

SEQ ID NO: 134653 - DNA, 825 bp, Cannabis sativa
gtttggaattagaggccggtgcattatatatgtaattactaacttggccggtatattataaatgtaattagggtttatccgacccagtgtatcaccttggggagctccagttctgtttgtgaaaaagaaagatagttcccttagaatgtgtattgattatggggaattaaataagttgacgattaagaacaagtacccgttgcctagaactgatgatttgtttgatcaacttcagggaaagactatgatttcaaagattgatcagtgatccggttatcagatcagcttagaattcaggaagaagatataccaaagacttcatttcgaaccagatatgggcactctgagtttatggtagtgtcattcagattgacaaatgctccagcgtcctttatggatatcatgagcagagtattcaagaattttctcgataactgcgttatagaatttatcgatgacatcctcatatactcttagttagaagaggagcatgagcatcatctccgaatggtactacagcgactcaaggatcataagttgtatgcaaaattcaaaaagtataaatcctggttgtcagaggtgtcttttctagggcatattgtcggtaaagatggaattatggttgacccgagaaagattgaatcaatgaaaaactagtcgaggccgaaattcgtgatgaaagtgcgaagttttctcagtttagcagggtaatgtcgacgtttcttcaaaagattttctaagatttctacgccactaaccgagttaactaagaagaatcaacaatttatatggtcagacaaatgtgaagcaagttttcaggagttg

SEQ ID NO: 134654 - DNA, 726 bp, Cannabis sativa
  modified_base (559)..(590): a, c, t, g, unknown or other
atagtcgaaaccacggctcaggtttatccccaactccttgatttcaaaagcggtggagagttacggcgttgagattgtgattgggaaggtagaacgagttgagttggaggaggaaggaggacaagttaactcagtggttcttaaaggtggaagtgtgattgagtcgaacgccgtcgttttggcactcaggccatggagtgggaagtttgagcttctgtcttgtttgtgtagggtttttggtttatggggagcacaatcgaatttttgggggtggtattggtagaagaagaagaagaagaagaagaagaagaagaatagttgtcaagggttacagaagaaaagaaaaagaatatattttttttattttttaaattatttttctttttaaataagaaattatttttaaaatttaattaattttccaatatttaaaataattaaattatgtgtgttgacctcgcttttagtcaacgacaacgagtatgatttagtaagcgataagtgatttataacaatcgatatataataaagcaatttaaagacacaagaattttatagnnnnnnnnnnnnnnnnnnnnnnnnnnnnnnnnaatcctcattatttgtattgacttaaaaacaaggagcaatgttccttttcttatagctcttacaacagtatctctgaatatgtattcttagataatttctttagggtatagtctcgactaaactgtttgcgacctt

SEQ ID NO: 134655 - DNA, 759 bp, Cannabis sativa
cgtatgaaagaaaagtaactgttggaacacttagcgtataatgtacattatagaaactaagcataacagttgaatgtacattaggtgctcatgtcattgctggaaggcatatgctagtccaaattggtattaaccatctacaagttaggcgaattgtccaaatcagcattaatcatcttttgaggataaggatgacaagcggttgagcagttatcatgtattaaccatgtttcattaaaatggctatgtattttaaacatatatgtaaataactgcaaacttatattcctataaataggggcagatcccacaaaaaaaaggaacgaaaaatcttagagaaaagtacagaaacataattaattgtatgtattaaatactcagaaatatctggaataagatagaatcatgaagtatgcaaatttaactacaaaactacgtaaaaatatcttgtgttattattatactttttatattttgttaattttttataatttctgtgttgaatttattacgaaaaagttttattattgtttaacaaaaatttgcgttaataatgtaaatgtcacatttctcaccatataagtaatgccgccaaatctttagcacaaaaactactgctgtgagcactagatcgtgagtacagtacctctgctcatactcttttaactgccaaaaagcataagctattacttttccagtttacataagtacatagcctagaccttgtctcgaggtatcacaataaatgacaaacttttc

SEQ ID NO: 134656 - DNA, 662 bp, Cannabis sativa
tataataagaaagcccaaagtgaatattagaaggccaagcccaatatgagaagggcaaccaaagtcatgacaaacaacttcaccatctctctacgtttctctttctttctttcttctgtcactaactcatcagcgccggcctaacctctgtaacttactcatcggagaggaggaattccattgcaggggcagatgaacaattacttcactcaaaggtacgccatttattttatctgtgttttgttctgaaaaatagtttataagttttgaaatatgctaatatactgacttgaatccaaattgaattctcttcttgaaacatagaaacgattgaaactttatctggctgcttgattttcctaagccattctctctattctacattggcattctagctcttattacagggatatgatttttttccccttctttgtttatcacgttccgagattttgttctcaattttcttccatttgaagcgaaagaaacttttatatttgtttgattttggttcgatgggattgcacacacctacagaagagaaatttctgcttcttttatgcgaagcacatattcacatggtatttgttacttgtttgcttccttaatcactctagacatgataggctaatagttcgtaaatggatatcattgtggggatt

SEQ ID NO: 134657 - DNA, 815 bp, Cannabis sativa
  modified_base (766)..(780): a, c, t, g, unknown or other
aagctcctcctccttagcttccttctcctccttcacctgatgaagaactgctcaaagagaagtcctctcatcgtgaagactgttcacttcagcatacaagctggtgtcgatggtctcttcaagacggtgagaaacctcgagatccttagtttcttgttggcttcacccaactccaaccgaacagctccgagttccgcgctggtgtctttagcatccttcctggccaagtccacctccaccctcatggtgttggacaaagccgtgctcttcgaagaagcagacttagcccgggagtaggtgtaggccagcttcagaccggtctgcacaaagaaaaaacttgagtatttgagccaagtaaagagacttaaagaagaatatcaaggaagacttaccctggtgaattcctttaaaactccgcccactagcagctctaaagaagagtcattgtcagcaccagccagctgctcgctgaccccaggaaccagccggttcatgtagtgggcaagcatctctttgcccttcttggcctttggaagcatcgacaaaggtggagtaggtgcccgcacttgttcgtgttcacttttgacaagctgagacccacccttcggtggttcagacctgtccaagcttcctccccgagactccttggacttagcagcttttggggtagaggggtttgcagcagttagctgctcgaaaagatcaatgacctccctaacaggcttcttttccttagaagaggaccctgttggaaatattttaccannnnnnnnnnnnnnnaccaagtatgttttattaacatcctgatatgaatt

SEQ ID NO: 134658 - DNA, 837 bp, Cannabis sativa
  modified_base (26)..(32): a, c, t, g, unknown or other
  modified_base (806)..(812): a, c, t, g, unknown or other
ctcaaaatcgcaaatggaactagaannnnnnnaggactaggaccaggaccaggaacgaaacctaaattggaacctagatcaaaacctagacagagacctcaaccagaaccgagactcggactcgaacatgaacttagaccgggaccataacccacactataaccgggacctagaccaagaatcgggataggcacctaggaaacagaactaggacttggacctagtacccaacccagatcttaacttgaacctaggacccagctcgtgacccgacacaagaaatcgaacaagactgggacccgagattgggatctggatctggacccagggcttggacaaaactcgtagtcggtgtttgggtttgggaccagccctagacccaaacccttacaaggccctgaacccacacccagacctgaaccagtactaaacccaaaagtggacccgaacccgtaccatgtgacccaacatgggaaccaaaactagaagttgatcaggactggaactacgacttggacttggaatcataattgaaattggacctagatccagaaccgtaaccagacaaggaccaggactccaaataagacttagacgcgaattgggagccgcacccagatcccaacccaatcctggactcgcgacccgaacccgaacctgaactcaaacccaaacatggaacaagactagggacactgaaccagggtcgggaccttgaaccacacatcagtctcgatcccgaacctaaactcagaaatgggatatgggaccaaaacaagaaccagacagagacccgtgacagtgannnnnnncttgactcgggattcgggtaacggg

SEQ ID NO: 134659 - DNA, 952 bp, Cannabis sativa
  modified_base (895)..(916): a, c, t, g, unknown or other
ccaatataaagcagcagcctgacgaaacacttatggcatacttaagtcattttagcacggctgctgctacggttaaaaacttggatgacaccacgcaacttacagctcttcaggtgggaatctccactgatcagaaggtatccttcggtaaacccgaccctatgaggaattcgaggagcaatagagatcctaacaaacattgtaaattttataaagatattgggcatacgaccgacgaatgtcgccaattgaaagatgagatagagagtcctatcgcttgaggccattttaagcagtatgtgggaagatagggccagggatagaaccagccccgtcatcttgataacccaaataaccacgggttataacctattcctgtggaaggagaggacatcttggtcatttcgggagggccgcatattacagggaaaagcaataacgctcagaagagatacatgaagagataaagaacgagcagtctatctttgccccaaaaccttccaacaaggtgaaaaccgaggaaccccccattacgttcacggaggaagacgagaagatcgtgagataccctcacgttgatccgctggtcataaccatttaactcgccaataagaggatcaagagagtgttaataggtaatgggagctcagtgaatatcatttataaggagactctaaagaaaatggtactcgaaaaggctatgttaaggccttgtatggtaaatctttgaagattcatcggggatagcatcactagccttggcataatcgagctcgcagtaactataggcgaggcaccttttacttttattattatgcaagacttcttggtggtcgacctgccttcggcttacaacatgttggaaatattaaaataaaaaataaatttcatatannnnnnnnnnnnnnnnnnnnnntaattcaattttaattaggttagactaatataatta

SEQ ID NO: 134660 - DNA, 817 bp, Cannabis sativa
aaaaaaaaaaaaaaaccgttttgaagtataaaaattaaaaaacccataattattatgtgttagttttgaatttgaaattgagtgtggtaaaactttaaaggaagcttggtgagatgaacatattatgtggtaaaatattaagatgctatactattggagagaaaaaaaatgtcgttctagaaatttgcatggatgttatgttgtagtattgatattatttatttattttttaataaaaattaaaactaaaaagttattgtagctaaaaattagaatatatattaaataataatatatgagatcatatttatagtatttttttaagagtgctatacattgatgtttttagaagtaagaaaaaggttaaaaatgatatgaaaaaaaaaataaaataaaatattatatttttaaataatgtgtaaatttctagtatctaccatgagatgctgttattgagtcatcatgatgtatgacctattaagaaatcatatatattgcgttcctacgtaggaattaagatgttgatatgactaagtgcttatgatatatcgtgtctgaaacatatcacaccacaaaaacacaaatggtcatataatttctataacatatatttgtggacctaccacaaaacactataataaataataaagttattggcatattattattattttttttattggtttttttttttatggaacaggggacagattatttaaagatcttaattttgaaggaatgttactataatataaggaatcatttatgatattataatgtaattattttataagacatattttaaagaataaaattg

SEQ ID NO: 134661 - DNA, 871 bp, Cannabis sativa
caatcataatggccccatgtacttaaaaattttaaattgatgtcctaaacctcttaatttgattttttgaggacatcacaatccttcaaattttacttttattttagcatttacttttctccttatttccttcagtttatcaagatttttaaaatcaaattaaacaagtataaactaaaaagaaaagataaattttttatgtaattgagacaataacgagtcttagtttacgactcactgttattaagctccataactatggaatttacactgtatatctagttctttgaacataaaaattcaccattcgttggtaaatggctccggtatttttcactccggatagcatgatcttgtaccagtagattcctttgtcagtttggaaactggtgtactcctgatcaatcacatgcatttttatttggttgtagctagagtatgcatctatgaaggttaagagttaatattccgaggtagcatcaaccattttatcaatgcgtagaagtgaaaaacagtctttcgaacaagatttgtttagatctatgaaatctatacacattccccatgtcccattaggctttaggaccagaattggattgacaacccatatgggatacagagcttcactgaggatgtcaatgtttgtcaacttgtttacctctatttttactacttctaacctcgttgaatccagaagtctccgcttttgttggactggttccgcattgagatctacgtttagtgcatggcaaataatatgggaactaatgccggtcatatcagaaggagtccaggctaacacgtcactattttccttgatagtggaaataattttttccttcactgccggaggcaagttcttccctacttg

SEQ ID NO: 134662 - DNA, 714 bp, Cannabis sativa
gcggttttttcagttttcgattttttcggtgtcagttttttcggtgttcggacggtcggtttggtcggtttcttggattttttgctcacccctaattattataaacatctatttcgctttgcctttttcccttggaatatccttccctttgatctttgccttaacacttgcattatcctttgatttcttcccctttttcaacacttcatcatcagttatataaccaccaatttgtttcctcctaacatgaataaacaaactcacagcaagatcatctctatatactgctaccaaatcagacatcttagttggaatgtcatcaattttttcacgaatgaaaaattcagcaaatttgatgacaaacactccacagtcactgcaataaaacaaaaaaaaatgaattcaaataaaaaaaccagtttctgtgcaaacaaaacaaaacctgacaaaaaatataaacagaacaaaacataaaactagtttcaattaaaaaaaatatatgatgaaaagaggaagatttacctattgacctaacttggaagcctatctataaacttgaaattcaaaggttctcttttcccaacagaatatgaaccttgaaccaaaataagatccggcctagaagaataaacatcaagatactccaaataaaatggcagcatagtagaataagctttcacatgatccaaggcgcgtttcttgttgagagcacca

SEQ ID NO: 134663 - DNA, 552 bp, Cannabis sativa
agttttctcaggaagcgtgcgagtgaggacaaagcacgctagaaacactcatgttggtctgtagggtcagtcagcaatccagttggcagccagagtgacgtactcgtgtataagagccatacattctgtgggtgtaaggacccaatggagatttaaagcggggacgttacactaagtgcttgtaattattttaaaaaaatatataaatacattttttttgaaagagtgaataatattaaaaaaaaataaagtgatgtaaagatacttattatatttacatttatatatatatatataaaatagtgtgagaaaaaaaaataaaacattaggtgactaaaaaaaatcaaagtcagctgattatatctatatctataacatatctttatatattaaaagtggctatctaataacaatttttggtttaacagtatattctctttttattctattaaatttaactgcaatttaactctaacattagttttataaaatatacattaaacccctaaaatataaattaaattcttcaaaaccctaactctttcaagccat

SEQ ID NO: 134664 - DNA, 725 bp, Cannabis sativa
gctcttccgatctttaaacaacatacttgtgagtagatctaagagcttggtaaaataaaattccaacacgggcatcttctcttttttggccttggacatggccaagttgtagtagtgacggcagactgctggtctcccctcacacatgccactccatgccttgttggaaatttgaggcataggtggtacatagatgtcactgccttcaggttattgagggccagttggcctatcatggcgttgaaagccgagggcacatcgatcacgacgaactgtgccattagtgttctggtggttggattttctccaactatgaggggtaatcggatatacccaataggtgcgatgccttagccaaagaagccattcatcacttggttacaaggtgtcaggtcggtgagttagagccccatcttttcatatgttgatttgaaaagaatgttggaggagtttccatcgtccaccttacatcttgctacggtcatgttcccgattcatacagtgttgaccagaggtcattgtgtagaaaactgacctgagtagcatcttctttgatgaaggagactgtgggctctacaggcttttgccacttagagatctggtcttcgacaactaggatatcgcttttgggctcgtgatgaagtgttcgagcatagcgttgcatagcttttctggtcttgcctacaatatggggtccaccaatgatgacccctagatgtcctgcc

SEQ ID NO: 134665 - DNA, 501 bp, Cannabis sativa
ttgagttttaactggtctgctgctacaaacatgaaaaatggagattatgtgacatatttatcctccatttacaataaagttgaaatggaacaactcctttgtacaatgtgggcgatatggactgagcgaaacaatgtcatccatgggaagaatgcacggcgtgcgaagaacttggctgtctttgccacggcttttcttcaaaactttagagcagcccaacacaatgctgctgctgttagttcaggctctgcaacagccacaccagcaacctctcaccagcagcaatctcacactcggccacctgcttctattccctggcgtccaccagcggcttgcgcatttaaactcaacacagatgctgctgttgacgtttcttcacacattacaggtataggtgtaatcctaagagacgcaaatggacatgttaaagctgccctctcaatgcctatggttggaaatctaaaatctcatgaaatggaggccaaagctctcttctatggt

SEQ ID NO: 134666 - DNA, 1612 bp, Cannabis sativa
ggtgaatgaaagttcctagtccccgaggctgttcagataacaagtgaggcagtagataaaattagaccaggaatgcttgcgggtcaaagcagacaggagagttatgttgatccaaagtgataggagattgatttttagattagagatatggtatttctccgggtatcacctatgaaaggcatcaaacgctttggtaagaaggttcattggagcttttgaaatccttgagaggatagggcaagtagtgtacagattggctaagccgccaacgctggcaactgtacatgatgtgtttcatgtttcgatgctttggaagtatgtctcagattcatcccatatcttgagttatgaagcattggaactatagtaagatttatcatatgaggaacaatcggtgcaagtacttgatagaagagagaaagtcttgagaaacaagaaaattgcactggtgaaggtattatgggagaaaagtaaagtggaagaggcaacctgggaactcgagatggatatgcagcaaaatatccagagttgttcaggtaaattttgggacaaaatttctataaggagggggtagttgtaataccctaagattaagaaaattgattaccgaaccctagctagttaaatgtgtattattgtgaaattgtattatataatttattataggtaaattaatttgatatatgatatgttaagaccccattggtgagccaggggcgtttcagtaattattatatattcacaaccaggtattttgggctgaatcgagttcggggaaaaaacacaattttgtgattatttgttggaattttattaatatgtgattaatttgaaaattatttgaatatgtgacatgtaatggaaatgacttaaatgcccttaaatgcttaattgtgttttatatggccctaggggcaatttagtctttttgactattttgtctattttgtgacaagtgaatgttgattaatgaaaagcattttgtgcattttgctttacccaaaccgacccccctctctctctaaactcatttactctaatctttgaatttgtggagaattgcttggattcaagcttactttatgggaatcattgaagcttgagttgttgaggattcggaggtagttttcttactgtcttaatttgaattggttgctgaaattgaagctgatttaagcatgattttattgtagagatccttgtgatgcaagtgttttggagttagtttaattttgatactctatgcttgataatgttaaagattgatgtaggatgctttgtgttgtgattttgagataattttttaggttaagtttgtgcgttaattctcttatacagctctgattttattgttgagcttgagcttgtgtttttggtttatagattaaaggtttgagcttgaatttgttgatattttacacaagtttggagcctatattgtatattgtttaaatctgatttcgatgcatgtgagctttaattttgagcgttaatgcacttttggtgctgctagaatggagtttttgggttttcaacccaggcgtcgcggcccactcgcgtggacagattgcatgttgaacttgttttgttcataacttttgactcgggactc

SEQ ID NO: 134667 - DNA, 629 bp, Cannabis sativa
  modified_base (62)..(65): a, c, t, g, unknown or other
  modified_base (99)..(99): a, c, t, g, unknown or other
ttgatattttttggttttttaattttttttttctagcgtaactctatttagttataacctcnnnnttagaatataatttacttagtcccaagtgtattnttggatagaggttctactgtaacttcaaaataatgaataaaaataatcacattattttgtaagtggtgatgtgagtttaatattttagttttgttgagaaaactaaaaatatcaaatggtatttttaaagtgactttaaagagtcatttcaagagaaatacatacaaaaaatgtgaaaatgcgttgagatattgttgattaatttatttgattttaaatttaaattctaaatcaagtttggctatgtgcatatgtgaaatgttgacatatttggtgtcaaattttggtgaagataatttcaagaaggaaattaaatttaagagaagttatagggacaaagcggtcttctataaattaaaatcaaagcattatcttgatagtgaaatgtgaaagtgtggggtgatactctaatgtgaaaagcttaagacatgcttgttgtcttaaaatgaagtgtaatctagacatgtttggtgtctaaattagtgtttaattttgattggtatcaaaattattgagaatttgagttgtgt

SEQ ID NO: 134668 - DNA, 904 bp, Cannabis sativa
ttcacggaactcccattgtcgatcaatattctagtcacgatcttattggcaatgggagtctctatgaccaggggatcatggtaaggaaacgcaccagctttgcgccttcttccgtgaaagtaattggctgatccatgagtcggggcctttgagctggaagttgagtgacttcccatacttcgtcatgtttaatggccccggcatagcgcttcaactctttttgagtggtctccccgatatggggcccactagagatcatagccactcttctgttgggtcttggtggcaagctagggttctactgagggatcgctcctccggagggtacttttggtgtgaacgctccgggcgtacttcctggtgtcccttgaggcaatggaccccctcctggaacccggttgagatggggcagccggttcttgatccactcatataggtgacccaatcggattaagttttcaatctcatctttcagatttttgcactcattggtactctgtccgatgtcgttgtggtattcgcatcttttgctgggatccctccgcgaactgtctctgtacagaggaggaggcctctagtagtgcgtattttggcttgtggcgaagtgcactcgctcttgcatgtccgtcaactccgtgtactgggtgtattggggagtatacccccttttttgacgcttgtactctgttcggttgccgccttttaaggacctcttgctctgagagccttgagcaggtccggttaggctcacagtaggagcagagtgagacgggatttgtccgcttatccctgaggggttcccgtaatgcgaagatgcgggagccaaggtttggctctaattgtatcctggggtagcggagaactgtataccgcttatttgtggagtagcctgaggtagggttcc

SEQ ID NO: 134669 - DNA, 523 bp, Cannabis sativa
caatattaggtaaaattattcattgtttgataaaaatgtgtaaaaaagaatgtcaacaaaaccattaatttttttattaaaagtatataaacattctattaaatatataaataaaatttaaaaaataattaattacactaataagtggtaaaatagtaaatagaaatataatatttattgtgtctaaaatttcgtccatgttatattttgtgccaaatttaatacaatttttacaaaatgtacatatccatgacacaatatttaatatgtacatatccttattcactttagttagaattttaactttttttttttccaattatacataactttgtatgttttttttacttgttgcgcaccggctaggtgagattttcctatggtctttgctctattgtattttctcataccaaataaaattcttagtaatttgtggcttttttttgtcatgtttggagttgtgtcttttgttttgtttgtaccaattattaatattttattgtttttaaacctcacatttttt

SEQ ID NO: 134670 - DNA, 613 bp, Cannabis sativa
tttatagcagcttctaacatcatgtaggtggagttccatctagtaacaacatctaagcataacaaggcttttgattcaatatttacatccatacaactttctttaaaccattttagtctagctagagatgacctcacatatctcaccgcatttcgaatacttgaaattgcttcattcaacttttcaaaccatcacttactatcaaattcaagatatgagccgaacacctcatatgaaatattttaccatttagtggaactgtattatccttttcaaacaagttgcccttcaattttcttagtgcaacatcatttgaagaagcattgtcaactgtcactgcaaatactttggagataccccactcatcaagacaatttatcaaatctttttccacaaggtcccctttatggctaggaaccttaagaaagttgataatcctcttttgcattttctagttatcatcaacccaatgtgcagtcaagcacaaataagaaatattttggattgatgtccaacaatcgattgtcagcgatacataatgttgtaccaacattgcctttagttctttttttcgatccaaaaacaattaataaatatctctcgccacagtgaa

SEQ ID NO: 134671 - DNA, 1090 bp, Cannabis sativa
atgccttccaggcctaaatctttggtcctggttcccaatactggggctcccgatgccaacacatccggcactggtaagtctcctttaacggtccatcatgttccgtctgtccaagagtattcccggtataggcctatatagttcgacgagcgtcttgttaagtttaggatgccccctactcggtgaggggatcatgtcaaggccttttacttttcccatttaggtcatttcttaggccggtcctggatgggtttcggtcatcctgaacccatccctctggatcacttagcttatttgtctttctagctggtttctcccctcgaacagctttcttagggatgacaaagctagtattgtagttcaagacttttctagggctgagttagatagtcggggtaggactagctttgttgttttgttttcaggcgcatgctttcttatagccattctaacacttttttttatttctttttgaagcagccatgccaatggaagatctcttggcgactcttgccgaaacctacagcccgtacccttctctccctctggcacctgccaagatggtgaccccggggaggtcatcttccagttcccccttaggcacaatcgtcttgattaatgaggatggggaggtcgaggaggagtaggaggaggaaggcgagattgtggctccgcttgaccgaaagcgaaagggaaagatggtagaggctgagtcttccaagaagcccagaagaaaggacacaccggccatcagctcagattcagggattcctcctgaagcagaggaatacgttgtaccctctggcatcattcttactctggttcctgccgatgaggagaggcagcaacttcgaattgctaaacataattatgcaatggatgaataaagcagggggaatgctgaggtggaagccttgaagaaggtcttgcgggaggctcaacaaaattctttatgcgaggaggccttcaaaaatccctggaacctgaacatagaccccctgacggactggttcaaccgttcgccggccctgctcttgctccctttgtataatatcccagaaaataaataatatataaatagacatatttt

SEQ ID NO: 134672 - DNA, 1216 bp, Cannabis sativa
ttttcactactctgcattctaagctcttgaatattccattacttgatatctgcataacaataataatggttatgatttttgtttaaatagcatgaaaatcttgggttgtcatgctctgttagcacttgggcaagacaacaaaattggagggatctattttacggcaagttggcaaaaactgaacatgtaatgacccttcagatttttttaatcatttagttaattataatgatgttatggtaataataaatttctgtccctttcatatgcagatgtgtgtcccggtcatatgcaaaactaaaactccccactggttcatgtgtgacatagacatgttggcgagtaaggcattcatttgggacagcctgaaaacaccacgcgggaaggatctgaaagatttccgtgtacgagctgcttctgaaatggtacttactttcgattgtttcatttcacattctaggttccaagttttttttagatgaaaactagaatccaagttgaataacgaaattattaagtaatttaaagatcttcatctcttataccttgcagttaagaacacttgatgatcttctccaagtggatatggctctggaattaggagagaaatttaactttgcatcacttcccctagattacgcaagacgagtgccgcagcaagataatggggtagattgtggagtatatgtaatgaaattcatggaacatttcttcaatagaggcaatgttgctgaaattgatgttgaggtattttttcaagtacaagtgattgaaattagacttaaattgaaaatttcatatagtggataagcaataattaactaatatttgttttgtcttccaactttcagcatgtaaccagtcaagacaggtttaatatcatgatgaatctaattcagcatccaaaaaatgagtgtagggctactgttttggcagatgttgctgagatgtattcagttaacaatgtcttagatgttcccccatctactcctgtacatactgacaaggaattggttatcaagtctcctgagaaatcccctgttgatccaaggtttaaaagtaagaagtcgcgagcgaaaaacatggtgccttcgtcgtcaactaagtccaggaagagaatgtccagcggcagtaatctgactatgagagacttggtcggagacaatgagtagcatttgagtactttttaattggaagaatacttggttattttgtc

SEQ ID NO: 134673 - DNA, 663 bp, Cannabis sativa
tacaaattaataattaattaattgatagtacggcaagatgctcggacctctccttgagaaccctgtttgagatcgagtaagcccattttgatgaaggcctgctggaagtccaagaagaacatggcttggttgaatgcgtaggcattgacaatggatcttgtccttggggaagcgtacagagtttggtctgaggtcagcacaccgttcttcctaacaagaccattgaagtaaacattgtcgaagtcgtttcgagtggcgtcgaatggctgctccgccgtgtcccctgcgctgcatgttttcgacagcgtccttgcgaagtccgaatctagcgttggatctgcttcgctcaaacgacttttgaacgatgagcatcgagcaactcctagtgtatgtgctcctgtattaattatttattattattattattaaatttcataatgataaattatattatacgataaacatatcaaattttaggtagtgtttcgtcctttttgttttttttcatatttaattgattgaccactatcgagatgacaataaaattatagtgtatcatttgtcatcccactagctacatgtggtcacagttgctcctatcatgaagtggaatctttatatgtttcgaatttactctacatccctttacaactatatatgtat

SEQ ID NO: 134674 - DNA, 684 bp, Cannabis sativa
aacaccagtattattgttgttgcctctgctaaacgaaacctcaatcaagaaaagcttactagaaaagctgacagaaggaacaagacaaaaagagtaaaaagtttgtaatatctgtgagtttagagagctaagaagcctataagatgcctctctgcaacttaagtaattacccagaaatcacgaacctaaaagacttatgtagacttagctaatcagagagtctgactaatataataatgcctaacagaatttcttgtcgcttaactgaatgttttcaaaaaaaaattgttcgcttttcaggaacatgtcaaatgctaacaacaaatgctgaagagatgcaaatgaataagccttaattgttcacaactcgaaacaggttattagttggtagctattcaataaattattgtccaatttggttcaaaacttctctaaacaggttattagttgatacctattcaatgaaacatagcctattttccttctattaaattaccggataaaatttgaaactacaggcaacttatttgtccgtaggagatgctaaaataattagcattcaaaaattgcctagaaacaccttaattaaaatttaatttaaagagaagtttctccatggcaccaaacacttcatcaacaccaagatatagaattatcccaacttaacacggtactgaaataaaa

SEQ ID NO: 134675 - DNA, 511 bp, Cannabis sativa
  modified_base (442)..(454): a, c, t, g, unknown or other
gaggttctcaagtttctagttgtctgacaaaaaatgaaaactagaatattaggttggatgagaatgtgaaccatcttattccttatataggatctctcctagtgttagatttgaattatatggatttaaaaaagataaaaattggctaaaactctcttaagttgccgaccatacaatgtggaccccactaattagatttttctcattttattcaataatttatcttctcttttactaatgtcacattttctaatttcaatcctttaaatgtcaaaactatttatttaataattaaaattcattatcaaataaaattgccagttaacttatttattaattagacttaataaaatctcttaattaacaaataaaccctaaaatttcttttcttcacaattaagcctttgctttgtcaaaaatcataaataagacatagtctaannnnnnnnnnnnnattgattaattaaaactaattaaatgagtcttacaagctatattatctcaactagtg

SEQ ID NO: 134676 - DNA, 565 bp, Cannabis sativa
tcctttatgtaatctcgaactagtagccaggtctggttttgtggtgcctgttgttgttcggcttgtgtggttcacaggtgtttttcctcaggttgtcttgtatctacatctgttttttgaataaaattattcctcttgttcaaaaaaaaaaaaaaggaatcgtgagcagtaagtgcgactttcattttatagaaaaggaaattttagctacggttttctcctcaagaaatctgatcaaacaaaatgggaaactcacacaagatcagaatataacagctggttaaatagaaaagaaatgagtaaccaaacttactatttttaccttattttccataaataggaaagctagacaactttccttacaaaattaaattgattaatataaaaattatatgcacaaaatatggaaactaatttaaatactccagcagaaattaataataaataataaaatatgtttttcaattaaatatgtcaaaaatagaattaataatctcattccactactacaaaattgggctttagaggcggtttttaagggtttcagcgtcggtattggcgaaat

SEQ ID NO: 134677 - DNA, 832 bp, Cannabis sativa
ttcctctcgcagaactcagtgaacaagtcgccatcaaattaggttccattatcagatactatcttcatgggaattccaaacctatagacagtgttcttgatcacaaagtcgaggacttttttccaagttatgaaaacaaggggatcggtctcagtccaattagtgaagaactgctactaccgcgtacttgtctccttcttgccttgtgggtagtgccccgattaggtcaatcccccatatagcaaatgggtagggcaaggtcattgagtaacctcttctatatagtttgccttcaatttttctatagcgaggcactgaatacaataatttttacacctcatttttgtcatttagaagttgtttgtctagtaaataattgataataggaatcatccatgtaggagagctgtctatcatctctacgtcttccgtttcacatgtacttcgctcgtttagcacctccaccgaaactaagttcaattcatccaagtcattctacgaggttggagttttgttctctcagaatttgttcaattttaaagtaatcgaatatttccaagttcttccgaaccttctataaatactttgccaagcctttggcctggttttctcaaaggacctggttcacaatcagctgcgaatcactatggcagatgaggtttttgactttcaatgcttcaactatttttaagccagcgatcaaggcttcctattcggcctcattattggatgcatctgttagcccaagatatgtttccaagaggggggtgaattggaaatttaaactaatttcgggaaattaaaacttttaacacaaaattatgcaattagt

SEQ ID NO: 134678 - DNA, 737 bp, Cannabis sativa
  modified_base (27)..(56): a, c, t, g, unknown or other
taacagccaaaaaagttcagggggcannnnnnnnnnnnnnnnnnnnnnnnnnnnnnaaaattactaattagccttctttttattttctatagtataagaaaaaggaaaggaaaaaaaaattgtggaatattaaactaaatttttggtatttttatttcctactatgatgctatattaatttttaaatgtgattacattaaaaaaaaatgtaatatctactttgaattctgttctataagagtgatatatatttttatatgaataaaaaataaaaataaaaaaatagtatatgtcttctatgaatattgagggaaagaataaaaaaaaaaacctattaattaactggtatattaatttaaaatgttggtatattcattttacgtgatttagtatatcatgaaggaaatgaaaaaattaagtgcactaatattaattttgtagtatatttatattgttgtaaggtatattacttttatgtgatatagtatacattgagtcaaattaaaaaaaaaaatgtagaatattaatttaagtttgagatatagatatatttgattggggtatattatttctatgtttaagattgtacatatatacatatatttttttactatgctagtatattattttttttataatgatatattagattaggattgggatatatttttatataattcaaattttattattttattttgctaaatgttaaattttagtacacaaaatgtatatac

SEQ ID NO: 134679 - DNA, 704 bp, Cannabis sativa
acttaggtctagttagaataaagagttcttagaatagtccaagtggatccttgtcacagaatgcaaaactcataatccatacactaacatacagtttggatccattgacaggtaatggatattaaacaacttgtgaaaagtcatactgtattgtccaatgtcttctaggaaactgaaattaaaattaatttggaatctaaaatttaaagtctaagacttaaatttataccaaatatttcttgagttttattcaatcttggaccaccactactaatctaactctaagtttagattgcctatagtaagcatatacaagtagaagatttctaagatcgaggtttatatcatttcaagataaaatgtcgggaatataaacttctacgccatccatttcataagagaaattagagtgacatcataagcaaataatttaaaaaccattcatccaattgatatactatttaagcgaattctaaatgaaaaagctaaaaggaaccattaaagaataatctcgattaaaataagaatccaacgttatcccggtaggtgagagtcaaagttattcttattttataaacttcttcattgtttcatattgtaaatactagtctaatttgtcatctttggatgtacaactagattttgcatctacaaatacttatctcttgagatctaacactattatgttgtctaatggatgacaa

SEQ ID NO: 134680 - DNA, 1106 bp, Cannabis sativa
gagaatgggcggaagctctagcgcctctcctccggccaaaaagtctaggggcggtgaagggtcctcggagaagagaccttcaagagaggtaattgatctttcggaggagctgactgctgcaaacccttctacccccaaatctgccaagtccaaagagttaggaccaccaacgactgggtctaaactagtcaggagtattcctgagcgggcgcaggcaccaactccacctttgcccatgttgccagaggccaaaaaaggcaaggagatgctaacccactatatgaaccggctgtttcctgaggtctgtgaacaactagctggtgctgatagtgactcatctctagatgtgttggtgggcggagtcgtgaaggagctcaccagggtaagtcttctttgatacttccctttcactttccacacttagctccatatgctaactttttttctttgtgcaggccggtttgaagttggcttacacttactcccgggctaaatctatcacttccaagagtgcggctctgtccgacaccttgagggcagaggcggacttggacaaaaaggaagctgcggaggccagggtagaaactggaggtgttcgggtggagttgggcgaagccaacaagaagctgtttgctgctgagaagaagatctccgtgctaacaaaggacctcgaagctgctaatcgctttgaggagaccatcgagatcttatctgctgaagttaacagtcttcaggatgagaggagttccttgcggcacgttcttcttcggttgaaaggaggagagggatgcaaaggtggtctaggcggactagttgaaggagtaggtcaatgctttggagatagccggcgtcgagctcttcttcgatttctggaaggctaatccccacgccaattttgactacttgggcgaggctaaagacatatagcttgagtactgcgcggcccaagttgcttatggaaaaggggctgcttcaacctccggccaagcctctggccagactgctgattcttctcttgcccgaacaatagatcctcctgctccagttggctcagaagaaccgaaccaagagcctgggactccagctatttgaacacttcttttttt

SEQ ID NO: 134681 - DNA, 756 bp, Cannabis sativa
tagacattcagccatcttccacgcacccaaaccttcttcccaccagctgcaaaatgtcatagcagtagtaccaacagtggggtccgaacctgcctccatcacccttttgcaaaatcgcagcgaacaagaacatgaagtgccatttcaggagcagccatacacatcggacaactagaattaatgggaacatgtttcgttgttagctgaaaccgagtaggaagactattagtacacacaacgccataggaaatcccttgacttttggggggagtttaagctaccataacttcatccaaacacccgaattactgggttgcatgttgctggatttttcctgctgcaaaatagcataggcacttcggacagaaaataaaccaatagactccttcctccaataccattcatcacactcagcctcatcaagcaaaggaattttccacaccttttcttgatccctcacagtaagaacatccttcagcacctcttcatcccattcacgcacctccactttcatgagagcattcaccattcttcccacaaggcattcttgccgagactcaacaaaaggattagcatcatcaactaaccaagggtcatttaggatattaacttgtgagccacttcccaccaatcttctagcccctgccagaaccaaagcttgggattccaagacactcatccaaatgtaacttgggttatttcctaaagatgctgaaaggaaattaccatttgcaaaatatcttgctttgaaaattt

SEQ ID NO: 134682 - DNA, 2205 bp, Cannabis sativa
aaattattttatgttgcttggttcacatgttactttcataattatatctttaatgtataaattctatcaaatcctgaacatatagttattcatgattatagtattcttaacacagtggaaaataattatgattatatacttcaaactatttagtcctatgatttatcaggttactaaatttatactaacgtgataattagcggtgtagtttatttatacttagataagtggaatgaatgtcctttccagggtattggcaatgtaaacttgtatcggatgtgtccactatacgtcagactggatcgatattgatagtgaaaaagatattataaacttaccgttatatttttttctaattcaatgtcacttagttgatattaggttaattgatctcaatcttcagatggttaagttctaggttaattgtactatacaagttctttgacttattcgttacacgcttacccgtaagattagccaatacttactaggggtgtacataagtcggtttggtcgggttatagtatatttttaccaacccaatataattgtcaggttgtaaatatctaattgtaactcgtccaaaaaaaaaagatacaattcgtctaatgattttcgtcagtttggtcgggttaacccgtttaaatcaatctttatttttatttttatttattattgttagtttttggtgttcaaataattgattttaaaaaataaatgtatagtatatgcctttcaagattaaaatggttatagttaatgttaaaaaataaatataaattgaataaacattaaagtattaaacaatattttttaaaaatagaataaaaaacatatactcatatgtaaattctaagtttcaactttaatattcaaataccgtcaaaattattagctataaattctaaatttcaaattaaacactataaaatataaactttaaatgtaaaatagtttaactattaaacgcaatttatatattatattatagataattttagtgaaaaatatgtaaattagttttttcagtttattcaggttatttgggtaggttagaataatgttcaacctgtccaatatattcattgtgcggttggaatttttcgtaaagttattcgagttgtgttttttgtcggtttattcgggttggacaatttgtaaaattttttgaacaacactaatacttacaaatacttacatcttataaatttagtagaatttagtagtgcaattgagtgggagcgttaataatataaatagaatctatagcttctataactatttagaagtgaaacgttagttttcttagagcttcattaaatgacataaatggaagagctcatatttcgataattatattattttatcgaaatatcatttattagtagccaagtattttaaggataaaatatattgaaaggtaataaggtaattttatctctacttgatgtaaactgtctatagaagatgaatgactgtttagattgaaataatagataatttatagtatatctatatttggtatatagagcgctctatgtaattatgagtgcaattttaaatctatagcggagtcaggaggaattaataagctagaaagtttacttagaaaattttaaatctacttaatgggagcttggttacataagcttataatctccacattgtttgggataatatcatcttatagattcaattaattaatttaataaatcaattagaattcgaaagtagactatgtcttatttgagaatttttaccaatttgggcgattttgagaagagaaataaggggtttatttgttaattaagacactttataagtctaattaatagatatatttaaattatattttatttgatgattatataattaattataattattaaattaaaattagtatttaaataattagatgtgataagaggtaaaaattagaaaagacacattatttcactaagttgaaataaagtgagaaaaatctaactctatggcccattagtggttttcggtcatagcttagattttggcccaattgtcttttgattttaagcccatctcatctaacctaacctcagtgtgaagactataaatagaaagagaggagagctttgtcaatctaatgatttcaaccctagaaaaacctctctgtttcttctttctctctattttcaatattactagctgttatacccgaaattcggc

SEQ ID NO: 134683 - DNA, 832 bp, Cannabis sativa
tatagtatttaatatgtcatatttatgtaaattaagttttcaaatctcatatttaatgtttttatttgtttagacagttttatttgtcactgatattgtaaaagtcgctggaatttgctgtcggggtcagaaaaatcactggagtagctgtcgatgtcgaaaaaatcgttggagttgctgccgacgtcgaagaattcatcaaattggcattgtagtcgaaaaaatcactggaaaaatcaccataaagctggtttcttaatgaagaacccggtttcttgatgaagaacccaatttcttgatgaataaaccagtttcttggtgatttttctagcgacaatactaattttgacgatttttccgacaccggcaattgctccggtgacttttccgacaccgacagcaaactttgaaaaagtcgtcgaaattggcatagtcaccgaaaaaatcaccaagaaattggtttcttcatcaagaaatttattgatgaagaaacatgtttcttcatgaagaaatcagtttcttggtattttttcggtaatttttccgatgacaatgccaattccgacgactttttcagcaccgacagcaactctgatggcttttctaacaccggcagctactctggcgacttttctggtaacgacagcaaactctagaaaaatcgtcagaatttgtattgtcgctggaaattaccaagaaaccagtttcttggtaattctttcggcgacaatgcaaattctaataactttttcggcgccgacagcaactccaacgaatatcgtggcgtcggcagcaaataaatttcttgatgaagaaaccactttcttagtga

SEQ ID NO: 134684 - DNA, 581 bp, Cannabis sativa
tgacttgatagagcattgaaatagattcaaagcgcaagttgaattgcatcaatcgaataaatactgagtgagttatggtcgttttactgaaggtagtccatgacccaacacccaagttgacatccaacgtccaagttgacatcccaaggcccatgttgacatatgacatcaaactggacgctaggtaagtgaaaaaacgtgcagggtatgtactttaagatgcctaagtgatattttgacatcacctagtctgtttttgtgttttggtgaagtcgttcaccagttctcaaagatgttgttgttatgcagaaatgagagagtcgaaactcttcatttctgagtgagtttcccatgttagaaatgagaaatgaagttatgaatttgacttctctgacttcaagaatcatagatattgtgaaaaactagacggacagtcgaaacagaatcagaattggataagccaaacccaaagcacaaggtcatttgtcaacttgggtattaggtacttcatttatgagctcccaagctattgttttgaaacttctagggttcttgtgttgattatattttaccaggatcta

SEQ ID NO: 134685 - DNA, 637 bp, Cannabis sativa
gaagaaagggaggttctccgaactcttttccgcaggttggaagaagagaagaaagccaagcaggaggagcttagagccgaggttgagaagtataagtcatagaccgggcagcagaaatcagaagtggagaggctcggagggaaagtgaatgccctagaaatagctagtctcaagatattctatgacttttgtaaggccaatcccaaacgaattttgaacacttgggcgattccaaagacatgtttctcgaatactgcactgctcaggcggcctacggggaatccgaggcgatcacttctacctctccaactgatcaaatgttggagtgcctcctgctcagacaaatgatcttctagctcaagctgacccagtggacccgtacaaagagcctgggactccagctgtttgaatgcttcctttttctatcttttttttatctgttcggacataaggccttttttaagacaaagtgaccgactaagcggtcgttaaacttggaatttatttttcattttttagacagctagctgactgggcaacctttaatcccgaacttgcatgcttttgctatccttaataaatttcattctctgtttataatcatcatgcaatagtgtttgttttattttttaccaaa

SEQ ID NO: 134686 - DNA, 817 bp, Cannabis sativa
  modified_base (759)..(760): a, c, t, g, unknown or other
ttaatatgttcaaaactaagtaatttagcatcaagagtagagattaagccatacctgcaagaaacggcatcatcaaccacattctccttacattttttataccgaatgacacatggaatgtctcaatgtactcaacccatcgtgcatgtctcttgttgagcttgtgttgccccttcaaatgtttaagggattcatgatctgtgtgaatcacaaattctttgggccacaaatagtgtcgccatgtttgtaaagctctcaccatggcatacaactctttatcataggtggggtaattaagtgcagccccacctagcttttcgcaaaagtaggcatggggtctcccttcctgcataagaacagcgccaatacctataccagaagcatcacattcaatttaaaaatgtgtttgaaaaattaggtaaagtgagtactggagcttgagtaagcttgtattttagcagttgaattgtctcctcttgtgcttcaccccattcaaaaccaacattctttttgataacttctacaagcggtgctgtgatggtactgaaatccttcacaaacctcctgtaaaaactagcaaggctatgaaaagttcgaacatgacctatagttgagggggttggccactattggatggctttgatcttttcttcatcaacctcaatacctgtagcactcaaaacaaatcctaggaaaccaatcttatcggttcaaaaagtgcatttactaatgttagcatatagtttctgttttcgaagnncatccaaaactgattgcaaatgtgaagcatgtgttgcgttttatgccctaaataaaa

SEQ ID NO: 134687 - DNA, 684 bp, Cannabis sativa
atactcttgatccaaaaagacttacttaaatcatctcagaatgcctagcacctctatgacatgacatcttataattgattagcggttctctataatttttattaaattaaaataagtgagatatgatattaaattgtaacaataacaatattacaccttataagggtgctaggcaccatgagtgccctttagcatttctcaattagaaagagctatgtaatttattttaattttaaaaatagattctctagctttttctaaaaagacttttaaattaaaaaagaatttttcattttttatccaaacacttctagaattattattttttaattctaaaaactaaaaaacattataaaagccataccaaacatggcaaagactttttttttcttgtcatgattgtgtgcaagtggatctttttcatttttacagtttaaaataattttttatttgtatttttacagaattctacatagaaatcctatagcaattaacagattaacctaaatcccaaccaaaataaatctacatagcaactcatatagaaactaccgaagaaatcactgaagcagtccaaattataaattaacactatgtttggtaagagggagaagtggagggatggagagaagagaagggatagaggtgggaggagataagaaatccctttgtttggcaagagag

SEQ ID NO: 134688 - DNA, 566 bp, Cannabis sativa
tttaatagtatgatttaagaaaaacctattaggaaccatattagtagcctgatagtagaataggcgcatgttttttttaatttccaaataagtgacaattagtatgttttatttgatcaaaatctgaccagactagctcttggttacgcaggcttttctaatagttcagattcccttaaatatttgtggctgaggtagaagtcctagaggtagggcatgcggctggggtgatgtgaactcgccacacgctgcccaagttgcccaagattgggaaaacaggtttgcagaaatgcaagccaggattaacgaacaagatgaagagatctgacgcctgagacagtagggtgctcctacaatccctgctccagcagtgcaagtacctcctgccctgctgtacaggcaagaccagtcgctgcagtaaactgaatgtaaccgctgtatgaaaggttctgcaagcaggcacctctagttttctccaaatgttatgaaagccgagtagtggctaacagtgattaccagaattttgaaatttatggtcgtcaagcaatgatagagtggcatgtgcc

SEQ ID NO: 134689 - DNA, 1006 bp, Cannabis sativa
agtaagccactttgttcataactctgcaacaaactataaaaaaccttcatcacaaagaataaacagatatggtgataaaggatccccttggtgcaaccctctttgaccagcaatgggctccaactccttcccaccttgtgaaatggtataggaaacagaacatacacattgcataactaaattaatccagcgaccatcaaaacccatccttaccatcatagcccggagataaccccactcaagcttgtcataggctttgctaacatctagtttgagtgccatataaccatctctccctcttcatttcctctttaagtgatgcataatctcataagcaatcatgatgttatccgagatcaaccggccttgcaataacgcactttgagtatcagatatgatagacggcataacactcttaagtctattagcaaccactttggacacaatcttgtacagtacattgcataatgcaatgggtcgtaaatcccccatatccataggttgtttctttttagggattaagaccaaaatggttttattaaggtctgtaggaagagaaccattatgaaaaaactgcttaaccatattgatgacatcatccttaacaatcggccaacacttttgaaaaaaactcggggtcattccatcaggccttggggatttatccggatgcatttggaacaaagctttccgaacttcttcatctgaaaccggtaatagcagcttagcattctgctgggatgatacacgagtttgcacactacttgtaacttctctctagtcggtttgggaagatgaaaaaagctcgtggaaataagaaaccataagatcatccaaaccgctctcccggtcaacacatgcacctgaatgatctttaagttttgcaacaagattattccttcgtctcgtagttacggaagcatgaaaatacttgctattattatctccctcttgtaaccacagttgcttcgatctttgacgccagaaaacttcccgttgcacataa

SEQ ID NO: 134690 - DNA, 592 bp, Cannabis sativa
  modified_base (75)..(81): a, c, t, g, unknown or other
taagcacaaaacccacaaagaatcgaagctttcaagatgaattttccaacacttagcaaaataaaaatatgaagnnnnnnnggagagggggttcagctagggcagaggaaaaagccaagaattttttctttttaaaatgcaaaaatgactctttcaatctcaatcacaaaagccacaaaccccaagcttgaattcaagcaagcataacccaaaatcaagagttagatggagtttttgagaagaaagggggttcagccaaagggctgagaaaaaattcagaaaattaaatcttacttttgcttaaaatcccttttacgaaccttactccaaaatgacaaaattacacaatttcccttaagaccataaaacacccacataagcacttcaagggtaaaacagtcacttgcacacacaaataaactcaattaattttttgattattcccacataaataaaataccattaattaaacccaaaattgtattttggccacgaactcaattcggcccgaaatacccggttgtgactataccgcgccaacttgtcagaacacacctgaaaaaggacaacacaagcatactatataataata

SEQ ID NO: 134691 - DNA, 828 bp, Cannabis sativa
  modified_base (710)..(715): a, c, t, g, unknown or other
  modified_base (790)..(794): a, c, t, g, unknown or other
cttttttacctctggttttgttctctgtttatttatgagtttctttttacgggtcattttgttaaatttgatatactaccctacaatggagaaatctggatatggcagagacggtatttacaagtctctgagaccacatctacacctccccaacaacaacaatctctcaatggtttcattccttttcagaaactcatcttcatacctacaaaagcccactctcatttattattattattattattaatcaattatttattcttataattcaactttttattttatttttattaattatttaattttaattatttctcatgttttatatattaattttacttttcattcctacaatatttatttattatttttgtaaaatttctttttcagaatattttttatttattattttatacaaattttattctttttctttaaaagaatttttttctaatttaacatgttagtcattcttttttcttacaattttccaattttatataggttatttattttaatttctaatattactaatttttttagtattattaataacaatgtgtacatcagcttatatatacaattatgacattcttaccaaatttacttttataaaacaaatatttaaaaaaataatttacaattagttattgatttcttaaaaaaaaaattactaaaacttaaataaaactaatatttacgtggttcgnnnnnnaactttcatctagtatatatatgtgtatatagatactagtaaaaagctacgtgcaaggcacgtatactaaatttnnnnntagtttttttctatgttatttgaaagtgatacaa

SEQ ID NO: 134692 - DNA, 947 bp, Cannabis sativa
  modified_base (41)..(46): a, c, t, g, unknown or other
  modified_base (687)..(690): a, c, t, g, unknown or other
aaattgtgaattgggggctgttagggttaggtgttgatgcnnnnnnaattctaggcttagtttgagttggttcaagcttcttgaagctggttttgatggctagattaggtgttatgcaagttgaagctttgagttcaaagctttgatctctaatggcataatttgtttcaatgagtttttttgtgaattgctagctgggatatgttgtgtataccctaattaggtactctgaaaagtttggttgcatctggtggagaattgagcaagaaatgaaaaatttggggtgaactggtgcaaatcggctagctagttttggcagggtcaccgaatgctttgttttctcaattttcgtccatttcagtgccgtggttgggtgcttccctatttttcagagtttgtgtaatcccttaaaagtataaaagaacttagggttattggtttgggtttcccgagattagggttttggtcatgtaacttacccaattttataatgtgattagggcatccatctagcacgagattttccatttagatcggccagcacacttgaatctggaaagaaggtaagaactaaatataatgtgtgatatcaatatctgaatgtatgtatatgttatgtgtatatacatgcttaatgtgttagttgcactaccagcacttatgcagttaaggtatagagtgcattgnnnnagtgaatgttatctgagagtacctttcagtgataccagcacaagtaaggagaagtacttagtgtgtgtggtatatcacttagcggtactcagggtatgaaacaaaccctaccaacactcgtagagtgaggtacgtagtgtatgtggtatagtggctatacgcaagtattgaacgttcttactcatctgttgagccttgtaaataggtgtatggatgcctaattacaagtcgaaaattatatgatatgttatatgctt

SEQ ID NO: 134693 - DNA, 1109 bp, Cannabis sativa
atggtgcaaactcatacttgctgtatcatatatttaataattactaaaattttaaaaaatataaaaaatgaggaaaaaaataaatttgaatgaaacctttttagaacaataataaacaataaatttttaatgtaatgtaaaaataagaattttttaattgatgataatttttttaatagtaatatgtttttaatttttttaattttatatagaatgttaagtttttagtataaaaatctaattaaataataaaaattgagtaaaataaaaaattataattttaaaactaaaataactgaaatttgataaaaacaattaaagaaagttttaaagtttgttaaaattgaaaaatgtaagaatttacattgcattcatctataaaaattataatcatcaattatctatataaatactatattaatttagtataaaataaagtgaaaaaaaaatagtgatctctatgtagtctctaaaagtgtaatactatatcaatttttaaattttttctctaaatgacttattaaaaagtgaaattactaaaattttaaaaaataaataaaaatgagaaaaataaataaattggaataaaactcatgaaaggagttatgttatatttctcatttatataaatttatcgtgcttcgcgctgtttttataaaattataataataagtcttatatggataaacaaatttaatattttaaaaatattttatatgattaacatgaatatcaatacaaaataattagaaaataatttatgataaatattttaatacatttattctattaaatagaaaagtgattaagtattcattccaaagaaagaaataattaatataatatctgtttagaaaatacataataacttaataatcaaataattgtgaaaatatttttataaataaagtaaaattagtataaaaatatacacacatgttgagaggatagtagacaacaacactaaacacacttatgcctttggtacttcatcattcactatcttcgatgatttttggttttagaataaagcataaacaaataaatatacaattagctagattttggaaataaagcatatcttgaacaaaatatgcctataaaaaaaa

SEQ ID NO: 134694 - DNA, 688 bp, Cannabis sativa
aactttcctatataatattttattatatttgaaaattttcaaattttttttatattttatttataattttagagtttttattataaaaataaacatgtaaataaaaatacattttgctcactaaaaaaattgaaatacaacgagaaactaatcttacaactaaaagtgcatattgggtaggttttatcgggttcaaatttcaaattttgagtttatatattatgtaataaaacctgcccatttatgtatccgtgttttcgagtttggagttagattgggtttgaatggaattttacaagtttggttgggctgctttattttttgaaaaaaaaaatcattttttatacattttcaaataagaaaaggcttaaaactaagggtgtacctcggtcggtttagtcgagttctagtatatttttaccaacctaatataaatatcgggttgcaaatatccgagtgtaacccgcctaattaaaaattaaaaaaagttcaacttgcccaataatttagtcggtttggtcgggttaacccgtccaaaccattcttcatttttttttatataattattatccttaatttctaattcaaaaattagatttaaaaagtaaaaatacattatttatatttcaagttaaaaaatactataatctaaatttattttaaaaactttaatataagataaatataa

SEQ ID NO: 134695 - DNA, 623 bp, Cannabis sativa
aattaatttgttgatgctgtctgttttttatttttctgcttgggattttctgggttagaatcggtttagaaaggggtgctgctgggttttattttctgggtttgtaagagggttgttcttcgtgttcttcaaagaagaacaacgaagaaggaggctctgtttggggtatttcgaattgggcagcaaggattaatttctgggttgtttttgttgatgtctctgtgttcttcagagaagaacaaagaaggagaacggctagggttaatctttagtggctgtgtttatgtgtttataatacgacttgtagctctttaataaaagggctgtcgtttgaattaaaggctgagagtcaaaaaaaaaacagtatccatttatcaaaacatttaaataaacaaacaatataccttattgtgatcaagtcctccaattgcctcgatttggaaattttccttcaaaaatggcctcacacacctattataaagaaatttatgttattcatcataaatttcaatcagtatccacacatatcatacatacattactatatctaatctaaacatataaatatacattatacctttttgtctttcagtccttgtttttcaaagctcttcaatccaaaa

SEQ ID NO: 134696 - DNA, 765 bp, Cannabis sativa
ttctttgcaagataatttattttggatgtatatgtgcatgtgcatgtatgtgtttaacattaaagtagcgtttcattagaatgatttttcaaatcattgtaatagaatgattattttattttgaaatagaaaaaatgactattcaattacaaaaagaattttatttttttataagtaagttttagtttcttctatttccattacagttcccattcacatctttatttttatactttcattcattccaaccaactgccaccaaagcatttgcgtttggttgaaataaatgaaaacataaaaataacaatgagaattagaatttggaatatgaatagggatggaatcaaatttaaaatgtataaaaaatagataaaaattattaaattttttctcatcgtgcattaaaatgatttttttttttctatttcaaaataaaatagtcatttcatcgaaatgatatgaaaatcattctattggaatggtattctagtactttaaaagacaaccaaacataataatagtataaaaattgattcttttctattctattcaattttaccattaaccaaacaccacttaaatgtaaatacgtaaacatgtgtgtatgtggtcacatttatatatatttttttttgatagggtggtcacatttatatataaaagaagaaaaaatgctaaggagcaccttaaggtgccaagcattaggtggcatatatattgatgcatttcaatatcgagttctacacattttaatttaattaataa

SEQ ID NO: 134697 - DNA, 804 bp, Cannabis sativa
gatgcagaggcagaacctagtttacgagggaaggaactgctttttagttgtgagtagagtaaaaagagaaagacaatgcctacttttatgtatttatatgctagttaatagttactaggtacgtgccgccctctttattagaaaaataaattaacaattagtgttattaaattacatttttgttattaaattacatttgaagtggataaattgtgtaacttttgtgccaacaaaatcgtataatattttttgaaaaatttatatggtatactaatttttgttatcttttttacaaaaatattgttaggcggtattttttttttattttttttaatgtatttttttataaattttatactgcagtatattatgttaagttttcaatggtgtattttagttattctactgttggtttgagttgttctgttttgtgttctacttgtgttttataaaaacacagtattttaaaaaaaaaattcatgtgacaatatttttatagaaattaatctaaatttcagtatttttgtaagttttttttttctttttttttcaaaaaaagagaacaattacattatgcctttcgaaaaaaaaaaatattacaattatgaaaacgaaaatgttacaactattctaaaagagttaacaaggtacattcaatagtatttttttttaaaaggaaatacataattattaaatgtgtttggaagtagctgtgtaattactaggtagggtaattattaggctagtaattacacaatttagtaattacactatatttttaaatgcaatgtgtgtttggatatg

SEQ ID NO: 134698 - DNA, 1593 bp, Cannabis sativa
aacttaacaataccatacaccctatgagcatgcaaatcataattcctcattttcaaactttcgggtagcataaagattccaatcacgctaattatcacggtaataaaatttggaattgacaacttgagatggagagatattactaggagatgaactctgcataggctgcttgcctttggcagcagcagaagctttggctgctgaagatgcataaggaggtgctggagcaaatttggtcaaaggtggctcgggttcgagttcagtttcctcaccgtcagaggagactccaaagtcttctggaatctctttttcagaatggatagactcgaatttggtctcgaaatcatcagaggggacctccattggttcttcttcttcagaacttgaagaagccgaagggggattcaacttcagcttcttggtaggaggaataggtttgtcatggcttcgtttagtgcaaagttccttctcgagtgaagcttgctgggcacgagtgcgagaggatggacctgttggtgtagatgtagcaacacccttccctgatgcagcagggggtgatggagtagtacgaggagaagaccccttcgacgatgaagacgatgaagtacaaaatttgtgggaacgcacagatttcctagtaacttgcttgggaattcgtttcggcttgggcttcaccggttgagattcacgctgagaaagcgatgaatctcctgggtttgatgcagcttcagcaggaggtaacaaaattggagcaacaggaggagcatttgagggggtagcatcagattcttccaccctttttggttgccctaggttctttgtcttagccatggtaatctgaaagaagaaagaagaacaaagaagcagaaaaacaaaggaataggaatcgggtacgtggtaagaataaatgacaagtgaaaattggtttaaataaacatgggagagtggagcaaaaaaagaaaccaatttcaaaatttgagtaaccaccagcccacgaacaacaaagaaaaccaccccactctttttccaaaaatattttttttaacaaataaaaggaaactagaataaccaagatactttacaaaaatagacaatttaagaaaatccttcaaaatcaaggagaaaatactatgaaaatgatatcaacctttaaaggtaacttatcaaaataaatcaattcagagaaaatgttgatacttacaaaaaaaaaaacacaaaattttcttagcccacaagccaagtcaccaacgcctccctcttttttatttttttttattaatattattttttttatttttggaaatccgaaagaaatacaagataaaatatgcacaatgaatataaagtattctaaagcaagcaactaatcaaaatggataatcaatgacaaatatacatgttatgctttcaaaagagaataactaattagtatctcaataacaaaccatacttagcagatgttgaggaaaaagatatgcatgttgcaaatgatgtgaaccaggattttttttttattttagtagaggagacttacaaacttgtacacacttgtcagacataagtgtgtgcagtgaaaatatgatcattgtcctt

SEQ ID NO: 134699 - DNA, 821 bp, Cannabis sativa
aaaaaaaatcaccacttttcgccactttttcatcggttttcgtttgctttattgggtagaattgactgcttgaacctccatttcactagttttcaaagagcttaaagaagataaagagtggaaaaaggcagaggtgtgagcttatttgagggtaaaagccatcattgagtgaaacacgagtgactttgagtgaaccacttttctttttgagtggaacacgtgagggagtgtagtgaggtcctttctatacttgtctaactttattgttttgcaaatttttttaatcacatgtcacacaaaacacgggtgataacaatccacaacctacagttccaaatctacaacttcaagccattatgggggagatgggagattgttgagggaggagtgtgagcaaatacatgagcggttgaatagggtggaagaaggagcacaacggagaccaagggggagaagagtacaccaaagggggaatgaaaatgaaggagatttcgaaggagtagtttctgatgaagaggttgataggatgtcgacgggtaccaataggaggtatggtgggaatagagaagataggaaccaagtagacaattatttggggaatataaagatgagaatcccagcctttcaagggaagagtgatcctgaagcatacctagagtgggagaagaaaatggagttagtctttgattgtcacaactattcagacatgaagaaggtaaaacttaatgccattgagtttactgattatgctattgtttggtgggatcagctgtgcactaacaggagacggagtggagatcgccctattgaaacatgggagg

SEQ ID NO: 134700 - DNA, 534 bp, Cannabis sativa
  modified_base (42)..(53): a, c, t, g, unknown or other
tgcaatagggatttctatgtagaatttcataaaaatgcaaannnnnnnnnnnnaaaactgttttaaagtgtaaaattgaaaagcccttattatttaatataatattagatttggtattgacttctatcgatagcttgtataaaattatattattttttaccatgaactcaactctaaccccgagccccaggtccgagactaagtttaagttcggatatgaggttcaagtgcgacttcaagtttgggttcaaggtctaagtctaggttcggggtcccaatcctggactcattgtaattattataatataaattaatacagattatttgttatgtaataaataatataatttatattctattaaaatttagggaaattacttcatatactgttttttttttttttttcaaatttgcggtttgggtttctaaagtagttgcagcgctagttgcaatatgggttcctatacgattttttattgtgatttaagttgcaaggctagttgcaatagaggtttctatgtagaattccgtaaa

SEQ ID NO: 134701 - DNA, 1178 bp, Cannabis sativa
atcgacttgcctgattaggcaatgtgatgtaatgaagatggttactttatgaggtaacatatatataaattatattttcaaatgaatataattcttattattggtattatagttttgtattaccagatatccgtatactgatgcttattcatggcagatgccagtagtgatttggatttcatcttatgaacaatgcgtaatggtttgattctgattgtgtataaacgataatatttgaataagaaactatatgattattactattgcttttcttgctgagtctttgtgactcacgggtgctatgtggtgcaggtaagggcaaggaaaagttagagctgccatgaggtgactaccttctccagcaatatacatattgaccccaccacctgcgtgcttagttgccaggagttgttttggactagctgtatttgttgtattttgaattgtgttttgacttgcttttgtctatagtcttttggtaaaacattttatagtaaggatcctcagaacacgctttttatgccgttataatgtccgttttcagtcttttattttagtcaagtttttaatattatcacagtttttactaactaattaatctattagtattaaattagtttataaaatcacatatgtggtgtccccatggaatagggcgttacagatgacattaaagttttttcgagaattgcaacagaaagagtcttgattttgcattcttgatcgattaccaagctctaatttgtgggaaaattacaactaatggcgcagaatcaaatcaactaaattttaaacattcaaacaattagtaatgacaagactaacaaacacaaaaaataattggaggaaaacagggataaacagagtatgaacaaccagaaaataattaaagcaataaacaaaaaagttaacaccaagatacatactagttcaagtccgatagatcgatgtgatctatgactttattccagttctagaacaccaccaaattctctttattgattgagcaagaacaagtacaatacagtcgagatcaattctctgatgagttctctcaaagtcttttaactctcacactcttactcaagaatcttcttcatccacagaatattcttcatacaaaactcaaaccaaatctctctcttttctctatacctctcaatcttctctctctctct

SEQ ID NO: 134702 - DNA, 695 bp, Cannabis sativa
tattcttttaagtgaatattttgcctttgataattatataattaatatatacactaataatcataccatataataaatgaatttattagtgtatataattaaatcgagacaatatttatctatattctataactgtaataaaattgttaataattttagagttctatttacacccgtatactttattattaaaaaaaattaaacttaataaaaactttatgtattatttattttataaaattaattaggtattttatgtattgattatttttctcttaaaaaaatctaaagtattctattttacaaaataaaatgtgtgtaaaatatcttaaatatttttaagagtcacaaaattaataaataattttggcccttgttaatttacaaaaaacaatgaagactaagaacatctcaaatggagatgcaaataagtgatgcaaatataaaatatagctaattttgtcaaaagtctactccaatggtgtgtcaaattgtgatataaatatctcacataacaaaaagtgatatgaatttggatcacaatatatgtataatgtaaaatttgcattacaatgaatgctatgattttataattactattatgctatttttaatattttattgtaaaagtttaattaacatcaggatcggccctagccataggcgggctaggcccgtgcctagggcccacactt

SEQ ID NO: 134703 - DNA, 809 bp, Cannabis sativa
  modified_base (751)..(767): a, c, t, g, unknown or other
atacaatgcgagccgttagtattcggcttcgtattgtgagtcatgagttatatctcatttataacttttgattttcctttctcgccagacaagtttttaatcaaaaagctattcataatagtttgatcctcctttctcgtcagaaaggtttgatcaagaactttaaaaaatttcaaaaattttaaagtggtgggtttgcactatatcatgtatttctagataaattcgggttaatcatacacagatgcccctcaagtaattttaaagaataatactttgtaattacttgaaaaaagaaatgattaactttactcataactgaacttcaaaatattacatcaaaaatgtgagttacaatcattaatttactagtagtagggtcgtaaatgttccacattccagtagttctttatgagcgagccattcatccgagcaaatttgtaaaccctagttcctactatcgctttaatcacataaggaccctcccagttcgagttgaatactcctacagctacgtctctcgtatttgcaaatactcgccttagcactaagtctccaacattgaatagcctttgtttgacccttttgttgaaaaatcttgttactcggtgttgatatgctgcattagtaatctgcgactcagtacctttttcatcaggtaaatacaaagacagttttaagagttcttagttttcttcttgattatagagttgattccagttgtccccatcgtgtgatgccacgtcagagnnnnnnnnnnnnnnnnncatttgcccccaagtctgtacgggactttcgaagttgcgtgt

SEQ ID NO: 134704 - DNA, 867 bp, Cannabis sativa
gattccaatgggggtgtttttgtgcagctgttgctgataacgaggagactgtcatcggtgatatttttactgagaaggttcggaaggtcacagccttagaccccaagcttcgatcaataaagcttctctatcccgtgaggccttaatcgaatcttccgccgggcctcgaactcagaatccccctaggtatccccactccttatcctccttactttatttggcctgattttttaaaatgtgctttaagacacttaaatcaaaagcctgagccacttttgatagagttttctgaggatcactcccgccttgcagagacttatccccatcaccttcctaaaatgaggctgtccgagttgaccattgaggagattgaggcccagaacgcggcccgtcggaagaggatgatgtcgaagtcccccaaacgaaaaagcagggcgaagaaaagtaagagagtaagggttgaggaaaacgccccatcggatctcggcatgtcatctcattatgactcagccactgatgatgccattggggccctacttagtgctcttcccgagatctcatcaggcgtgggtgaaggtgaaggcaattccggggggctggcctcgacaggagcctccaatctagggcctcctgatcgggaaggtttctctcagtctgagaccctcccgacggctacactgggccttaattcggggtttccatcctcttctcctactcggactcctgcctctctcctcggcgtgccgtcgacttcccaacttgccctttctcctgctttaactcaccttacatctttctcttccggccgaggctccccgcctctacccagtcatccccgcgggtgtcggctgaatgggacgagattcc

SEQ ID NO: 134705 - DNA, 815 bp, Cannabis sativa
ggggggggggggccggtggtggtgaagaagaaacagtcatgggaaagaaaagcttggccaagaaaagcctagattttatctacccaatttttttttctgcaaaaaaaaaaatagcatgtgtgaagaacacaaccgtgcgtgaaaaagagagaggaaataggaaagggcagccagggtttgagtgtttatagttatctttttataataattttatttaatttgttgttttaattcattaatgtagaaaaaaaaatatttaagttacattaaaatatccacatcacccaaaattaatgtccacatgtcttgccacatcattttttatttaaaataatactgccaacggcaaaattaaacagaagtgaacagaatgactacatttctgcattcgttataatttaaggactatttgtaacaagcagtatatattaggggggaaacatttagtagaataaaaagtttgggggtcaaaaatactatttattctaaaaaaaaattacataaagataaatttacagttatttaacttttttcactatttaaacatttttttacataagtataggtggttgttctatgttgttttcacgatgttattttcatattgttttatgttattaaatgcggacccaattaaaataatgggctacacttgttataaaagtcgattcgtggttccagatcgagaactagcccaattagcactagagccagggcactagagatatacaaggagaaaattacactgtataccctttttatattgtcctattttattttcaccctcttttttaaagtctatcatttttacctct

SEQ ID NO: 134706 - DNA, 644 bp, Cannabis sativa
attaatgtctcggttctggtggaagaccactagtagcaaaggcaatggtattatttggatgaattggaatcgactctctcaaccaaaagatgcaggcggcttgggtttccggctactccatgatttcaaccttgctatgcttgctaagcaaggttggagatttttgacacatccgaattctttggctaccagaatctacaaggctcgttactttccacatgatgactacctatcggccgatcttggaaggaatccaagttttgtttggaggagtatttggcaagctcaatccttagttcgtttgggagtaagacgaagcattggtactggtttgacggtcaatatcttacacaaaccttggcttcctcattccactaatccatatgttacttcctctcatgtgggtctagttggtcatactgtgagttctctcttctctgttgattctagaacttgggacattgaacttgtttaagatattttcaaccaccgtgatgctgatcttattcttagtattcctttgagcttttcagcttcaggtgatttttggtcatggtctgttgaacattctgggaatttctctgttaaaagtgcctaccgcatgcttcaggataacaaggattcaaggttaggtgttaacaact

SEQ ID NO: 134707 - DNA, 575 bp, Cannabis sativa
aatatgaaccacctaatataataatgttatatcatttaatgcaaaaaggaatatctcattaaaatatagaattaatagagcatattcataactcgttgacaatataatcttaggcaagacaaggatacaaaactattaacgtctatattgacgagacactgccttggaagacgcggatccaaggacaagattcattttaaaaagaataaatgaggttatctgaagtatttatgaacaatatatagcgagacatccacctcgctattcacaagacatattgcaagatgaattagttgttatacacttagcgcattttatacattacaataactaagtgtaacaactgggaaatatgcaggacatgattgtccagtctcgaggccttatggttaaagactagttcttaagtttgctcagtacactggtgctcatgcgattgcttgaaggcatatgattgtccaaagtcagcattgatcatatacaggcaaagcgagatgctgttatcgaaatcagcatcaatcgtctttaaggataaaaataataagcaattatgcagttatcaattattatctaca

SEQ ID NO: 134708 - DNA, 699 bp, Cannabis sativa
tttgtgaaactgatgagtgacacgctaaattacttttcggagacttaaaatcgaaactaaaagtttccctatcgatggataacatggcaataccataaatattacaaaaggggggaaaattagggttccctaaactgccccaaacagcagaccggttccccaactgaaagtccagttctgtgaggtttcttggggaccaaccagaattcctcctatacaggtcccactgaactagttgaccggttcaatgcaggaaacataaaactccttgcaaataattcaattcgaccccaaatttcacaagaacctccaaaacatctaattacgtcataataaatagaaattatataataaaaccaacgaataacccttgaagcaaaaatcaccattagagagcaaagcttaagctcatcaactcaaaccttgctcaatcaccacaccaaacatcaaacctattgtaaatcaacttaaataactttaatttaagttctatatacaaaatcaaatatccttaaacatcacaaaaccctacttctaaaatcatgcataacttaacttgaaacctaagaaatcacaaaagggtgagcatgggagcttacattggattagaatcactaaaaccttgctattttcccccttaaattgtagaacaaaactgattttctccttagttcccagctaaacagaagtaagagagag

SEQ ID NO: 134709 - DNA, 549 bp, Cannabis sativa
aagcagtaatgtaagtgataaagcaaacttggttccgatccagttcctcgaagagcctagcattactggcacaaaagagatcgaaatgattgatacttccccaaactaggtgacgctaatagcagcctaccccaacgtggcggaactcccggataatcgaaatgaagctcaaaagaggagaatgaaggctgcacggtacatcacagtggaaggaattctgtacagaccagagtgctccatgtcgttgctcagatgtgttactcaagaagaagcttcacgactttatgttaagttcacgatggattctgtggaaatcatgccgcctagcagagtttatctaagaaaattctaaggaaaggttatttctggccaacaatgattgaagattcaaaggcctatgttgaaaaatgtgacaattgccaaagatttttgaagatacctcgatttttgcctaacgagttaattcagatgcaaagtccgtggccttttgccatttggggaattgacgtgatcggacaattacctaagggcaaagcgggagtgccaata

SEQ ID NO: 134710 - DNA, 686 bp, Cannabis sativa
ggtagaggtcctagaggcagggcatgcggccaaggtgatgttaacccgccacaagctgcccaagattggaaaaacaagtttgtagaaatgcaagccaaaattaatgagcgagatgaggagatccaatgcctgagatagcagggtgctcttgcaatccctgctccagaaatgtaggtagctcctacccctgttgtgcaggcaggactagtcgctgcagtttacaaaatggaacaactgaatgaaaggttccgcaagcaggcacctccagttttcttgggaggtcttgatgttatgaaagccgaaaaatggttaacagtgattacaagaattctaaactttatgggcgtcaccgactatgatagagtggcctgtgccacattccagttccaagaagacgctctagtgtggtgggacatggtgtccctgactcatgatgttactataatgacctgggaaaacttcctggaactgttcaatgcaaaatattacaatgacacagttagaagcgcgaaaaggaaagaattcactcagctgacatagaaagaaaatatgagtgttactgaaaacaagattggcaagattggcttcacggatcgtgccaactaattttaaagaaaattatctggacgggttgaatttgaaaataagacatgacttaatgatcactactgatgacaacaccacct

SEQ ID NO: 134711 - DNA, 1310 bp, Cannabis sativa
ttttcaatatcatcagtaattgctttggagaaaaagagtgtagggactgaataccagatgttttcccaacgctttgaaagaatgcatgttcgaacaacatcttcagttggaagattcgacagaatgtgctggatcaatacatcaggaagttccgaaattaggtcatcaccagcagttgctgttgttgttttagcccattttttcgcagaacgaagaatcatgctcttattatgccaatagtattctaattaagcataaaaacataccaagattagaattagattaaggcttttcacaacattgcttaaaagaatcaaaatataacataaaacccagttcagtaatataacagtactaagatattaaaaactcatcaattaattgaatcaaaattagaattagattgaggattttcacaacaatgcttaaaagaatcaaaaacataacataaaacccagtccagtaatataacagtaaatatagaaaagtcatcaattaattgaatcaaaattagcattagattgaggattttcacaacaatgcttaaaagaaacaaaaatataacataaaacccagtccagtaatataacagtactaagatattgagaagtaatcaattaattgaatcaaaattaataggataatttcagtagggtttgaaggaattgggtacatgaataaaaacatatatacatatacaatctatatagaaaaagggtaatacaatagagtgagtgagaaacagagtaaaaagagtaatgatcttcctcataagaaaattaatcaatgaattcagtaagttcaattatgtaaattaaaaaggtggagtgaatttaggttaatcgttacatgaatatgatgatgatgatgatgatttagggcttctgagtttcgatcgaagagaggagggaataataaatagtttatgttttttaatttttatttttaaaagtacctttttaaaaaaaataaaattaagaggccttttttcttttaatttaaatttatgattaatgtgacatgagggttttatttctattttataaaaaaaatgtaatcatgtaataatttttttaatttaaagttgttttttgattttttactttaataaaatatatttatcaattttataatattattatatatttatagaaaaagaatgcagtcgtttatataaggctaattagaatttttgttcctggaatttgatacttaccaaatcatgccttgaatttgttaaaaatgcttttgagattgttagatttaaggtattttgtctaatttcattcaattttactatttcagtgatt

SEQ ID NO: 134712 - DNA, 642 bp, Cannabis sativa
aaggtattggcacattcagattgaatatgaccatacccttcacactctctgtattgaataccttttttattgttaaaagaaaaaggtttagagggattgttaccagaaatgttaccttttggagattttgaaaaattctttttatttccaacagatttcatgtatctttggaaatttttcgtcaataaggccatttcatcatcaaaaataatatttttagaaacattaaacacaatacctttgcttttctcattcaaggaactttgcttactccttttcttgatctattgatttaactcaaaggttcttaaagagccatgagttcctcaacctttatttcgccaaagtcttttgcctcttccattgctagaaattttgtgtgaaacctatcaggaagcacatgaacaattttccgaaccaagactgattcatctaatttttctcccaagacaaaaaaatcattagaaatatcagatattctttcataaaaataagacaaagtttcagtttctgacattctcaattcatcaaatatagtttcaaacatggtaaaacgtgatcttttcacatcaacggtaccttcaaactaagtttgaaggatttcctacgcttcctttgcagattcacaagatgaaattaatt

SEQ ID NO: 134713 - DNA, 1856 bp, Cannabis sativa
agcatgatgatgaggatgaggattattcgatcaagaattatctacgctatatgtggtattatgaatatgtaacctcgactatgatttctagtgtagtacaaattactattggaacttattttacattatattaattagcgacttaaaatatatttctaaaatgattacataagtatataaaaatttagaatttttcttacattggaaacacaactgaataaatggctttaacttttgaatttttgatttacatatcactaagtactcaacccgacccaaatcttattttctttaaatagacatgtaactacattctatatttgttcatttatttttttttatataagctctcagttttaagttaattatttatttaattaaaataatagactaattaattttgaatatagctaagatttatcaatcttactcaaaatctaatttaggtcaatttttaaattcttattataaccatgtaattaaataaaatattatttttgattaataatataatataagtataatatagggttaatagcggcataagtacccaaaagtttaagtttgcaagcagcataaactcaatgtttatttttagcgacatagatacccaatttttctaaaactgtaattttcttctagtttcgtaagtacagatttcgttttgaatttattaaaaaaaatatttcgaagtaactgatactatatgtttctatttagacccaatgatttcgaattcgggtcttatgtgtgccctatttaaaataataacagagtcagtactgacaaaattagagaaaaattatagttttacaaactttaggtacttataccgctaaaaataaatattaagtttatgccgcttacaaacttaaaacttttagtacttatgcatatttaccccatatattataaaaatatgtgtgacataaatatcttatattttcttattcatacacttatatcatactaggcgaaagttacgtgcgcattgcacgtattcttagtcatatatattcaattttatttaacaagtgataaaatatgctgatttgttcaatttttatttttacattcaaatagtcgttctaacatgcttagaaaatgtttcagcagtaaaaaaattcaattaatttagtatgtctattgagcctttctctctgaatattttttgaactcatgaaccatttcctgcaccataattcttcaactgtaatagaaacatcacaccaaattgaatagtcaaaacaaaaatgatcatgataaaagtcccaccaaaactatcattaagcattgagaaaaaataagtacacaaatattgtataaatatatgtgactttccttatcaagaatgcaagaagctcatcacataatttcatatcacaatctgtcattattgcactgcaatttccacatgcttaacctagaagagtaccatatatagaggtcattgttaatttactctatatccaaaggaaaaaataaagtaagtaaatgaaaatcaggtacttgttttgtttagtagtatctacatcattgtctaagaattaaactgaacaagacaataataaacaaacttttgaccaattacatacatccatttatcaataaatcaacataatataattaacctacaaaaataaattagttagacattttatcatacaataaaatactttaatttgaaatcaagagaatcaaggcagcaaaattttatacaaaattgacagcaaaactccaaaaaaagaaaaaagaagatcaagagatcagaaaaataataacaataacttttgacccaaacaatccataatgaaaaatataaatgatctcataataataaaaattggaaatattat

SEQ ID NO: 134714 - DNA, 974 bp, Cannabis sativa
ccctgttataaaagttttataaaataacatgatatgatgacacctcaaaaacataaaaccaaaacacatgatagatacaaccccaaacaactcctggaaacttgacacgcaggctggtcgggtcaatatgtacattgctggaagagaccgtcatctcactgctgctctaactttctcttgccctaacttgcaccatagagcacctgtgagtcacataaactcagcaagaaaagtaatagaccggggtacattaaataactaattatacatttcattatcataaactgattataccataacattcaagccatattcatagaaataaatatgctcatacaattgcattgcctaattaggcaagcttgtgtcataatgtaatatcatatataatttcattgcacaacttaatcaggtgggaccaattacaccataacatttaacaataggtaatataaccaaccatatgcatagaaacagatatgctcatatatttgtattgcctaatcaggcaagcccgtgtcataatgcaatatcatatataatatcattgtaccaccgaatcaggtgagcccgattacaccataacattcaacaataagcaacatagccatccatatgtacatagaaatagatatgctcatatattttcattgcctaataaggcaagcccgtgtcataatgcaatatcatatatagtatcattgcaccacctaagtgagcctgccacaacttggcacaaatatattacatcgtctaatcatatgagcccatacgtacgcctagtacttatcatatgtcactgacgcctgtacctacgctgatacaaggaagaaacccaacaatggtttcaatctatgccataaccaggaaatttcttatggctgactccagtacctacacctaggatttccctcgtttccacaaaggatttcctgttccctagtttttggtcgccttctgctatcatttttgtg

SEQ ID NO: 134715 - DNA, 525 bp, Cannabis sativa
gtatagaatacgctattgaaaaaggctactattgaggtagtgtgacagcgtctccattagttacatatactcagaataaggttttttaacaatttgggcaatattcccttgctacattttcacgcacaaatgcttggtacaattttattaaaaaaaatctaataaacagtagttaatagtcttataaaattataacaaactttttgaattgcttaaaatatttttgatggctgagaattcttttgtaatttgtatgtttttattgcactagttctttagcttggtaaaaacaatatttgtatgtttatatgagtttgacttgttctcatgaacaaagataaagcaagcatgatattattttgttggcaaatatatcaaggtttattttctttataaaaaaaaatgtgactaattgttgatgagctttcttaaaattacttctatttttttttttttcattgttttcttagacaatatttttgctctacaatgttgattggtgtcctatgtttttttttttttttt

SEQ ID NO: 134716 - DNA, 704 bp, Cannabis sativa
acaatctccttagatcagttgataaaaaatcgcatcaacaacttagattcaagaaatataatgcaaatggatgagattcatgattatattgtggccttattttgtgcatgcatgaaacgtgttatttagatgaaataataatatataaaaatatatgtatataatgcatataaagattacattgagttgattacataggtactgtttagaaataaatcgaaatattgaatttcgataaataataatttttttaggtattatgaaaaatacactaccaacattaaacaattgcatttttaaatcattatattttactaaaaatccctacccatacaacaagtcaccaacaagttgcctatttttataatttttttttattaaaaaaattatttattgtattaagtatttttattcaaatagaaagatattattaatcattagattaagatctagaatcaaaaataaatcattaattgtggttaatttaatagaaggacatatgtatttaagtgatattagcggctaaaccgcctgaattttacattgtaacagttaaccacaaaaaccaaaattttggcggcataactacctaaacccttgttccgttttgctatgtatcccttcatccaaaaatcacagttaagtgtcacggtggactgtccacgtgtacacacttatacacgtgacaaatttttagtggtcca

SEQ ID NO: 134717 - DNA, 555 bp, Cannabis sativa
ctggcactagcacttatcacagcaagacacaaactcagaccatattttcaatgccaccctattattgtgttgacacaatatccactttgtagcatcttacacatgccaaagctttcaagaagactcaccaagtgggcagtagaactcagtgaatatgacatcacattctaaccaaggacaacaatcaaatctcaggtattagatgactttattgttgacttttccaatgacatgtaggtacaagtggaaaaagagttattgtgcttgaaagaataatctgactctaagtggaggttgttagtagatggctcaagtagcaatagaggatgtggcttaggcattgttctcacctcaccccaaggagatgtcattcaacaagcaatcaagtgtgacttcaaagaaacaaataataaaactgagtacgaagcgctccttgctgggctcgacctcaccaaagagatgaatatcaaagctcttgagatcacgtcagattcccaactcatattcaaccaattcaatggcacataccaagctaaacacttaaagatggtgacg

SEQ ID NO: 134718 - DNA, 1210 bp, Cannabis sativa
taagaacttttgagttaaatcaacaaatcaagaaaaagggtaagcaaagttccttgagtgagaaaagcaaaggtattgcgtttaatgtttctgaaaatgctgtttctgatgatgaaatggcctgttgacaaagaatttccaaaaatacatgaaatctgttggaaataaaaagtatttttcaaaaaatccaaaagctaacaattcctctaaaccctctatcactaaaaataaaaagggttttaatgttacttggagtaatgattttgaaagtagtgaagatgaaaaagaaaaggttgctttaacaagtattttgtcaagaaatttacaggaaaaacaaaaattcatttggttgaataataccttgaccgatgacaacaaggaagaagatggatccgactgatatgagtcagaaattgatgaaaactctatggctgaatcttacaaggtaatgtttggtaagtggttggaaatttgtgttgaaaatcgctccttggttaaatataataaagatttgtgtaacaacatcaaagatctggaagaaaaaattaaatgttgtgaatctgaattgatcttaaaagagtctgaaattatttctttaactaaggaacttgaaaacatgaaaaagattgtcaaaacgttaaatccaggttccaacatttttgaaaagattcaaaagtctggccaaactagtcatgctggtctaggttatgtttccactccatctgattccaataccaaatttgttaaatctgatattttggttttggacgaactgtctataccttgcagggttctattatttcagcaaaacactctactgatacagaaaagaatcaacacggtaagtttgacaatttcaaagggaatataagacgattcattcctatttaccatttttgtgggataaaaggtcacattcaacctaaatgtgtcactatgaacaatatgtttaagtctaatgacctttgaaataaacatgttttttaaaaacaaaaatgggttgtcaaaaataaatgtttggtaggttctttatgttttaaaattatttctgctaacatgtaatactttgacagtggttgttctagacacatgataggtggaaaagattatcttgacaacatcagaccaatgcagtgtggagaagttactttcggtaaaagtcttgttggaaaagtcatagggataggaactcttaattttgaagggcttc

SEQ ID NO: 134719 - DNA, 549 bp, Cannabis sativa
tagcctgtttgacaaatagtttttccagtggttactctgtatagctatttgactttctgttttcataaacttcaccccttatcaaaatccctgaagtaatgtgaagaaaaaaaatctcaaaattaataacaataatactaattttaatagtaataatattccttttgtggttaataataataataatgttaattagctagtgaaatatagtatttagaattttgtacaatgaaaagtaataagctctatttagaatcttgattatcctatcaagaaattatattgattttgtgctattttttgatgggagaaatgatgaaaagagaaaagtcagagaaaattgagttatctctttttaacaaagtcttaccgcctaaagagacttagcatgttcatagtaatcccaactctcttgcaggaagagttctttaggattgtactttccttgctcaaactttttggtggccaaagaaaactctagattctcatatttttttttagagtaattggcggtaaaattcttttatattttaatttttatactcttaa

SEQ ID NO: 134720 - DNA, 535 bp, Cannabis sativa
cgaactgagacttggactcgaacccgaacctagaccgagacccaaacccacacaataattgggacctggaccaagaatcaggatagggatctgagaaacaaaactaggacgaagacctagtaccgaccgtgacccgaacttgaacttaggacccagctcgtgactcggcactagaaatggaaccagattgggactcgagattgggatccggatctggacccagggcttggaaaaaaaccgttgtcagtgtctacatttgggacctagccctgacccgaaagttgacccaaacccacacccggaccttaacccagtcccaaacccaaaagttgacccgaacccgtatcctgttacacaaaatttgaaccaaaactggaagttgaccgggactagaactaggacttggacatggaatcataactgaaactggatcaagatccagaagcgtaagcgaaccaggacccggactccaaatccgacctagaccagaattgggagccggacccggatcccaacccaagcctggactcgggac

SEQ ID NO: 134721 - DNA, 2224 bp, Cannabis sativa
ataaaaggttgctagaatgcttgttattttagatgagttgactactctattcaatagatggtatctttgattctcgcctaaacggtatcagtttgttgaaaaccttggaaaataattaaaaatgtttattttggtatttttagaaacatgtttaccttattgttattttttgaacttgtgtatgaatttgaatgaaccaaatgatttatttctgtttattgatatttgtagttgtcaaaatggataacccacaccttgaacctctccttgaacatgcctttgctaatgaactctatattgttaaaatgcacgcttcctggtaagagcattaattcacacctaatagtcttcctcctgagtataatgcatttgttgtatcatgtatgatcaacaattttaactcatccaacataggtaaactgaatgcaaaattgcatgtttacgagcggacttttcttgcaaggaagcctccctccatatttgtagacatggaaggaagatagtaattgagtatgatgcttctgacattgttgcaaataatattggaacaatggatagtcgtactcttcaatgttcatattgtgataagaagggacatcaggaagaaagatgtcccagacttctagactatttgaacgaaggtaacgcttttgtttttgaatcatgtgttttagagaatgccaaatccttttggattgttgattcttgatcgactaaccatgtttgttcttcattgcagctgcttgaaacttgggattatttaaatccagggaagttaaagctcaaagttgggaatggcgaattggtgttggtccaagctaagggaaaagctcgcctcaagtttcaaaagaaatttttagttttagacaatgttttgtttattccgaattttagtagaaacttgattagtgtttcatgtttacaggcacagttttatcaactgaattttttgagttctatttgcactatttctcgtaatggatttaaattatgtgttgcttacatggaacaagggatttatgtttgagaccagatacgcaaattgcgcttaataataaacttttcaatgttgctaaagctagaaaccataaaagaaaagagatcgataataatgatgaaacatatctatggcacttacgactaggtcatataggctatgatagacttttcaggttaaccaaagatggtccattgaaaaatgtcgtctttggtgaattactagtttgtgaatcttgcctagaaggaaaactgactaagcgttatttctctgcaaatgtagagcgtgccaaatatcctcttgggttagtgcattcagatgtctgttaccctctaaatgtaaaagccagaggaggttatgagtactttgtcactttcattgatgatttctctagatatagttttctttacctaatgcaaaagaaatctgaaaagtatgaaaagtttcaagaatttcatgctttggctcaaaacaaactaggtaaaacattaaagatcttacgaactaatcggagttgagagtatatggatatgcaattcaaagatcatttaattgaacttggaattgaatcacagtatactacccatagcactccacagcaaaatagagttgcggaaagaagaaattgcatacttttagaaatggttagttctatgctaagctattcaactctctcaatgtccttctagggatatgcaatacagacggctaatgacattttaaatgttaatccatctaaagtagtccctaagacacctgtcgaactatggaatggttatatacccagtttacgccattatcggatttagggggccctgctcgtgtcttaagaaagaatgaaggcaaactagaagcgcgaatggaagtttgcttgtttgtcagaaattctaaagagactatgggtggactattttatagtcacaaggatactaaagtgtttgtttctacaaattctactttccttgaagatgactatattaaagacttcaagccgcaaaataaagtagtgttataagaaatactttcagatataactccttctaatgttccatcatcttttactcaagtagaagacaatcccacacccttagttgaaccaacgcaagttgttacaactgagaaatctaccacaaatgttcctgttcaaaaggtcatggctcctcctcgtagtgggagggtttctacaaaacccgctcgttatggcttgggtggtgaaatcaatatggt

SEQ ID NO: 134722 - DNA, 780 bp, Cannabis sativa
tttagcttaacatgaaataaaacaaattgtacaaattagaaattgtactttagatggtggtcacccacctaagtacctttcaattttgtccaaacctttagtcgtagcccgcccagtaggccattcacttaaaagtaaatgttctttcagtacttaatatggacatccgacctggtacttctattggtagtattttcttaaatgtttcccattccaatactgtggtactagaccaagtttcattttttcatcatacttactcgatttgtatgttcctgattcgagaactttgaccaccttatatggtccttcctagttagatccgagtacacctgccatactgtgtttggtgtttagaaatattcttctttggaccatatctcccacaaagaattttcaagccttcacttgtttattgaaatatcgagctactttttgttgatgggctatcaacttcaagtttgctacagtttgcttctcttcgatttcatcaagtgatttggccagggttacagtgatttgcttcttggttgtatgtcaatcttctgtgggattgtggctcgagctctacgggtagcatagcttcatatccatatgccatagcaaatggaatttgtctgttgccattttctgaattgtccggtacgaccatagaaattcaggaagctcctcaagccagtttcctttagcttcctcgagtcttttcattagtgtatcgtttaaggtcttgttgactgcttcaacttgaccattcgcttagggatgtgccactgcggagaa

SEQ ID NO: 134723 - DNA, 544 bp, Cannabis sativa
cctcgggttgggtcctcctagaacaggtagtccgagtgcttgggccaccctcaggatgggacctcctggagcaagtggtccatttagactgtgaattaaaaggcctcctggagcccattggctcttttctagaacggtgaggagtttcttcatgtggtgtgtcaacgttctttgtgttgtcagccatgaagaacattatttttttctatgtaaggagggttttatctaagctttttcacaaagactctcaatgaaagcaccaaactattaacgcagattttcgttaaccaaatatgagcctaaatgatgataaacttgcaaagaaaaataaaaatattaaagaaaaaagtaagaacacgacggtttttacttggttttgcagtcagaattctgcatagtccacgagtcaatcttattagatttctaatattgttttagggccttttttcttatgacatttttgtcccttttttcagtataacttgcctctatttataattacatagtcaggcagttaattgttaggttttgtaccctaaataaa

SEQ ID NO: 134724 - DNA, 596 bp, Cannabis sativa
ggtaaaataattcccaacaaggtgtgtgtgttatcaccagcttgttatcaaggaatagttgttcaatgctacgacaaccaaaatctcgacaaactttgtggtaattacactaaagtaaaattcaagtcgaaagacattttacactatgcacaaatgcaatggtttctattagagtgaagttatttaatcaagtgggaaaatattatattactctataatataatgtttgattgattaaataaaatattgtgttataaaattatttgctacaaatgagattttatttaatctagtgagggaatgttatattattttatataatataatttagattaaataattaagtgtgacacattattatttttgtcaaattgtagcatatattatggagttacaaaatgtgtgtagaatgatcacaaaatatgagttgtaaatcctttaatttgatgatcacttaaatatgtaactctcacctattttttattcttaaactagggaacaaagccgcgcttcgcgcgggttcgaccctagttttgcgaactttattttaatccttctcctgaagttactcgagacactgcgacatataattggcc

SEQ ID NO: 134725 - DNA, 509 bp, Cannabis sativa
tgttttaaacccatcaaaactcataattgattacatataaataattatataggactgtatcataattacggactacatttttctcagccatttcatcaaacacccaacacgcacaacatgctctacagtacagcaatattgttgcaaaaattatgccaaaaatgatagtaaaaaactttgcaatacagcaatagctacatttcacaagattatcaaatttttccttatcattagtagaaaaaggaaaacagtactcttttgaaatcatttttttttttttttttttctgtttggtaaaagtgtgaaataatattaatgtggaggaatttataaatggcagggtacaaacattttttttttcaattgattctaatttgtacatatatataactacatttaaattagggaaaaaaacaggaatattctaaaaagggaaaaatattacaacaatactgtgggccggcccaatgaacatttgtacagcccaaaaggaaaatattacaaaaata

SEQ ID NO: 134726 - DNA, 562 bp, Cannabis sativa
ctattcaccaagatcaacatcaaaatcaagaacatgcaactcacaacatcacaacccttttcatgctcttctaacaacaaaaatcagcaaactataattagaattgaagctgagaaaattaccttaaactcaacccaaaagcaagctcaaaattccacaattgcaaagcttcaattccacaccaacttcaagcaattctccaaacaaattttaaaaaatcaagagggtttgaaagagagaaagagggtcgggtagggagagagagagaacccagaatttttcatttacttccctaaaaaaatcaacttttaccaagtatagaaaataaaggtcaaatgaccatttttcccctaaggccaattaacatgcatactcatttttcaagggcaatattgccatttcacactcaaatatttccaaataaattttagattattacatatcaaataaaaattccaaataacgaaatcaacttacatttcgggcacgaacccggtttggcccgaaattcttggttgtaattataccgcgctaacctgtcagaacacacctgaaaagacaa

SEQ ID NO: 134727 - DNA, 614 bp, Cannabis sativa
aataactcattaaatgcgaaagtgacagagtatatttacaacttgttgactatgaagttttatgcgagataaagatatacaaacggttgcctcatacattaaccagaaaccatacgttagtagatgcacaaggctaggcatcaatctcgttaagcatgagtagacgtaagcgagatataatgactgtaaaaatacttagcatataatatacaatatacaaattaagtataacagtcaggtaaacccaagcatctaattgcgaggcgtccatcttgctataggaaggcatactccttatactttcatcaatcaacttcagacatctttagttgaggtttatagtcttgacgagtcagttatctcaaatagaagttgacattcaaatgatgtagattgttggagttcaccttgtcctcgagaactacgattttcagatggagcgttatgtcttccgcgaagaagtggaggtttacatattatcaacctcaaagagatagggaaaaactccagctcactatcaaggtcattggtgctaagttcctatcgagacatcccagaatgtaatggtttataacatgtttaatacacaattatcttgacccaataaaagcgga

SEQ ID NO: 134728 - DNA, 742 bp, Cannabis sativa
agttcatacacctgtaattgggcggaacatttaagctctgcaaatgtaacataggttgataaagataaaggagaaactaatttgtaatctcaaacaattgtgattcatccatttgggaaatatggaacatagattgataaagataaaggagaaactaatttgtttggtatattagaccaacaaaatcagcaagtagtagtatagtaccatgaatgtatgaaaactaagagaagaatttactatcaccaataatacaaaaaatgaggattatcaaacagaatcatcttatatataaacaaaattaacctgacattaaaaattacccaaatcccataagtaattggaagcttcaaaaggagttcatacacctgtaattgggcgaaacatttaagctctacaaatcattctcatttccacaacaaacacacacaaaaaaaataagcttctttatttgaaattagggtttttttatttgaatacgtacctcatccctgaactccaaaaactatagaagagtaataaagctattgcagatctaaaaactcgatttcaggaaagaaataccatagaacccacctcagtcgctcaaacccagtcgatttgttgatcgagcttctgggcacattcaagattgttactttctggattggaatttcatgggtcagtgagaatcgtttataggattggatttggagtggtatggtgattggggagatttgaatttctgccttcgatattgaga

SEQ ID NO: 134729 - DNA, 677 bp, Cannabis sativa
tttttttatttatttagaatttttattattacctcaagataaaaatttgtaacaaaaaataactatgtattatttgtataattttattatttatgtttgtattaatattttttttattaattattacaactatttgttttcttctattaaaaaaactatttatattctttgtatagtttttatttttttaatgttcgtatatagtcccaaatacaattgtttattgggttaaaattttagagtttagttatatattaatgtttatatatatatatatattaattttttgtattccattttcatattataaaattttcctaatgtgctctatctttttttattattaatctatataattaaacgagtaactcacatttacatttattattattattattactattattattattattggtgtaacttatgactacatctattataatctaatcatattaaataataataataataataaattgtatattattacaattaaattatatgcacagaactcatgtcttttcatatttttttataaatcttattatttattgttatataagatattcttattcttataaataatatatatgcatgaaatttattgaatcttttagtcttctaaaatttccaatacatatatattaaaaaatatatttataatttaaatttat

SEQ ID NO: 134730 - DNA, 877 bp, Cannabis sativa
ggcggtaatgatagtatcttgtacctgaaccggtggctcactttttctaagtaatggggaagaggaccgaaacatgccactgaaaaactctactgagacaaagatgggctgtcaagaacgtagaggaggtaggatgggcagttggtcagatctagtatggatcgtacatggacggtagttggagtcggcggctctcttagggttccctcatctgggatccctggggaagaggatcaagttggcccttgcgaacagcttgatgcactatctcccttcaaccctttgagcgaaatgcggcaaaaggaaggaaaatccatggaccgaccccatcgtctccaccccgtaggaactacgagatcaccccaaggacgccttcggcatccaggggtcgcggaccgaccatagaaccctgttcaataagtggaacgctttagctgtccgctttcaggttgggcagtaagggtcggagaagggcaatcactcattcttaaaaccagcattcttaagaccaaagagtcgggtggaaaagggggggaaagctctccgttcctggttatcctgtagctagatcctccggaaccacaagaatccttagttagaatgggattccaactcagcaccttttgagattttgagaagagttgctctttggagagcacagtacgatgaaagttgtaagctgtgttcgggggggagttattgtctatcgttggcctctatggtagaatcagtcgggggcctgagaggcagtggtttaccctgtggcggatgtcagcggttcgagtccgcttatctccaactcgtgaacttagccgatacaaagctatatgatagcaccctatttttccgattcggcagttcgatctatgctagattt

SEQ ID NO: 134731 - DNA, 507 bp, Cannabis sativa
  modified_base (437)..(466): a, c, t, g, unknown or other
agtccgaaaggcatgactaggtagcagtatacccccttatcggtcttgaagctagtacattcttggtttgcaatgtgcatcttgatctggttgtagccggcataggcgtccatgaaggacaatagcttgaattcagaggtagcatccaccatttggtcgatccttggtagggggaagcagtcttttgggcatgccttggttagatcggtaaattctatacatacccaccatgtcccatttggtttaggcaccatcaccggattggccaaccattcgggataatacacatcccggatcatgccacttgttagtagtttgtccacctgtctctccagggcctttgcctttactgggtcgaggggacgccgcttctgtgaactggtggcatatccgggttaacgttgtggacaaggtttattgttgggttttgtgccctnnnnnnnnnnnnnnnnnnnnnnnnnnnnnntacttattaataaagatcagaattaacattttatgttgcat

SEQ ID NO: 134732 - DNA, 2249 bp, Cannabis sativa
acgtactcgtgtataagtgttaggttatttttagcctaagtttcgggtcactttttatagttgtttttcttctttacttttggaatagttttacgcttgtttttctctatttcaggtttccagatttttagatgaaaatttgtcaaatatcgaaaaatggtggcctataaaatagagaaaattttgcaggaaaataaagctgaaacttcaagcctaaatttaactatgttatgtttagattttggaaaaagtgaaaacatagaagttttagatctctttttttagctttccaacgcattcagaatcaactcgtgtgcattttattgagagaggtcaaagtagaaaaaaaaacgtgttgtcgtcgtaacgaggtttgtggtggtcgcgacgagggactacaaaaacaccattttttcacttttctacagccgtcgcaacgaggctattggccaccgtggagtcggctctgtacgagtcaaggagaactacatcttttcccaattttaggccaaaaaacactattttaatgaaagggggttgtgatttttgatggattatttagaattagtgacctagaagcaaaggagagacttcaagagcaacgtggaggcaatccagaatgattatgccaattagttcttctcttctcttaatctttctatgctattttctattttgattttaattttagatttgttaatggagatgatgaactaaactcatatttggggagatgatgaatgctctgtacgagtcaaggagaacttcgtcttttctcaattttaggccgaaaaacactattttaatgaaaggggtttgtgatttttttgatggattattcagaattagagacctagaagcaaaggagagacttcaagagcaacgtggaggcaatccagaatgattctgccaattagttcttctcttctctttatctttctatgctattttctattttgattttaattttagatttgatgaatgttgattgacattatttcttgagttaacgataattgttatttcttatttcttgattgtaaatttatctatatttgtacttaattccatatttgagattgatcaccttaggcatgttttatgatcccaattcaaaatctaaaaagtgacttttaggaatgctaaaattggataaacttggtttttatgtgaaacaaaagtatttgcatagcctttgtgacatttagattattgtttaatgcaaattatatgttagtccatcttagagatgattatataatatgtgatttaggacctaaaagatctgaaaagagttaggttaatttttatagtctgtcattcactttaagaaagaagaatagtatttagcattaacaattggataattgaagcaacaaaatttgtttccctaatttctcatccttgattatacacttttattgcttaatttgattttcttgttaatccttctttttactttcatcaaaattattatttaccaaatagaaatacaagtcataatttagtggtagtcagttcaaccacccgtgggattgacctcacctgtgtgagtactacttgattacgtgcacttgtgtagctgtttataattttgcgtaacaagtttttggcaccattcctgggcaattatttaaaaattgatattacagaaattagactaaattctgctttggtttttcttccttacttcttgctaactattttgtcttaatttttcctatcctatgtcaggtgcctttagtttatgcgacgtcaaggagctagttcaagagtgcctgttgatcctgagattgagaagacctgtagacaaaatagaaggaacaagaggttagaaggagttgtgtaaagaccgcctaagattaatattttggattattgaataattagggtttatgcataagatttaattaatatttatgaaatgaatattttagaaatacatttaatatcatatatgtttattatgctatttcatgtaaattattcaatttatatgtttgtgttcggaagctgtggaaagcgacgtcaggcctttagagagtcatattttatatgacttagaatataaaatattcaatttcatgtaaattattatgctattcaatttcatgacttataatataaattattatgctatttcatgtaaattgttcaatttatatgtttgtgttcggaagctgtggaaagcgacgtcaggcctttagagagtcatattttatatgacttagaatattattatcggggta

SEQ ID NO: 134733 - DNA, 583 bp, Cannabis sativa
actttatggcatcggtagcaactccgacgacttttttgacaccgatagttacttcaacgacttttccggtaccgatagcaaaatctgaaaaattcgtcagaattggcattgtcactggaattggcattggtgatttttctggtaatttttctagcgacaatgccaatttcagtgacttttcggtgctagcagaaatttcggcgactttcctaatggcgtcaacaactccaacgatttttctggtgccgacaacaaactccggtgcctttttcagtactggtgacaattttggcgatcactgtagtttcatttgttttttttttttaaaaaaaaaaaaatatgatgggaattttaatatctttcatggtaattcaatctcatatatgttaagtttttattttaaataacttattttttctatttaagtttccttaccatatttatctaaactagctttattttttttccatatttatggaattacccctactatatattatagtcagggcagaccttgagaatatatggacctaaggcaaatttgattttggcgccctctaaaatatatataaaaaaatagggt

SEQ ID NO: 134734 - DNA, 767 bp, Cannabis sativa
attgattgtaaaagaaagatggtaacttttcagcctgagggcgaggatccctttgtatttgtaggtaagatgcagggatcctggattcccttaatttcatcacttaaggcaagatattttttgtgtgaggggtgcattggtttcttagcaaatgttgtggatattactagggaaccactagcgggaccggagcatgtcccagtggttcgagaatttctagatgtgttcccagaagagttgccggtgttaccaccaaaacgtgaaattgattttgggattgatctaataccaggagcagagcctgtatcgaaagctccctacaggatggtacctgcggagttgaaagagttaaaagttcaattacaggggatgatggatttaaaagtcactagacctagtacttcaccttcgggtgcaccagttttgttcgtgaaaaagaaagatggaactttacgaatgtgcattgattaccgggagtaaaacaagttgacactaaaaaataagtatcctttgccaaggatagatgacttatttgatcagcttcaggggaaaaccgtcttctttaagattgatctttgatctagttatcaccagttgaggattcgagaagaagatattcccaagacagcttttcggatccggtatggacactatgaacttttggtgatgtccttcggattaacaaatgccccggcagcatttatggacttgatgaaccgagtgttcaaagattttctggatgattttgttattgtctttatcgatga

SEQ ID NO: 134735 - DNA, 599 bp, Cannabis sativa
  modified_base (463)..(467): a, c, t, g, unknown or other
tgttaatcctaaacagccagcaaacgtgggtcatggtgtaacgactcctatggatgaaatcgcacctggtgtgcaagagactgggaataacagttcagcacccaaccagggcatccataacacagctgtttcgcctgctaccaacactcaaacgaccattggagatgatactgagatccaaaatctccgtgctggtcttggactcatgcagggtcataccaacaccctacatcatgatcaggaagaacttcgcgctgcgctaaatctcgcgttcgaggaacaaagacgcatgtttgccgagtggagagacaaagagatggaagcattaagggctcatcatacaaagattgaaaatcgtagtcggcaagctattgtggtgatacgaaaagcctaccaaactgtcaggcagcaacccccgagtgtcatccccctgggtgagacagacgaagatccagcgatgaannnnncccagactataaatggtcagccgcaaaatccccagtcacaagttttgcttgtgggcctagtggtaggcgggaagaccttgtctagtaattcatcaagagaagtcatagctgatagttccaaccaagctaacg

SEQ ID NO: 134736 - DNA, 568 bp, Cannabis sativa
tgcttgacttttcctctaatattttcttgtgttaaactctatctctctttttttttgtttatgcggtacaggggtactcgcaccttgtacttagacaaatttatattttcgtttattccgaactactatatatcctgtcggggatatttgttttctgtattttcgcagtacactggtactcgcgtttattatatctataatattttgatcatgacttttattacaacttggtgtaataagtggaaaatttcaaaaatttcaatcttgaaaaaatttcctttatacaatcaatagtacatcatggtatacaccccctatacttaggatttttttataaaaaatgactaagtataaatacaaggcgaatacaaattagacaatgcgagtactattgataatagaattttaggctttcgccattccaagcccgtggaatcgtagtaccatcgagttctgcgagttatgtagcgtcaccaatctttctgcgatgagatatggtccctcccaattattcccaaagaccccatgcgctgggttcttggtattcgacattactcttcgaaggacc

SEQ ID NO: 134737 - DNA, 740 bp, Cannabis sativa
  modified_base (73)..(81): a, c, t, g, unknown or other
tgttccttgtcctagtcgtactttggttctagttccatttgcgattctgagtttgagttcgggtcggagttcnnnnnnnnntctgagtttgggttcgggtccggatttctatctaggcccagatcagggtttggttgtgggttcccctcctgggtcttggtctaggttcagtccgagtcccaagttccaataccgatttgagttttgattcaattctgggtctaagtccttggttttgatcctggtctgggttcttgtttgggtctgagtccgggtctagctttgggtttgattctaggtgtgggtttgagttcgggtccgagtctatttctggatttgtgtctaggtgtggatactgatctaggtctaggttcgggtcgaggtccaagttcgggtcccaagaacgggtcaaagtttgggtctgggtcaagatctctgcccagatctaggtcaagcatttcgatcccagtttggttcttggttcgctttcaggttcgtatgaggatccctatctagatacaagtcagtgtttgggatccggccccagatttaggtccatttccgggtctcagttccggtctaggtacacgaccgtgtccaggcccgagttccagtctcagtttgggtcggaggctaggtctgtgttcggttctaggtttgggtcagggtcctcgtcacggttctagtcttgtactagggttttggttcggcgattcttgttcaggttctaattttgggtc

SEQ ID NO: 134738 - DNA, 522 bp, Cannabis sativa
tgatttagttcatctattccatgaccggaacagggggggatacacgttacaccacgattttgaatcagaagagagatttcaagaaatggcagatctattcactctatcaataaccgagccggatctggtgtatcataagggatttgccctttctattgattcctacagattggatcaaaaacaattcttgaatgaggtattcaactccagggatgaatcgaaaaagaaatatttattggttctacctcctattttttatgaagaaaatgaatctttttatcgaaggatcagaaaaaaatgggtccggacctcctgcgggaatgatttggaagatccaaaaccaaaaataatggtatttgctagcaacaacataatggaggcagttaatcaatatagattgatccgaaatctgattcaaatccaatatagcacctatgggtacataagaaatgtattgaatcgattctttttaatgaatagatccgatcgcaacttcgaatatgtaattcaaagggatcaaat

SEQ ID NO: 134739 - DNA, 831 bp, Cannabis sativa
tctatcattgaaactttttcttgaatagatgacccactttgagtactattaacttctggaggatttttgatcttgacttcatcagaatagtgactaatcaactttgacaaacaactcttcactaaaaaagtgatggcatgaacttcatcctcactatatagtttcttcaaacaacatgttacaaatttcaacttgtacctaggatcaagaataatagccacataaagaagcatgttttgtttttcaatattgccccaatacttgtcaaatttgatcttcatcttagtagccatatcctttaagattgatttgtcactagaacaccatttgattagttttccacgaacagaacacacttcatggaaatatgaattcgaagtaacaaataaagaggcactaaactttagggtggcttcataaaatactctcaaaaacctacaaaaagtgacacaattttcccaatccttagaattcggtggccccactaatgttctcccattcctatcttcatcactaaaatattgcatataatacacatcttcttcttctaacaatttgaaagcatcgacatattttaatgcacgatctaacatcataaaagttgagttccaccttgttgccacatccaagcaaacaagagccctctcctctttagaagtattcttcacacaactttgaaatcttgccaacctagaaggagaagctctaacatatctaactgcattacgaacagctgcaatagaatcatccatatctttcaatccatcactgacaattaaattaagaatatgagctgaacacctcatatgtaaaaattctccatcacaaaca

SEQ ID NO: 134740 - DNA, 809 bp, Cannabis sativa
cttttatcacgtcaaggtaatcgtgtattaaacacgttataaatcataatattctgggatgtctcgatggaaacacaacatcaataatcttgatagcaagctagaacattcccacatctttttcgaggttaataatataagtcttgtcgtttctgcgctcgaagacataatgctccatctgacaaccgcaactcttggcgacaaggtgaacttcaacagttaacatcatttggatgtcaacttctatctgagagaactgccttgatgagactatgaatctcattgaaagatctctggatcttattagtgaaggtaccaaaagcgtgccttcctatagcgagatggacgcctcgctattagttgttcaggtttgcccgactattacacttgtttgtatactgtgtattatatgctaattgtcttagcagtcattatatctcgcttacgtcccttcatgcataacgaggttggtgcctcgccttacacattcgagggcatatgatttctcgttaaggcacgtgacaatagtttgtatacctttatctcgcctaagaccttttggtcagcaagttgtaaatatactctattacttctgcattaatgagttattccattttcaaatgtgattaccgttacatacattgatttatattcttcccaatttgacacgtgtgctcgtttgaaatgatggttgaatttcgggtataacaattgccccttaaaaagttcaagtgctttttaaatgaccacagagtgtacatttgtcataatccctttttcaagatcacgcatgtccttaattttaacgg

SEQ ID NO: 134741 - DNA, 1008 bp, Cannabis sativa
  modified_base (464)..(470): a, c, t, g, unknown or other
  modified_base (670)..(673): a, c, t, g, unknown or other
atacatatgatcctatgaaggaaggaaaataccaaaatagcctcaatccaacaacatggacccactgcctacagtattttcgtaccattaactgccaagaacagtgaagtctgttgtaccttttcgtactctaactaacacctacagtactatgattgtaccattttcatacctagctattttttaattaaaaaacaaactcacaaccggtaaccacacctacaacaaccggttaccacctaaatttaaaaaattaaaaaacatttaaaggtaccatgggacccacctaccgtacaacggattgcaatccgtgttttgcacatatgggcacaaaatcggctgcctatatatatgggtgactaatcaatggttacatttttattgtaactatatggttacatttttttttacctgtaatagcaggttacaaataagtaaaaattctatttttagaattaattaannnnnnntaactattttttaagtaattaaataaatattaaacaagaccttttttagcaattaaaatttataaataattttttttatttatatataaatcctttggcttaattattttaacaattaatccatttaattataatatttacattttttttacaaaaattaaacttatttttatataaattaaaattttgtccttagaatnnnnttttttacaagaacacaccctgcttcttttttgcaggattatcatactcttgccgtgcatggttgcatgatagtctttgttgaaaatgtctcaattgcattgcatttatattcgtttgtctttatgtaatgtgtggaattataacttcaaaatcttgatttggatctcgagagtcaaattaaaaacaagccagcttatttcaacttcgctagctttatcatgctgcgtgctgattacgtccccccaaacaaccaaatttgtttgactacggggtatttactatattatttatgattacaacttgtaaagttgatgtgcgatcctttcaggttaga

SEQ ID NO: 134742 - DNA, 1093 bp, Cannabis sativa
tttatgatgaagaggatgggcttcaacagaatgattcggagttcttgcagagtggaaccatgcagtaccagacacgagatagatcttccaaagaacaaggcttttttcgaataagccaattcatttgggaccctgcagatccactctttttcctattcaaagatcagccctttgtctctgtgttttcacatcgagaattctttgcagatgaagagatgtcaaaggggcttcttacttcccaaacagatcttcctacatctatatataaacgctggtttatcaagaatacgcaagaaaagtacttcgaattgttgatttatcgccagagatggcttagaaccaatagttcattatctaatggatttttccgttctaatactccatctgagagttatcagtatttatcaaagctgttcctatctaacggaacgctattggatcaaatgacaaagacattgttgagaaaaagatggcttttcccggatgaaatggttgttgctatctgctacaataacgaatcattggtttaactgaataactaaataaaatagatagacatttctcttcgtctcaggtcgacggatcttctcaattgaaagatcccctatatggataatacacattccagttgaccgactaattctaattgttttgttccgaagcaaagatatccacggagcggttcgtcctattcagatattcacgaccaagaatctctttcggataggccctgaaaggagaagggaagctggaatgccaacaggcgtctattattgaattcacccgacccgatagtacccattttgggaacgtccagcgccaaagtcactgaatgggtaagtcgccaatccctaaaacggactatgtaatgtactttatctgctgggttgggcattttaccagaggtttctattgtatcgatctacccttgtgtgattcctgttgaagcatatactcggggggtgggtgcagggcggacgatttcaaagcggactccccattcattagatagagaagatcaccaagatttcgtgatccgctgccgaacttattccaattcaatgagcattctcaatattcaatattatgcctt

SEQ ID NO: 134743 - DNA, 1627 bp, Cannabis sativa
aatcctgtttgattaaaattcaggaacattaatagacatagagaaagatgatgatgacagtttcaaatatgcatttgttgcattgaatgctgctataaaaggttggccaaactgcaaaccaatcatcgtggtagacggtacattcctaaaggccgcgtatggaggcacgttgctcactgccaacacacaagatgcagaatctaaaatttttccactagcatactgcatagttgattctgagaacgataaatcgtgggagtggttcttaaaaaaaataagagaagcattcggggttcgagaatgtcaatgcctaatatcagacagacatgaaagcatcatcaaagcaactaggaaagtgttccctgaaataacacatggctactgcatcttccacctcttgtcgaacctcaaaacaaaattcaagaaaaatgcaaagcatttcagagtgccattctttgcagctgcaaaagcttacacagaaatggagtttgaattccatatgagggagctagacaacttggataagcgcataagaccgtacctggagaaaattggccatgaaaaatggtcaaggtatcattcagaaaacaacaggtgaaaactaataagaaggataaaattaatgatatgttcacctatttatagcgttgtatttgcgttgtttttgcgttgcgtttgagtttttttccaaaagtagaactatgacagaaactgtccaaattgtaggtactctaccatgacatcaaacatagctgaggcactgaactcagcaaatttagcagcaagggaaacaccagtgacaacattaatggagtgcttgagggcacaaatgcaagagtggacatacaataatagaaaggaggcacaaaaatgcacaacaaggctgacaccatcatctgagaaaaaactcatagggaactatgtacagtcattgcgactaacagtaagttcagattatcgttcgcataaagtaaaattaaaacagttgtgtttgcatagttttttggttgttttaaagttggtttaaaacatgcaggtgaaaccagcaaaccagaacctgtttgaggtgatagatgaagacagaacaagaatagtaaacttgaaggagaagacgtgcacatgcaatagatttcaaaaagatgaaatgccatgtaaccatgcagtcgccgtcatgaaggacttgaacataaacacatacaactactgtgcacaatactacacatcaaaagcatggctgcaaacatatgaagaaacagtatacccagttggaaacgtaagagaatgggaacttccagatttttttgaagaaatcatagtgttgcctccaaaggagagaatcaagtctggaaggccgaggaaaagaagaatggcagcagcttgggaaacaaagaaacaaaacaagtgtggcaagtgtggacaaaagggacataacaaaaagacctgcagaagaattacagcatagaagtggaaacaactacacatcaaccaaaaaacaactatattaaaacatttagaaaacacatactgcatattacgattggttgttacatacatttttttattgtgattttttatgtggagagatattgataatagggaattggtattattatcattaatatacaaa

SEQ ID NO: 134744 - DNA, 525 bp, Cannabis sativa
attttttttttttaattttttttatttcaaatcatatttttaaaagatatatctgtcaaattattaaagataaattatttttatattataacaaaaaaaattatgtgaaattttattttagaaaaattatgcatgattaaaaaaattatgaaaataaaattaaaataagtgtgaaattaacacaaaataatatgagaaaaaaattaaaaaaattaagagtagtttttaaaaatcattttaattgttttaaatagtagggtatttttataattttgtaaagtgcaataatttctcatacaaaccaaacagagtcaattgttcatgctcttctcacatgcccttttgctatgtcatgctggaacattcttggtatcacttatgatacgaaccatccatactcttttggtggttggtttgacaaagtgcttatggcattagatgaggatcttgtctcacgggcagcaatgctctgttgggcaatttggaaggcccgtaaccttattgtatggaagaataaagtatcct

SEQ ID NO: 134745 - DNA, 2471 bp, Cannabis sativa
caaacccagactcggaccaaaactcaaccccaacccgtaccccgtgacttgaaactggaaccaaaactagaatcggatggggacccaagaaaaggaccaggactaagaccttgaccaagacccaaaactttatccggaccaggacccgaactcggacacagacccaccctatgattgggtccaaaacctgaatccaaacccaaactgggacttgggacccgaacccagacctgaactcagacccaaacattgaacatgactcgggtcctagaacttggatcgtgacccagaactggaccctagtcttggtcctacccaaacccaaaccgggacctaggacatgaatcgaaaccagactcggacctaaaccaaaacacgaacctagacccagaataggactcggacctagacccacacccaaaccttaaatcataccctatgacccaaaatgtgaactggaactagaagaagacccttaaaccctaaatcctaaactctgtacacttacccttaaaccctaagccctaaaccctaaacattaaatccctaaacactaacccaaaaccataaacccaaaaccctaacatggacatgggcctagacccatacccataccgagatcggaacccaggacctagacccaaacataaatatagacccgaacctagacccagagtcatgacttgaacctggatccaaacacagaccagaacctggttcgagacctagaccttgactgggacccagatcgggaccccgacttggaccagaatagggacctagactcagatcgcgacccggtcccaaactcaaacttgaacccgtactgggacctagattcagacccaaactcgggatccaaacgggaacctgaactaggacctacaccgagacctagatgggggacctgggccccgaacccgaacctagacccagacctagaccaaggattcagacctagatatgagacttggacccgatactgggccttggaacaggaactaagacccaaaactcgaccctcgactcgagacacaggacccgaccctggacccagaacccaagacctgactacggtgacataaccccaaacacggacccaaacccaaacttaggacccagcgctagacctagggtcgaattggaaaaagactgagatccaagacaaagatccgaatcggaacctgaggcttcgacctaacctgtactcagtgtttgaatccatgacccatacccggatccatacccagacctagacccagacccaaactgggatccagacctgatcccgaacccgaaattggaatcgaaccaagcctaggactagaacccagacctggcacagtaacatgacccaaacctaaacccaaactcagaccagaacccataccgggacttggacctagaccgggacctgcgacttaggacgtaaacagagaccgagaccttgacccaaccgggactcgaatctagacctagacccaaacaaaaaaactggggccggacccaagacctaagaaccagactcagaatagggacccgaacctcagactcgcactaggactgggacccaaactgggaccataacccaaactgggacatggactcagatcgggactcgagacccgaacctgaaccggaacacgaacatggacccggaccaggacctaggacttgaacatagattggggacccagaccttggaattgggcccacaaactaggaacagaactgtggcctcagaacttggatcgagatccatgacctgacctcgaaccgagacccacactcgggaaccaaaatcaaaacttgaactggagccggactgggatcttggaataggaccgagacctagacgcggacctaaacccggcactggacccaaccgcgaaccctaaccgagaccgaaacctagacctgaagaatatcgccctagacaaaaattaggacccccgaacctagacacccaaactcgacctgaacccataccctgtgacttgaaactagaaccgaaaccagaagcggatcaggacttaggaacaagaccaggacctggacccatagcttagactataaccggaccaggacccacactcagacacaaacccgaatccaaacccgaacagggatgcgggaccaaaaccaagacctaaacttagacccgaacatggaacaggactcgggacccaaaattgggatcgagaccaagaattgcatgcaagtctcggtctcggacctagactaagacccagatcgcgacctgggacatgaaccgaaaccagactgtgacccgtgattaggattcagatcttgtcctgggattcggaaaccagggcttggacaagacccatagtaggtgtccttatttgggactcagagaaggacccgaagctggaccaggacatggacccaaacccagacctgggacccaaaactgaaacttgaaccagaatgtgaccaggaccctagaa

SEQ ID NO: 134746 - DNA, 817 bp, Cannabis sativa
tatatatgtatacacatttatataatatatatctatcagcactctttttcgtatacttcttttacttttactttttatttttttttcttttcactattttttaatccaaattctccatctatctctactcccattaatttatattttccctctatatttttatactttttttgtttggttaaagtttaggtagtaactattaattcttaatgtataataagcagtagcagtatcatcaatacagaacatcaagacttcaattttcaattggtattgtcaatattctctctattcttatttttccatttctttatatacatatatatatatatatatatgtatatatcattcatcaaaaatatttcttcataatttagaggtatactaattttttttatatccacaacttcaccgtttcgatgctatttttgatgatcccaagctccttgaaaaccattacaacaccgaacatactcttcgtaagagttttgttttaacaaattaagtactctttatatttattttaatcttttaatttattcttttttttacaaataatttaacattttatgtggcatgatgaatttagagttttatttttttctttaaacattgatttattacttttttttttagagttttctatatagatttattattttttaaataaatatatatttttaaaaacgtatacataaaaataagtttaaaattatttaatatactgattttattgttcaattaatatttatataataattatttgataaattgagattttattgttcaattaagatctatatatctatatatatat

SEQ ID NO: 134747 - DNA, 554 bp, Cannabis sativa
ataataccattgaaaaagaaaattttgattctgattctgatcaatctgacatctgtgaggagtccctggctgagtcttacaaggttatgtatgaaaagtgtatacaggtaaattctaaaaatagatcattgtcaaaaaataaataaacaattgtctcatcaaactgaatctcttgaattgaaaattaaagaatatgagattgatttttgtttaaaagatggggaaattattctattaaagaaggaacttgaaaattttaagaaaaatattcaaatgcttaaccccagatcttctatttttgaggaagttcagaatgtaggtcaaagaggctttgctggtcttggatcaaatggtactaaaagttctggaaaaataaaatttgtaaaatctagtgttccagtgaatttacctactgctgcaaatttaagatctgctgctacaaaaatttcatctgcagaagcaaagtctccagtaagttcaaaaaggataagatctcaggtaagaaggtttgttccaatttgtcatttttttggtattaatgggcatattcgacc

SEQ ID NO: 134748 - DNA, 762 bp, Cannabis sativa
gaacccagaccaggacccaaaccctgacccagacctagactcgagacccaaaactggaacctaaacaagaactgtcggaccaggaccctagaaaaagacttggaccatgacgaagacccatacccaaacctagaaccaaactcagacctagccctagacccaaactaagactggaactcgggcttggagacagtcgtgtagctagaccggaccgataccaggagttggacctaaatttgggattcgatcccaaacatagacttaaacctagaaagggatcctcataagaacctcaacttggacccaaaccaaaacccggattgaatgaaacttgggaccaagatcttgtccgtccgagatcttgacccaaacccaaacctagacccacacttgggacccgaacttggaccttgacctgaacctagatccagattgggattcagacctagaacccagacctagactcggaccaaaattcataccccgacacagacccaaaatagatcctgaaccaagacacagaatccgactgtgggtcagtatttcagtctgggtccgagtccctatatagttttgggtctgggtccaagtccttttcttggtcatgttcgcttctggtttcagttctagtttcaactcatggggtacgggtcgagtgcaagcattagtcccggatcccaagtcttgaggtgggtcttaggttcaagtttgggtctgggtcaggtcccaaatctcgatccaagttttggtcccagtttgggg

SEQ ID NO: 134749 - DNA, 931 bp, Cannabis sativa
  modified_base (383)..(398): a, c, t, g, unknown or other
  modified_base (852)..(853): a, c, t, g, unknown or other
aatcagtttactgtttttaaaattgaaaaagtgaaaaaatatgttctataaaactgtttttacttttcaatttttaattgagaatctaaattttaataacaataaaaaatcactttcaatatttttttaaacagttttttttaatcaatattttggacttcgataagaactggacccaatccccccacgaccctggcgctgaacccgacctctaacctaaacccgaattcggtcctggacctaggcccgacgtaaataaaattaaaaaatgaaaatgaaaacgaactttatagaacacacttttattttttgttttcaaaattgaaaaacaaaagtggttaccaaacacatttttatttttcaaaaacaaaaattttactttnnnnnnnnnnnnnnnnaattagaaaacaaaagtgttatcaaatggcacctaagtatgtgatttgattatagaatttctcctcgcttttatttttaaagcttgttgtgcctccttagaggttttgtgctatcttgggtggtttttggagccaattaaagttattgtaccatatttcaaatggttttgtattaatattagggattttttcataaatatacgtaaaatacaaaataattacaaaaataacttaacaaatctcaattacaataatatcttgccacgtcattaaaaaataccttaattctaaaataatatgccagaaactaaactaatcccaaaattcttctttttttttttttttttattttattttcctacgtttcacaagtaacattttggttgcttatgatgttgataataaaccaacaagtaaatttttcacaaaaaatatcatttttatattatataanntgagatacattttggttacctttaaaacttccatgtatacattttaataatcaactaattatttaggttatattaata

SEQ ID NO: 134750 - DNA, 958 bp, Cannabis sativa
aaacatcactcttgcctaagaaaatacagtataatcttaaattttaaccgttaattcataaaataatgtgatattaatatagtagtgtatttatttaaatttatataacaaaataaataaaataagatttcttcataaaataagaaaaaaaaatacatgaattagagttctaaaattcaaccaagctaaaacctaactttaaatttaacacaaaaaagaatgaacaaaaatctcaatttatattctatttgttttacactaattgaagtagagaatgatgctcatgaatatgtatatgttatgtgggtatatatacatatataatatgatatatttatataaattgaaaaatatatataataaaacttacgggaatggtgaagggttgaggggtgcggtgtgtaggtgggtattttggtcatttactttatttgtttaaaaaataaaattattttataagaagattatttagcaaaagtgatttcataagaagattatttagctcaattttcctatattttaaggaacatattaagtattgtcaaaaatttaaggaataaaattactagttattcttagataaatgctatgttcagtgtaattttatcaaaaaaaaaaaaatgctgattcagatcaagacaaaaagatgctgattttaactttatcctggaaaacctgactaagaaactccatggttggaaggccaagacgctatcgaaagcggggcgagctactctaataaagtcagtgggtttatctttacctctgtacgctatgaaaactacaaagttatccaatcgccttgattgatggtttggtgcagatggtggggctcggagaaggggaaccacgggttgtacctaaaagcctgggataaactttgccttcccaagtcgttaggaggcttaggattccgaaaatccaaagaaatgaatcaggctttccttgctaaatgggg

SEQ ID NO: 134751 - DNA, 1073 bp, Cannabis sativa
attctgttattatattttctgcaactcattaattcatttctggtgtgttgattattgtttgtttgctggctgaggttgttgtctaacacaacaaatggtatcagagctaggattcaagagaaggatcggctaagcaacaatcaagaaacctgcagaatttgacagagaagaaaaagtgttttgattactgttttgaattacagcagcaagaacctcaagattcagattgaaagtgaccaagaaagatgtctacaacaaagatagacattgagaagttcaatggcaagaatgacttctatttgtggagagaaaagatgaaagctcatcttggaaacatgggattagatgaagctcttaagggagaagacaaaatgtctaagacattggagaaatccaagaaggaagagatcctgaaaaaggcaagaaacactatagtgttgagccttgaagatgagattttgagaaaagtagttagagagaagacagtgctgcaatgtgggaaaagcttgaacaaacctacatgacaaaaactctacccagcagggtttatttgaaacaaaaattctatggttttaaaatggatgaaggtaaatctattgatgataatcttaatgaattcactaaacttctttctgatctttgcagtttaaatgtggaaattgaggaggaggatcaagcaatttatcttctcaattcaactacctcagcaatatgaacaatttcagagatacaattttatataaaggacacattggtgatggatgaaatcgttggtgccatatattcaaaggaactatctttgaagaacaatgggaaactatcaagattgaatggtgaagtgaatttcacaagaggaagacaaccacaaagatcttacaatcagaataagaacaacaaccattcaagaaaccatggaagatcaaactcaagggattctagcaaagactcaaacaaggatgtaaaggggtgctatacatgtggaaagttgggacattacaaaagagactgttactttaacaagaacagaagtcagaatcataagaacaaaaagaactatcatcatagctccaaca

SEQ ID NO: 134752 - DNA, 900 bp, Cannabis sativa
gaactagcttctgaatttagtagattttgcatttactaatgactaatgagaattggtatttaagtttagtgttagtagatatttcgaccaaattcaaaaaagataacttttgtctttatgtaataaaaaaataaaataatttccctctaaaaaaagtatttttattcatgaactgaaaagataaagggatttttttctgaaaagataaagggatttttttttgttttttattttttttatttttacactttaaaataattctttttgtatttttacgaaattttatataaaaatccctattgtaactagagttgtaacttaaattgcaataaacaaatttgaaaaaaataaaaaaaataacaaatggggtaatttcccaaaaagataaatataaaaaaaattatatgaattatttttgtttttaaagggcaatagttgtggtagtaacactaatttagcaaaattttcattatttgtaagttgttgatatagataaataaataaaaggtatatatttggtaatgggagtggcattatggtaaataacagagaattcaagggggaaaagaaaagagtaaaatccacgtgggttaaggggaaaggatattttggtgggagaagaaaatatctaaggaatgatgtgccagcgtggacatcatattatttgtcaaacaagatattttgtttaattaattcgtttggaagtttttattgggtgcggctcagtctacccattactattatctcatattcaatttgaccaatcaatcttcttccaccctccaccacacatttttgttttaataaatagagattatatgatatggtatggtgacataatatgccacccctaatttttttatttattttttttttaaaagtgtctatctaacggcattt

SEQ ID NO: 134753 - DNA, 559 bp, Cannabis sativa
tcttaccaatcactcgtatcgaagaagtgtcttcgttacatgttggacaagctttgtatccttgaccactccatccagacaaactacttcgagtagaaaaatcattaatagtccataaaaaggctgcacgaaacttgaacatagtgtttgtcctacaatctctcgtatcaactccatcaacccacaactctttcaactcatccaccaatggtcttaaaaatacattcatgtctttacttggtgattttggtccaggaataagtaaggccaacatgaaattattgtttttcatacacatcaaaggtggaagattatagtttgctaacacgacaggccacctactgtatgctaggctcatgttgccaaatggattaaaacgatcagcagctaaacctaagcgaacatttctaggttcactggcaaaatcaggatgtttagcatcaaagtccttccaagataacccatcaaccaggtgatgcatcactcgttcatcctttgattttccagtatgatgccataccatgtgttttgcagtatgtcttgaactatataatctttt

SEQ ID NO: 134754 - DNA, 923 bp, Cannabis sativa
gattgaattggattgactattttatgaaaacccctatatataaaagtgtaaggcccacctaagcactccctcatacatcatactccaaaagttgttgatcatgaaccatagagcatgaaaaatgatctataaaacacaatcacaaatagggcagcatgtgttggatgacaccccatgctttgccaactttgtcgtagttggtatccaatgcaaactagctttcaaagcaaggattttaatttttggtggtaaaagagcattgttatgagcattgttattggacattaatagtgtccagcacttttcatatgggacctacgattggttagcgatactttctaaaagttattttttttttaaattatatgggacctgctacttaattataccaataacaatatgacaccaacaaaagtattagacatcaataatattttttagcaattctcgtggtaaaaagagcttaaaatatttttcaccaccctttattgccatcactatctattttttttttactgtataagcatcatagactcaatataatgctcactgagctaatcaggttgttgaagagaattaggaataacaatacaaagaaaatatatatatatatatatatttaaaattattaaatacaaaaatatataattttcctttcaatatatatatttaaaaataattgaatatgatgaaattgtgtgtttataaactatataagaaagtttagttttatattaataggggttgataacatctaatccaatctaattaaattgaactaatttaatccaatcaaactacaaaaaattagatatccatttacaatttaattagattggatattaaaagttagattctaattggattagatcaattattggatgtcaatctcaaaatccaattaaaaactaatctaatccaat

SEQ ID NO: 134755 - DNA, 502 bp, Cannabis sativa
agccccatttctaggatctcaagtcaagatttggatccctgtcacgggtcccagtctggttctggttcttgttcaggtcttaagtcccaagtccgagtttgggttcagggtgcggttctaggtcctggcccctactattttgtgtcccgagtctggttccatgtttgggtaggagtttggttgcgggtttaggtcccgagtctaggtctggatttggattcaggtctgggtcccagttcttttttaggtttgacttggagtctggctcctagtctggttacattttcaagtctaggtcttggtccggttacggttccagggcgatgtcctagtttcggtcccattctcgggtcccagtctacttccggcttcggttctaatttggggtcacagggtacaagttggggtctaggtttgggtctgggactgggttcaggtccaggtctgggttcgtttcctggtctgggttcaggtccggggttggtcaccagatacagacaac

SEQ ID NO: 134756 - DNA, 677 bp, Cannabis sativa
aacaatatgagctaacacagcaaaaaactatccaatcaacctaaattttaataaaactaataaaatttaatgtaagcccaaataaaagtctaacaatagtgaatcagtgtgataggatttaagtggcagagctccatttaatttaattttacgcataggttttgagatgatgacaatccagtaatattattttgtaagcctcatacttaaaagttaaatcataattgtttttgtgtattttcaatggacaaatttagattcaaatgatgatgaagaaaggaagaaagaactagcggaagagatgcttaaaaagtgctctggtctgccattagccatcattgtgctcgctggtcttctatctaagaaacacaccatacatgactgggagttaatgaaagcaaatgtaatacactgcataggtgaaggtgatcaacaacatgatgttgactcaaattaccgtggtgtttcaggggtcttgggtttgagttacagcgagttaccacgtcacttgaagccctgttttctgtacttggctcgttacgcggaagatgtcccaataaaagagttatgttttgtactcatagcagaaggttttatatcgcgaagaagagggtctgtggaaactttggaggaagtggcatatgattggttgtgtgagttggtggagaggagtatga

SEQ ID NO: 134757 - DNA, 788 bp, Cannabis sativa
attggaggctaaaaatatcacaacgattttagttagaattatcgatgggattattgagataagttgattttagaaatatcggggtatattagaatactcgaagttggccaaataccttaaaaatagaaatttcttagtggctaagaaataataagataattattaataataaaatttttattaatattatattattatgatatatatataaaacgaaacttatcagtttctttgatatatatatatattaagttttaagatataacagtatagaagaacgaagaacgaaaccctcgttctcccttcctccataaaactttctctgtttatattcattttctttgattttcaacctgaaacttagtgatctaaactccggtagtagcaggatagcaaatccttgaagaggaaaagcttaaggtatggtttaattacgttttaagctaaaaacgattagttttagatagggctttatgatttaaaaaggttatggagattctaacttcgtagaattgttctttggtaactatgggactagtttatatgtttacttgttgaatttgaggtgattttgtgttagaaatcgagtttggaactttttaaagcttagtctgaacgttaatgacgttattcatttaagggctcaattttaatttctgttatacaaggatggtaatattaatggtatatatatgccttgtgaaatttggagtgatttggataagttttggtagtgtttcggtgagtgcgaaaattggaatttttgagtttcatagtttttagaaatt

SEQ ID NO: 134758 - DNA, 661 bp, Cannabis sativa
  modified_base (537)..(538): a, c, t, g, unknown or other
aagcttgaatggtgtttttctattcaaaaatttattgttgagtttatgccctaaataaaacacaattttaatgtaatcttatttatctattgataaaaggtgagagaacattttttaatattgtttattgcttggttcacatgtttatttcatgattattgtttaaaatataaattctgctaaatcttgaacatatagttattcacaattatagtattgtcacaacagtaaaaaataattgtgaatatatacttcaaactatttaactcttgtgatttatcaatgcattatatttatactgtcgtgataatcaacgatatgatttatgttgaccaaaagtcaatcactcacttatttttgtagtaaataatttttaattattttgttgctaattttttcttgattattttgcaagcaattcacaaagtatcattatttgtgttgcccttaattttgtccaaaatacgtgtaccaatgcgactgcgacacgtggatttgaggaatatggttttgagataatttgactaagtcttgttnnatcaagaggatcaacaagaaacatacctcccggagagggcatgaggggtctacgtactcccggagggcaaagctatagcaaagcacctccgagaggtatcaaaccccatctgaacagtcacct

SEQ ID NO: 134759 - DNA, 1112 bp, Cannabis sativa
  modified_base (304)..(304): a, c, t, g, unknown or other
  modified_base (403)..(408): a, c, t, g, unknown or other
  modified_base (574)..(576): a, c, t, g, unknown or other
aagatgaataattggaaaaatggaaaaattgcaaaatggggcccaatatccatggccggccacttgaggagcaatttactatttagttttttatttttttaatgccaaataaatctaacctaaccctaagtggtttcatataattaagtagtgatggcctcaaaggaaaagaagatgcaaactcttgccttcagtaaaattttgagccaccttctctctacctatttcgaaaccctctctcttcctctcttcaaaccgaaccctagaatgattagagtaactgcccacacacatcaagtggtantcaatcatagtgtgtaagtctgtgttgaatccaaattcaagagaaggagaatcaggcttagatcttggtcatacactgctacagaaaggatacaagggnnnnnnatctgagcggaaggagccattataattccgctacacccactgtaaggtttctgaaactttatatgtgtttatttcatatggttttagaagttcatgtttaggatgttaaaaacatacttgttagtaaatatagatcctggtaaaatatattccaacaactggtatnnnagccatggtaatgatttaatttcaagaaattcggacttaaaacgatatatgtgtgatttggatgtgattcatgttgatctatgtgttttttatgattgtttgatgtttgcaaattttttacgaaaaataatttgaatttttttctggaattatttttgttggatagtttggaaaaaaaaattaagaaattcacttttttacaaaacttaatatcaattttatttgaattagttatgattttttgaaaatttgaaaaatcttaggggtggtgacacaccccatgcgcgtgcggatgcacgtgacacacgggtgtcacccgtgttcagacacgggttgtccgaagtttctcgcccaggtgctgtctgaaccctatctacgcacgcgaaaatgctactggcagcatccgtgtgcgtgaaatcacgcccaacatcccttcgtgcgtgtgcagatggtatgcaatgcataccatacgcaccaaatacattttttttttccattttttcattttttcatggaattaatttcgaattttttgt

SEQ ID NO: 134760 - DNA, 1023 bp, Cannabis sativa
agattagattgtaatgggttttatttaggacataaaatcccaacaaatggtaattgtaatatgaatggtaatgtaatggaataagaattgtaatatgaatggtatgatgatgtttggtttaactctgtaatgaacattgtaatcaaataaataagttgtatattgataaaaatactcttagttttattgtttttaatatttaattttttaaaaaaaagtaataaaaaagggcaaaagagatattttctaacaatgtaatcatcattacattggttttatgatgtaatgggaattacaatacatatagtaatgacaattacaatgtaaagccattacaaaggtttaaaaatgaaagcaaacaatgtaatggtaataataattccattacaattcccattacactaaaccaaacatgccattagtttctcatcccataaccaatcttatgtatatactaatgccttcaacatgtttggatgaagcctattacgacaaggagtcacatgtcttccactagtactaaaggcagattcagaagcaactgtagacattgagataaccaaaacatctctggcaacttgttgtaatgttggatatttaatactatttgtcttccaccaagctaaaatatcaaactctccactcctaggtaaaattgcttcctccaagtataagtctaacttagacttgtaagtatccacatttgaagtactactaacgtacaagtcaaaaccagctaaatcatccacacatccatcattactttcacaattccagaagcattaaataagggatcaagaagattttcttttccatcattcggtttgtattctttcattgaatcatagcacaacattctaattcgctcaacttcattttgattttcaccagcataaattttaagaaagtaatattcaatcaatttcatcttaaaccttggatccaaaacagttgctatggctaatatgccatgaatgaaagtccaatactgctcaaatttatccatcatatttgatgtcatta

SEQ ID NO: 134761 - DNA, 551 bp, Cannabis sativa
atcaatcctgcatacttcctgtccattccattcttccatataacgaagttgttgcatcaatggttatgctgatctcgtagcggatcaatctagtactttcccatattatgatcaacacctttttatgcgctcaacaactatcaaaacctaaactatttttatatcaaaaactagtgggtgttaaggataggtttcttccactagctagtaggaccagcgaattcttagagaaccttcatgtccattcggacaattaaagcccctacagtgcatacttttgcatattctgatcaatcctccatacttccgtgtccattccattattccatataacctagttgtagcatcaagggttatgctgatctcgtagacgatcaatctagtactttcgcatattgtgatcaatcatccatgctttgttaaggttagcatgaagaccttatgttgtgctcaagaactatcaacacctaaacgatttttatatccaaaaccagtgagtgttagggataggtttcttacactagctagtagggcaagggaatttttagaga

SEQ ID NO: 134762 - DNA, 919 bp, Cannabis sativa
aattaacttgggtaataaccctaagccaataaaccgctcactttagagtaataactctaatctcggtttctagtttttcatatatatcacattccatataaactccattgcgcatatctctacgttctaacaaatgtcttacctgatgtcccacaaatatggagattccaaatccccagtgctcttgaccaagtgatggtaatcctagtcacaaacccggagtacacaagtatagggttaacccttaaattcatttccacaaattataaaactggcatttaaattccaaatattcacatatagctcggaaagagctttcgaaggatataaagaacatccccaacggagtcccgagtcaaaagttatgaccaaaacaaaaactcaaaaaaaaaaaaaacataacatgctgccataaaatggtcgcggctactggtttaaaaccccaggaaacccagtttccagccacaaaaaatgcattcaaaaatactaatttttcatgttatatcaacccacaatcataccaaacttttacctagcataaacaaagtaattagagagaaattacacctaatttactctccaacaacaccaaaaaccaacaacataaaattcagtattttacaatgaatttcagccccctaaactcatctatttcaaccaaaacatgcttcaatccaacataacctcttatacaattaaacaaccataaaaaggaagttaaaccacaaattattaagcttaaaatttcaatccacatgcatagaaattcagattcaacaacatgaaattaaaactccaaacctagagcagtattcatcataagttcctaatcaagaacttgaaccttcaagcaactttcaagcaagcatcaaacttatttttccagcaacaacacatcaaacaaaaacttgaatttaaa

SEQ ID NO: 134763 - DNA, 739 bp, Cannabis sativa
ggcataaaacccaacacaagcttctgtcgagaaggaacttcgatcatctcgaagtcgtgacaagccaccacctctagccaagaatcttaagacgaatccaccttcggtttcttcgagttcagaagaagaagaaccaatggaagtctcctctgataaatccgtatctcttcattctgagaaggagattcctgaggacattggagtttccttcgatagtgaggaaactggactcgagccagagcctcctttgaccaaatctgcttccactcctgctcgatcctctttagcagcaaaggcttctattgctgccaaaggcaagcagccaatgaaggaatcctgtccaagtaacattcatacatctctttcctattttcctcgattttactatcatgataatgagcgtgattggaatttgtatgcaacacgaaagtttgagagtgaaaggaattatgatttgcatgctcatagggtgtatggaattgttaaattcattcaatatcatcaatgggagaacactctctctggtttcaaagaatacattgctaatattgtcaaagatttctatgctaatttatctgatgatttccttgatgagaattctcgactttatcgaaaagtgtatgttagaagacattggttttccttttttgaaaaagacatatctcaagccttgcaactaccagagaatgtcccaaatgccataatgtctatggatcgccacttgatgctcactgaactc

SEQ ID NO: 134764 - DNA, 1345 bp, Cannabis sativa
attcatctcaacatccattggttcccgacgttcacgtgacatttgttgagtcaacgtctgtatttgtttctgtaactcaacaactgtttcccgtaagtccggttgatcagcagttgcaggttgtgagcgtcgtcctgatgattggcctttcaacttgcgacccactcctcgttgatggccacgcctctctccaagtgttttccgaagaatctcaagttctgaaacttgtgaagattcaggagcactattttgagttgtcaacatctcttcctataattaatataaataagttagaaatcaagcaaagttacaattatttgaaaatatttaaaagttattattttatatatcttacatatttatttttggcagcctcattgatgaaggtgttggtgtctttcttagtatgacattctttccaagtctcaatgtaaccctttccttgctgataaatataacttgttagaaaattatatataaagtaaactttgtaaaatagaaatttaatatattaacttactttttgacgaagaatctcagccatagttaccgaccctgttgttgaagagaatttcatcttctgtcgattgatagagttttgcttcgaccgttgaatgaaatcaggagttgtgaacaattcacatattagtcgccattggtcttcattaagttcattgggagggttcttcactgcattttcaaagtcttctgggtttttgtaatattctctgaagtgttgcaatctaatattctttcgtgttttgtacttctcggccatctcagctatcgaaatagctactaactttggatgactgtccaactggtaataatgctgcatatgacaaaaataaattaaaataacatggtaataatcacatttattagtgtagataaattaataattatttacccgaagcttggttaagatgaggtgttcgtactgctccgggacatttgcccaacttggatgatgtccaggcacatgcagtgcaacctctcgccctaccaatcgaggaaaagctttactctccaagcctactattttgttcgagacactgtcaacttctaatggcaacgggccagtagagttttttcttctctcttctaactttactaaaacattcctcccacggccttttctcgcgtcaccacctatgttgccatcaaaaatgtatatgtgtgaatagttgaattaaaaaaattaaacacttagatagaaaaataacaaaaatacctgaagcctcgcacgcagtcggtaccctagtaggatctaatgggtcatccccgccaccatctccaccatgatagttagcaacatctgctgacattttatgctaaaaataga

SEQ ID NO: 134765 - DNA, 525 bp, Cannabis sativa
ttatattatttttttcaggatgatggtgatgaaacaatttttttttactgcttttaatgaaataattagtttttaacaaaaaaaaaaacagtagtttaaatagaaaaaacgggtttaatttctataaaaaaaaacatttacagtcaaaatcatttttatttattttagttagtgttattttctaaaaaaaaggaaaaaaaaattaaaagaaacacaaatttaaagttttttatgacattactcatgacttttttccatatttgtaattttttttttaaaaaaaaaatattatatttagtgtaattaaatttttataccatatatataaaaatttatatttattttttcatatttttgtaaattgaccaaaatattagataatttataatttatctgaaccgtaattattaggttagcgtattaaaatacttttaacccagtccatatccgtacacactgaaactaaaagggaaatttgattttctatacttaaaaaactaaaatattttattcttaaatcaatac

SEQ ID NO: 134766 - DNA, 1011 bp, Cannabis sativa
aacttttgtattatgcactatgaaatatttgtaaatattttgtaaacgagatcttgattttaatatatatgttattattttggtacttataagtaattaaataaagttttaaataatcacgatttttaataaacttgttgattagcaacaagctgcacagataattaaaaattacgttaacacgcctaaactagtagggtgttacaatttagtatcagatccgccaagttgtcttccgaaaatcctcacgacatgtacaatcatcatcaccgatcaactcaactcgtagttcagtaagattttattgctttagtagtttattttattagtatgttataagaaaagcctgataggaagcatgttagtagtctgatagttgaataggcgcattttaatttctaaaataagcggtaattagtaaattattcttgatcgcgatctgaccaggctagctcttggtgtcgcaggctattctaatagtatggacgccaagcaaaacactagaagccaaggtaactcggtcggatctagtggcggtcagggagctcagattcccctcaatgtatgtagccaaggcagaggctctagagtaagggcacgcggtaggggagatgttaacccgctgcaggctacccaagaatgggaaaataagtttgcagcaatgcaagccggaattaacgaactagatgaaaaaatcagatgcctgaggcagcagggtgctcctgcaatgcctgctccagaaatgcaggtggcttctgcccctgctgtgcaggcagggtcaattgttgcaatgaaccgaatggaaccactgtatgagaggttctgcaagcaggcacctcctgtaataccccaagattaaggaatcggattagcgaatcctaactaattaaatgtgtattaatgtaggttattatataatttaagatgtatgagttatgttgttaaatgacatgttaagaccctgttggtgagcaggggtattttcgaaattttgacctgagaagggtgaaa

SEQ ID NO: 134767 - DNA, 524 bp, Cannabis sativa
caatcattcttagcctttggcaatatgacagttttttgatggtcatatctttctttcaaattttgccaaagcacaagaggatcttttacggttaaatattcagtttttaagccctcatggagatgatggcgagggaaaatcatagccttggccttattttgttttatttcagtattttgatctttgatggtgtctccaagacccatagcatctaaatggatttcagcatcaagaagccatgataaatagttttttctagaaatatcaagtgccacaaagtcaagttttgcaaggtttgccatgaagaaaactatatcaatataaagtgttaattattagacatatacataaattttgaaaaaaaaatacaacaaaatatagtacaatactaaaatatagaataagataataaaattaaacaatgtaatataataaataaatcaacacatatatataatatataggcatctatatagatatatataagcatagagatatattgattcattacaaaataaataaaa

SEQ ID NO: 134768 - DNA, 1805 bp, Cannabis sativa
  modified_base (300)..(301): a, c, t, g, unknown or other
  modified_base (425)..(425): a, c, t, g, unknown or other
ttatgttgatctaaaattaatattaaactcaaattaaattttctaataaatatatgtgactaaattcgaaatccaatgtatttaaagaagtacagttttgaaatttatataaacaaatatcataaattttgaaaaattattctaatttatgttgatctaaaattaatattaaactcaaatttaattttctaataaatatatgtaactaaatttgaaatccaatgtatttaaagaagtacattttacaaaattatataaaaatagtataaaaaaaatattgaaaaattattctaatttatnntgatctaaaattaattaataaattcattttcaacacaaatataattttcctattgaattaaatttcttaagaaaaatattcaatatttaagtaccttgaacaaaatcaacttaaatattaattntttatttaattaaatgtattaaaattagaaacaaataattaagtatcttgaataaaatatactatacccaaaattcggctagcactttagaggaagacacgtgtcaaattgggagaataggaataaacaaatataatgataataataattgaaaatagaataactcattaaatgcgaaattgacagagtatatttacaacttgttggctgtaagatgttaagcgagaaaaagatatatgaactgttgcctcgtgcgttaacgagaaaccatacggcctcagtagtgtaaggcaaggcatcaacctcactacgcatgaagagacatagacgagacatgatgactgtgaagacacttagcgtttaatatacgttatacaaaccaagtataacagtcgaatgaatccgaacaacgaatagcgaggcatccatcttgcttaaggaaggcacactcatggtaccttcactgagtttcaatgagtttcactgctccgttgagtcggctctcttagatagaagcttacattcaaatgatgttgactgttgaagttcaccttgtcaccaagaactgcgattgtcagatggagtgttatgtcttcaataacataaacgatgagatttacattatgaaccttagaaagacatgggaaaagctctagctcactaccagggttattgctgctatttacctagcgagatgtcccagaacgatatgctttacaacatatttaatacacgtatgcattgacccagtaaaagcagaccaatcatagctgtgtgattttcaaataataaccgcatttattttatgtgggacgcaatctaatccaacaaattcagggaattatttttataagatatcagtctgatttataattaactaccctcctatgtaactaaaataggaggagtttattctgaaaaaaggatgaaaaattcatgagaaaaaagccctagaattgtgttagaaatctaataagattgacttgtggaatatgcaaaattttaactgcaaaaccacataagaaagttttgtgttcttattttttcctttactgctattattttctgtgcaaatccctcacgatttaagctttaatatagttaacaaaaatctgcgttaacagtttggtgctttcattgagaaccttcatgtaaaaggcccagaaaacagaccctcctgatatatgtatatatctatatataaaaatttctccctggctgacaacagataaaacgttgttactcctcatgaagaaaccactcaccgtctaggaaaagagcgaatgggctctcggaggcatcccaactcatgatctacatggaccactcgttccaggagaacccaacctgagggtggcccaagtgttggaaattatttta

SEQ ID NO: 134769 - DNA, 1476 bp, Cannabis sativa
aatgcttgatgaggtggaaaacttctgtggcaaaatatagatatgctataccattggagataaaagaatgctatttttgaaatttgcattgatgccacacaatggcattgatgctgtcttttttatataataaaaaattaaaagtgtaatatatataatagtttaataaaaaaaaaaaaaaacttatatgtatataataaaatgtgatatcataattataacatttttaaaaaatattatactattggagtatttttaaaagtaaaggtaccaaaaataatgtggaagaaaaataaaataaaatattaaattttggatgatgtggagattagatctaaagctaccattggagatgctctaaattactgaaatggtgggttttagcacacctgacaggatctcatttgtttgttgagactagtctccaactcttctgcatattcatttcataccagtgttatttaatgaatacatagtatatatatatataatgcatacaaaagctggtgctttgctggtaacaagtgttgtttgtttgtctcacacaactctcaattaattggtagttggacatcactgaacgcatgcatctatacggcaacaaatttctgattttttcattcattaaaaattaaataaaatcaagtgtgggggaccttttggtttcctacaacacttcccaaaaatccaagtgaacttatattaacttgaccattttataggcaccactaaaatctcacactatcatccccacaacttggatcatataggattatcctagagatttgatcttttactttggacatttcaattcaaaccattcactcactcctcaccaaaaaaattgattacaaaataacaaaacacctttagtgttgcaacaatcactagctaactataattaaaagtttaaagccacgataataattaaagtatcattagtaattttgtctctgaattttcgacaatactgattttaccccttaaaatatatgtcttgttaaaaaatctctctaaacttttacatttatagaaatttagtcattttactaggttatgtctcattatttcgttttaatgatgacatatctttataaattagcaactttgctccctaaattttgataactatcaaatcgtaaccctcaaaataaaataagatagattcatcatttttttagtaaatcttaaaaaattaatttaggtctttaaaaaatcattttgaataattaaaataattaaaaaaaatcaattttaaaattaattaagtaatttaaaaaattatttaattttcataaaaaaaaaatcatttagatattaaattaaattaattaaaaattcaattttgtgtaaaaattaaattttacgggaacaagtttgattctatttttttttctctaaatatgttgtttatgtaaacataacattttttttagttgatttctaattttttctaaaaaaataattttatatttt

SEQ ID NO: 134770 - DNA, 769 bp, Cannabis sativa
ccgagaaaactttgtcatgtccctcttgttggcatctttcttcatgggcccgggcttcttatatgtggcgagtgactgagttgccatgtaaatgctttctatatctttagtaaaaatagtgaatgcagtatatttggcatgattctcccgggaagcttgttcggatttgccagtgaactttcctttctttccattcccttgcttgtggttgttgttggaacgtttaccacttgagcttggattacttgggtagtggagaagttgagcggatgttgtagtagaaggagcctttgacttgccaggcttttgctcacctttcgctcgttgaatggcttcttcgatattgaaatgggttttatttagtgcacaaaacccaacaagaacttcacacatggtggactttttgaagcttactcaagagaagatgtcactggccgaatacactctggagtttgatcggttgtctaagttttctgatgatctggtgcccatatattttaccaggaaacaaaaatatgtaagaggattgaatgccacattcagttgggacttgaagattaccacttcacatgacactttgtgcaagaaagtggtagagcaacccttgattgctgaggaggctgagcaacatgtagtaaaagagtagactgcaaaggatatcgtcacgacatcgaaccctcctgctagtggtaatgtcagtaaggggaccgatagtggcaatcctgatcaaaaatggaaggtagaggcttctggaacatcagggggtaat

SEQ ID NO: 134771 - DNA, 1107 bp, Cannabis sativa
ttcagatttctgattgttttttcaaggcctttttgtatgatctttccgtccctttttttttatctttcttgccactatttataattacatagtggcagttaattacgaagttgactgtaatctttttacaacaatcatccactaaaatcatgggatttgattacttatcacgtagtgtaaatgcggttatgatttgaaaatcatatagctgtgagtttcccacgtttatcgggtcaaattgatcatgtatttaaacacgtctttaatcgttctatccaaggatgtctcgacaaaagcttggttccagtgatcacaatagcgagctggggtcatttttctttctgaggtcgacaatgcatgtctggtggcgacagcagtttttatttacaaagagttgttcgaggctcgtttgaatgttagcttttgactggtcaggattgtgagccttactgagaaaatgtctgaagttaactgagtgaagttacaagaagccttcccatagcgaaataggcacctcacttgctaagtctcgagccaacccgactgttacacttagtttatacattgtacactaagtgcttccgcaattgacatgtgtcgctttcgtcttcttagacgtaatgtacttgatgcctcactattcgcattcagcgacatgtagtttctcgctaatatactaagcaacagtttgtatattgattcctcgcataagaccttccagtcagcagcttacaaatatactctgatacttacattattaatgagttattccataaaaaatgattgcatcgatccatattccctttatcttgacatgtgtcctccactgagatggatgccgaatttcaggtataacacaagataatctttgaaaaactgagtttttgcaaatatcaataatatatacgaaaatataaaaatgtatacgtctgcagaagtagaagttaattctattactgtagagaccagttctgcagcgacgaaacagaacagacagaatactaaaataattgcagaaaattaaatcacttgacacaagagatttgtacgtggtatcagtgttctttcgaacactcctagtccacggggccatgcccagagaatgaa

SEQ ID NO: 134772 - DNA, 739 bp, Cannabis sativa
actactctaagccctaaaggcgttgttacaaaagataaagacgattcctcaacagaaacgtagtgagaaggagcaatcaagacgcaaaaaagaggaatttaacacatcgtacagcaaactctggcaaactcatttcaagaagttcgacatccaacccagaaatcataaaacatgctacataaacgaacagtaagcaagtataaggtatacgaagaacttacatgaagtttgagggctgggggttggtgttgatcgctagttgaatgaagactggcaacgacaaaggaagaaaagcaagtaatctatggtgtctgaaatttcttttctctctgtgaaaactctaagaaaatttggtgaaatggtaaaagtaaccaaatgaagtgagaaggcttgcttttataagccagaagaggtgtgagatagttgtgatcgaccatcatcgtacggtcaggatagcaatcgatttgcattctacagatctaattgttgggataagcgttcatcaaggtggtaaaaaacgtttgagtactcgactgacacccatttaatgtgtcgtatcaataaatggacagaaaatgaatcgttgcctacaaaaagcaaataactgcagtaatgatggtcaaaaatacatccccacacgcccagcgcacgtgccaggaagttaataaggcaaccggaggcatctaagcaagccttgtttactttttaccaaacaaggcttggggggtaaatgtttccc

SEQ ID NO: 134773 - DNA, 675 bp, Cannabis sativa
accatttttttctcttatgaaaacagcgctaacggctgcagctgatactacgaggtagatgtaaagcgtctctccatatttaggctttgccattaacggtggggatgaaagatacgccttgagctcatcgagtgctttctgacattcctcgctccataagaagtccttcgacttcctgagttttgaaaagaagatactacaacgttctgatgactttgatatgaaccggcttagtgttgctatccttccatttaggcattgtatgtctttgatgttcttcggtggttgaatattttgaatcgatcttatttgtttaggatttgcttctattccatccttagttaccatgtagcctaagaattttcctaaagatacaacaaatgaacattttgcaggatttaatttcatattatatttttcaagtacctcaaaagcttgctgcaaatgatcaatatggtcttgggcaaccaaggattgactagcatatcatctatgtagacctccattgtattacccaacatatctccgaacatctggttgactagcctttggtacattgctcctgcattctttagcccaaagggcatgactttgtagctgaaggttcctcgttcggtgatgaatgctgtcttctcttggtcatctgggtgaatgagtatctggttgtatcctgag

SEQ ID NO: 134774 - DNA, 725 bp, Cannabis sativa
ttaatcttctcttgaataccacccaaagcagactccacccaacaatccttgacaacttggaaacacataggttcccggagccaaaagttctcaaaccgaaactgcttatgacgagaaatgtaagactgaccaacaagattaagcaacaaaggactatggtcagaggagctcaattccaggttcaacaattgtgctgaggaaaaataaaccaaccattgcttagaaacaagtgcccgatctaggcgagactctatccaagcatccgaaccacggctcttttcccaagtaaattggtgaccaacaagctccatatcactcaactcacactcttgaattgtttgctgaaaaccctcaataagccagttaggataaggaatacctccacgcttatcttcatgagacaagatgttatttagatccccaataacacaccatggcaaagaagaaacggtagccaaagttttcaattgatcccaagtagtcacccttgcacttcggttaggctctccataaaaaccagttaaccgccacacaccttgatcgaaagaagtaacctcaacatcaatataattatgagcaaagcggagaagattgatatccccattattacgccaaagaagagcaacaccaccactacgcccaattgcatcaaccgcaaataaaccatcaaaaccaatagcaactctaattctttccacaacttccttacgacacaaagtttcaca

SEQ ID NO: 134775 - DNA, 575 bp, Cannabis sativa
tcacatgatcatcaattaatttaggaaaagtaaacaaattagattgaagaaatggaaaaaaaagttaaatctttctgttcattcaaattttaggtaactcttaaatttaactaattacgagtagagaagatatttttatgtagtttatgtgttaattaatcataatttacgggtcttttttattaataaataatatctttcttgattgagagtatattctctattacagtttcaaaattcttcttgtagacttttacttgggtttactttaatttttattggttttattaacatttagactaattggatagtgttttgcaaaagtgaggactatttcatattgccatggccggccacatgcattgcctttatcatttaatttttttattattttaatgctaagtaattcaaccctaaccatgtgtggtattctataaatagaaagtaaatgcttcaggaaatacagacaacacatttgcatcccattcctttcacagaaatttcctgagccgccacctctctctctctttcttcttccctgtttcgaaatctttaagtgatagagtagtgcccac

SEQ ID NO: 134776 - DNA, 1213 bp, Cannabis sativa
  modified_base (335)..(336): a, c, t, g, unknown or other
aatggaacccctgtctgaaaggtttctaagcagttacctccagtctttctgggagatcccgatgttatgaaagccgagcaatggctaatagtcattactggaattttgaattttatgggcgtcgccgacaatgatagagtggcatgtgccacattccagttccaagaagacgctctagtgtggtgggacatggtgtccctgactcttgatgttactacaatggcctaggaaaagttccaggaactgtttaatgcaaaatactacaatcaagcagtcagaagcgtgaaaaggaaagaatttactcagctaacctagaaagaaaatatgagtgttanngaatacacaactcagtttgatcgcttggcaagattggcctcgagaattgtgccaacctattttagcaacaaagagaagtatctggacgggttgaatttgaaaataatacatgacttaatgatcattactgatgataacaccacctatgctgatatggtgggtaaggcactgcgagctgagggcgtagtagagtgcaccctagagtctcgagggactcaggttgttggaggggctcttactcctcctacatcaggctttattaggggaggtaatggctcaaccactgaccaaaaaagaaaggcacctactgcatctggtggctcaggtcagaacaagaggttccgagggaaccagggtcgaggtaatcgtcagggtagcttcaaaacccgatacacttacccagaatgcgccagttgtaaaaggcatcatttgggagagtgtagagggaaagggtgcttccagtgtggtatgccaggacactataagatggattgtccctaactcaagaaggaataacagaagatcgcagcgaaattcgctccatcaagggtattcacgttaactcaggctaatgcagaagctagcccctcaattgtaacaggtcagctcttgatcaacaactcttacttctctgtgttatttgactctggggccactcattcttatgttgcagccaaaatctttaggaaatcgggtagaccgcatgatagatatgatacagggtttggaaccctactgcctggcggagaattagtcatctcgaaaaggtttattaggtctatgcgatcagaattgaggatagggagttgagtgctgacttaatagaaatgggtttagtagatttcgatattatactgggaatggatttcttatccaa

SEQ ID NO: 134777 - DNA, 883 bp, Cannabis sativa
  modified_base (528)..(543): a, c, t, g, unknown or other
attctctaacttattaattcgtccttgcaccactatagatttggaattacattcttaattatatagaatgctctatatgttccacgatatagttatgctatgggattatccatttgttattatcctaataatcaatgatcctttatagatgatctacacttagtagggactaatttaccattacacccttcaatgtattttatatttaaaacacttagctacctaaaaatgatattccagtgaactaatataatcattaaaatgagtactcagccatttatctctcttaagccaagctcgaaggaaatcatcgtttggcttttatatccggatagaagctatagattttgtatttatgatccgcgctcccactcaatttaactactatgtccttaacctatatgtcacgagaagaaccatttggtcgactttaacaaacagatttaagaacacaaataaagcaagtggactagaacctaaccatcttaggattgagatcattggatctaagatcaactaggtgatatnnnnnnnnnnnnnnnntacggtaagtttattatatctgattcaagttcaatatcggtctcttccgatgcatactcaatacatccaaaccaagcttactttaaccaatatcctagaaaagacatagcactaatccaaggtgcaagtaaactaaattgtagattatcctatcaattaaaccccatgtactgataaatcataagaatacatttattcacacaatcttggttacttttcactgtgttgatgattcaataaacaagaatatcaatgtgataagaatttggatgaatttataaatcaaataaacaaataaataatcacatgaaccaaataacacactaaataagtaatgaaa

SEQ ID NO: 134778 - DNA, 618 bp, Cannabis sativa
ttgagaatctgagaagaggatattacaaagactgccttttgtactaggtatggtcactatgaatttttagctatgtcttttggactaactaatgctccagtggatttcatggatctaatgaatagagtattcaaggattttctcgatatatgtgttatagtattcattgatcatattcttgtgtactcttagttagaaacaaagcaagagcaacatttacggataattttgcagggactacgagaacataagctttatgaatagggcaaataaataaaatacgctaaattactaattattacatatgttacataggttatattattataattaaatgtataacataatattttgtaactcttatataatttttttttatattattgtagtttattactctactctttttaatatttattcaataataagtatctatgtaacttatatttgaacctacataagtcatctttaatttttttttgttatcttttttttcttttgtaattcaaacagtagtgtctgggactgcacaaagtgtatcacttgatatccattgttttttcaaaacaaaataatattatttagcatttaaaataaaatataaactgcccaattgat

SEQ ID NO: 134779 - DNA, 1690 bp, Cannabis sativa
ttggttgtttctgactgtttttttaagtgattattttcttttggaaatatctttttttttcagtataaataggactatgtgttttacaaaagttatagattagactttctattttgttaaatgataaaatagagcatgtattttccaaaatggtaaaaataagacattgagcttaattttcgacaactttttttaatataaccaacttgaagacaattcctaataagaatagatacagaaaatataaaattttgttataacacatttagatcggattattattaatttttattttgacaaaaaattagtttatggtcctatttgtactattttgaaaaatacatagtctattttgtcaattaacaaaactgagggtctaatttataacttttacaaaacacatgatctaaaatggtattaccttattttcaatgatgttattgaatactagtgttaatcttattggatgaactcttctcattttttttttgacataattcttctcatttgattattgagttaatgaagtttctttgtaagccaaaaaaaaaatagcatcaagaattactttgtattgataagatagatgaagtgatgaagggtaatattattttaaactatttattttacaaaaattattgattagattctctattattaaattataaaataaattttatattttttaaaattgtataaatagaattttaagctcaagttttgatttttttttttaatataaccacttaaaaataattcttaacacgaacaaatgcagtaaacataacctttataacacctctaaatcggattattattaaattttattttaatagatcaattcaaggtactatttaatactatattttgaaaaatacataattcaatttattatttatcaaaacagatagtttaattaataacttttgtaaactataaaatcaagagaaattataacaaatgacccaaaattatatagcactatgtaagtaaatattctcatttcaaaacttgtagatacatgacctttttataatatttattatttatattatcttttgccatataaaaaaatcaataatttttttttttcatatttttttttagaattagaaacaaattacttaaagattatggtatatctatatgagttttattaatttttttttattttaaaattatatcaatttgtttttaatttttatgagttgttgtgagttgttgctatataaatttcattgtacagtatatttgtattttgttgtatggtatattattattcttagatgatatttattttttattttactatgtataatagtgatatataattttgttagcatataattttgttgacatgctacatatgcttagttattatttttatatatttaaattctataatatattatcattttaaataatatttaattagatattattttattatatacaatggtggtacataaatttgattcatggtatatatattttaattgtggtatataatttgattagtatagtatacatatatattagtaatatatttttttattattattgttagtatatatgttagtgagtgatatatgtattttttgttatacggtatattaattattttttaaaaaataatatttaagttctattttctattgtacttttattaacgtgacatataattttatta

SEQ ID NO: 134780 - DNA, 517 bp, Cannabis sativa
gcaggagcaagtgtatcatccttctttttctctagccctagcagctgtggacaattcctcttcatgtgacccactaccgcacagtggagacagactctggcctgacactcgccctggtggcgccttttacatctcagacattcagggaaagtctgccagatttcgttcccaccacgacggaagccttgcttaccctggaaccttttgtttaggcctacagttgttgattcactaagtcttttcttgcggtcaccgagatcaataccacttccagaaccaacacctgatgtttccttctgttgacttcacttttagacaaggacaatgagtctttttgataagcgataaacaatatgtcgtaatgagaatatataagaaagcaataataaaacacaagaattttgtagaggtttagccctgagccgttcggtaatagcctaatcctcgttatttgtattacttaagaacaaggaagaagtttgcttttcttatagctcttacaatagtagatcggaag

SEQ ID NO: 134781 - DNA, 1124 bp, Cannabis sativa
  modified_base (370)..(376): a, c, t, g, unknown or other
  modified_base (897)..(913): a, c, t, g, unknown or other
gagattctacgacgttaaattactaatgaacgtccatctattagagatgaatctcactaaaacaagaactgtatagaacaaacaatggatatcaaatatccttataactaaagctcattattttaaagaatgtattttgatttgatacttattttaatctatttattttaacatgtatttatttaattaaaattactattttagataactctaaatataaattttgatttagtatttataaaatgatacccttggaagatctcaaaaataaactttattttccatctatagtattatttttccaataaatattatgaaaattacttaatttaaattagtctaaaattaaataattaattttcaactcaannnnnnntttctataaatatatatatatgtgattgaatttaaaatccaatgtattatatataaaaatacaaatttcgaaatctttcaaataaagtaaaataaaagtaaaaaaaattatactaatttatgttggtctaaaattaaataaattaattttcaacataaatataattttcctgtttaattaaatctcctaagaaaaatatcaaatatttaagtgtctagaattaaatcagcttaaatattaattttttaatttaattaaatatatctagaaatatagaaaatatctatctagataattcataaactaattacttaatttctaattaaaataatatattttagtctatttattttatcaaatgattaataaaaattacttgatttaagttgatctaaaattaattagtaaattaattttcaaccttaatctaattttttaaaataaaaaaaatttcggaaaatatctatattaaaaataaatgtatttcgaaatataattgggaaatgattattaaaataaannnnnnnnnnnnnnnnnaattattctaatttaagttggtctaaaattgaaaaatttccgacttaaatataattttctatttaattaaattcaataaaatagaaaaagtatctagaataaattcaacctaattaataattctaatttaatatctaagaataattatctaattaaagttggtccatatttaattgacaaattaattttcaacttaaatatatattttcta

SEQ ID NO: 134782 - DNA, 857 bp, Cannabis sativa
ataactcagtcaaatttgatctaattgatgcgattaaacttgcactttgaagttaattcaatgatctatcaagtaatgtctcacactccagatgtaattctgaagatatcatcatcaaaattcaccccaagggagttacgaaaataagctccaagttaccgcagtgggacttgttgggctccgaaaaatggccatcaccactaagagctaatttttaccgttagatcatcatcaccagtcaaaacatcttatttgtattttctccatctttttgtggatctccttctcctataaaaggagagctccctagctcattttacacatttaataaactactcacaaggtcagagcttctctctctaggctttatctctctagaatttggagcttattatattgttgtaattaccatcttgtgagaaataaaaatttgaagtagatttagccctattactatcgcgatataggggtgaactactataaattttatgtgtctctcttataaaaacctaactagttattcattctcgccaatataacgagctggtgtggcttaaaagaatggtatagatttttatgtcaatattttggtactttcattgagagccacaactcaagaaagctactagcaagatggttgcaacacagaacgcatcatagttaaaaatttccttgaagagttttattttttatcataaatggagcatattgagcattataaacttagaatcttttaccttattatatcctagatttttaaatttcacgataaatttatgatattcatttcatttaacatgtttcttctcattttcaattcatattatgaattttattatttaaacctgaaacaagta

SEQ ID NO: 134783 - DNA, 639 bp, Cannabis sativa
  modified_base (53)..(53): a, c, t, g, unknown or other
  modified_base (125)..(130): a, c, t, g, unknown or other
gttggtcggtatacacccgaacaagatgagcttggaaataaggcctcaacttncttgttgctagaatgaggcagtagtcgagtttttctattaacggatatggccctcggcctcaatgagtcttnnnnnnatgtaatagactgggtgctgtatatcattctcttctctcattagcacgatgctcacagcatgttccgtaacagctaagtatattcccagttcctcgccatctagaggttttgagagtacgagaggttttgcaagttgtgcctttagcccttggaaagctttttcacactcctctatccactcgaactgcttgtttcctcacaggatgttgaagaatgggacacatttgtctgtttattttgaaacgaatctgctgagcgcgacaatccgaccagttaagctttgcacttctttggtttctgttggcgagttcatatccaggagggcttgaatcttttcttgattagcttcaattccttgggcattaacgatgaagcctagaaactttcccgagctgactccgaaggaacactttagtggatttagtttcatgttgtattttctgaggactttgaagcatttgtccaggtcatctatgtgccccccaacctttctggattttacgagcat

SEQ ID NO: 134784 - DNA, 916 bp, Cannabis sativa
  modified_base (820)..(822): a, c, t, g, unknown or other
tttaatacattaactttttttttttttaacaaatatccataactcaaaaaaaataaataaagatatcaaaccttatttcttttctagccgcctccctcctctcctctttgttcctctctatctcggttcagatgaaaggaaagatgaaggtcccaatggccaccccgccggcaggccttcaacagaccaccctttcgccgtccaagctcaagacaaaccccatgaatctcgccactatctctccaccctattgtctaagttcttggctctctcgtgtctctcacccttatagtaatcgcagcatcgggatggtgaacggctccattaaacggtaacctgtaacttttaatattattaataataataaatgatgaaataaaccaaccctttctctcgttctctgtttgcaatgcacgacggtgctactccggttaccgtaggcgaaaatggaggccatgggtggcctcgccgagtgctgaaacccaactcccttgagccacgaagccaccaccgttgttctgcctccgtgaagaagctcgtcggagctgtgagcttacgagccgatctgcctctttgaagaatttccatgagcatatctaaaaagtttgttgaatattgtatattttttttgtgttattatttcatttgttttttttttttttctgtatttgattaatttgtaaaattctctgtaatttttttctattttaattttgtgtaaattttaattattgatatgtatttatttattttagttttattataattataatatttaaaatggtattatctcatgaacaaattgttaatttatgtattnnntaaattgaattattaataaaattattattataaatttataatatataatttgaattaaaaaaaatattaatttttttataaataaaaaagtata

SEQ ID NO: 134785 - DNA, 616 bp, Cannabis sativa
tatttaaaatttaaataaatttataaatatatctttattttaatatttgatgttaagatatttatgagtatcctaataatactcaactaagtgatatgggccggacaaatgtttcttcagttatatgggccggacttgactgataaattcaaagcccaacaatcattaatctctaatccccctgatatttccgagttaataacccatttattgggtacccgaaagaggaaggcccacacttggtataatccggttccatcgtcctctcactgcaaattatcagagatttcgaatgaagttttacctggagaagaagcattactagctctggatactagtgcaaaattctcaagcggttgtactatagcaggagagaattcaaagagtcaaaagaagagtaaacaaaggagaagtatcaaagacaagaaagctttgcaaagtgcaaacttaggagtcaaaacaagaagtaagaggaaatcggctcaatgtttggatgggaatttaagtgatgctcttgaaaactgttttgagcttcaaatcagttatgtctagaattttggtcaaggcgagaaggcggccggaagcatgcccccacctccccaatgaggtgcttatc

SEQ ID NO: 134786 - DNA, 1006 bp, Cannabis sativa
  modified_base (62)..(71): a, c, t, g, unknown or other
atgttaacggaatgtgtgttttttttttaataaatttttgttaaaaaaataatataaattannnnnnnnnnttctgttaaagttaacggaggaaataaaacaacatcattaaaccaagaattgtccttagatagacacttttaatatataaagatatatagccgtatcttaattaatttttttagccgtatcctaattaaaaaaaataaaagatttacccaaaaatatatgtatcacgtttaaaaaattattaatacaaaagagcacgttaactaaaattaataataaattattaaaaataacttaataataaatataaaaattgattattcaaaaaaacacaaaaacgacaaaaaaatcacaaaaatagaattgtacggaatttacacatttttatagtttttacggttttatttacataaaatacgctcttttgatgtatttttatgtggtactctttttattttattctttatcttttgttattggtatattattttttttatattgttttgatgttgtttttctgttactttcataaaattttcttgtgtctttatagaatatcataaaaatgtatataagaaaaaactttcaacctaagaatgtaaaatttttaccaaaaataactatttatgtaattttttcatataaaaacataacatttattgtaatacaaattttacattattctatatttgatccaaattcaattactttttgttatgtgactaatttgcatcataatttgacacactattaaagtaaatttgttacaaagtaaactataatttacattcacatcacttaatggagatgctctttgcaatttcttttatagaagttattaaattaaaatagttgatatctaatattaatattatatgacacctttaagggcccttttggttgatggtattgggcctgattcttttgtttggttggaaaataacaattttggaaaagaattccatagtaatgctattcccccaaactaacggaattg

SEQ ID NO: 134787 - DNA, 1434 bp, Cannabis sativa
cccacctttggtaacgctagatcatttctaaacaaaagattttgttatttgaatcaattagatcgatgcctccattaactactcatgttctatatttcacttgggaataccagtaaatttaactcatattttcatttttctaatttgtccaccatgtcagatgaactaccactaaataacatacatacataatccatttagatcttttgatgtccccccattgagagtacaatatttcataccaatataaatcgaaatagcaattataatattgcccataaattctaacttgagttggtcaaaggaccaatatccaagtccctttgaatcataattggcacttggggcatgacctgtacatttttcttctttaacatcaataaaacaagatctggctctacattggctcaaatggtgcctttttgcatcttgaacactcatgataaggtcaccatttcttattctcaccttgaccgctatcctgatcaccctggaacctttttgttctgtcccataattggtggttcatttagtttttgcttcctgatctactagtaagttggcttcatatattccaccacatctagtagtacaatcggaagtgtcggtagtacaagaacagacacaagatgagcctattgttctctcagatctcagatctgtttatccttattgtctattcatatcctgcatagcaaaatttacatgtttctattattacaacaataaaggattctctaccttaccgtttgccccgagcctaaatagctcattaattagactattcgattgcccttattgcataacttatcacacatttagtctacatcttctaaccatttagaactcagacggatatcaatatcaatatgcatataccatacacacattcttatcacaatcatcactatgctacttttctcaacatactttataatagcctaggcatgtaatccaatagcaaataatataaatacttactatataccatgagtcaacctgtcctcgtagtaaatgtacatattcgaccagtcttcaggacctttaaaaccatggttgctctaataccaagttgtaacgccctaatctatagggacgcacatgtgattttataaactagtttaatacaaatagaataattaattattaaaaaatgtgataatattaaaaacttgactaaaataaaacactgaaaaatagatattataacggcataaaaagcgtgttccggggatccctattataaaaagttttgctaaaaaaatatatacgacaaccatttaaacacaaaatcaaaatactcaatacatacagccagccaaaaacaactcctggcaactcggcacgcaggccactgaggtcaatatgaacattgctagagaagactgtcacctcatggttgatctagattttctttgcctttacctgcaccac

SEQ ID NO: 134788 - DNA, 637 bp, Cannabis sativa
  modified_base (546)..(554): a, c, t, g, unknown or other
gatcaagacgtttgttggtttggggaaattcccttacctattttcacttctgttgttaatgactgctgttgattaataatattagtgaatttttctcaaaaaaaaaaaaaaaaaaaaattaagttaatatgttgatttcttcaacaacgtagatttataaataaataaaaagtagaaaagaagaaaatattgataaaatgtgaaaggatgagatgcggtactataggaagtgtgataataaatttcttattgttgaataatttttttaatatcttattcaaatatatataagtgcatgaaaaaaataaaaactgcaatctcattaaatgaatcgttttggttaaccttttcataaatagtaatagttattgggcttttagaggagttcataaaatagccgatataattcaatttgcacgattcaattcaatccaatccaatccacaaagtgcggatatccgcacttgtgcggattaaattggattgaaaaattcaaaattcttcaaagaaaaatttaaaatattagatgttgattgacatgtaaannnnnnnnntccaatccaatccacacatatttaaaaaaaaataaaaaaaaattatatatacaaataacattaatgtaaagaaaatagtaatt

SEQ ID NO: 134789 - DNA, 1468 bp, Cannabis sativa
  modified_base (1297)..(1297): a, c, t, g, unknown or other
  modified_base (1436)..(1436): a, c, t, g, unknown or other
taatgaaacatacaaggtagtaacatacaaggtagtaaatctcatacaaggtagtaaatctagacaaggtagtaaatctagatcctggtaaaatatttccaacactatgctgatacaaaaagcctaccaaactgttgggcaatagcccgtaactatcatccgcttgggcgaaacagacgaagatccaccgatgaatacctctcagactataaaaggtcagtcgtcaaatccccagtcacaggttccacttgtgggccaagtggtaggtgggcaaaccttggctagtaattcatcgggagaagtcatacccaataactccaaccaagttaatggtgcctgtcagcaagttggccaaaccaaccattcattgaggcagccagacgtttccgtatttgataggttggggacgactcatgatctcataaacgatctgaaaaggaggagaggagtggacgatcagcttgacacgccaatcgtgcaacctggaacccgcgctcaaaaagatgctgatgtgactccgatcgggcaagaggctgaacagattagtccagccgtgcacgcacagttggatgaactaaaaaatatgttccaaggcctagccggtcaaaggaacaacgatctcaagttagaccgagcacgttgaatccctttctcctccgagattaatatcctagagttgccccacaaattcaagatgccaacctagaagatgtatggaaaggaagatcccttatcccacctcaagtatttcgagatgcaaatggatcttcaaggagtacgaggagatgtatgttgcagagtttttcctgccaccctcccggaagccgcccaacaatggtatttcaagttggcaccagaaagtttaactcatggaaggctttctcctcagatttccatgcacaattctcctcctctcgcctacttccgttgcacctaggagatttggtcgaagtaaatcaaagaccaggagagcctctccaagcctacattagcagattcatgacggaggcgactaaggtttcacgggtaaacgaggaaacgaggacaaaaagttgtctgcgatactggggggcattgaagtcctcggtgagctttgcaaggacataaggaagaatagaccagtagactcaatgagtgattttcttaaccgtgcagaaggttttatcaaactttaagaggctattcagcgagcaaaaggtgaacaaaaacctggcaagtcaaaagctccttctactgggacatccgtccagctcccccattacccaagccattcaagctgaaatggtaaacgttccancaataataataggcaagggaatgggaaaaagggaaagttcacaggcaagaccgaacaaactccccgggagaatcctgccaagtatactgcattttttttcctaacggaagacatggaaagtgtttatatggctactcantcattagccccgtacaagaagcccgcacccat

SEQ ID NO: 134790 - DNA, 743 bp, Cannabis sativa
  modified_base (207)..(214): a, c, t, g, unknown or other
taatgtgtttcatgtctccatgctgagaaaatatgtatcaaactcaacccatattctgagctatgacgatgttaaacttcagacaaatttattaatgggaaaaacatcttgtcttggttttggactagaaaaaaaaagaagaagtactataaaatgagacaattccactagttgaaaaagtgctatagaaaaacagcaagatagaannnnnnnnttgagagttagaatcataaatatggtggtagtatctcgattagtttaaaaaaaatcgaggatgaaatttatataaggaggtgatggttagcgatgaaaatttataccgcggggatgggtaaccacggggacccgcccctaatggggtggagattcaccgtcttagtggttaatggggcggtggtggggaacaatttcaatacccgaagtggggatgggactggggcggggataatactattcgcaccatatccgactccgacatagatatatataatttcttttttattcttagcatatgtatagtatatataccattgataatcaattttttttattatcatccataatcaaaattatatatcatatgcttaaattatgaagatctaatgacgatagtgaactgatgataattgtggattacatgtataaggatattttcttctcgattcttagtttcatctttgtttactttttaatttgttgggaggcttgagaggtatgagactatgatactatacttgggttat

SEQ ID NO: 134791 - DNA, 811 bp, Cannabis sativa
ttgttgaataattagtacttttactttctgaactttcaacgctacctaattttgcctcttaaaatttacgacttgttaaaaattcccctaaaatacaacagttacataattatgccccttctgttaacttttgtttcttttactgttaaaaattaacatttttactccctaaacttaccaatacaaaattttattcctttttattaaaaaaaatataattttaaaaattataatattctatgttttttaaagtaattaaaatattttatcaattttgaaaatataataataaaaattataagaaaattttgataataatattaaattaattaaaaaaaatatgttaattttacttaaaacaacttaaattattcttaaaaaaataattttaaaatttattttatttataaatacgtattttaaaaaatgaaaccaaaataaaacaacttaaattattcttaaaaaaataattttaaaatttattttatttataaacacgtattttaaaaaataaaaccaaaatcattgagaatctaataaataatttaaataaactgagattttttttaagaaaaaattaaacttatttatatttgtaaactcatatcttaacaaataaagaaaaataactaaaattcaataaaaatgtaaaattattttacaaaaagttgtaaattaaactaaagaaatgttatgtttatttaaatgaatgtacattttttaagaaaaataaaatatactcaagtttattcccgtaaaatttagtttttacaaaaattaaatttaaatttttttaatatctaaatgaatt

SEQ ID NO: 134792 - DNA, 843 bp, Cannabis sativa
tggtgggactatcaagccccacaacaagcgagttggtattggaaaaaactggtatatgttaaagagcaaatcaaggggaaagtgagtgtacagcagtttataagttcaaactatacaatctctaatggttacaatttattttgcccctctcaaaggaaggtaaattggagccatggagtttggaatagacaaaacattccaagacagagctttatgttgtggacggctgttcaagatcgccttcgaactcgagcaagattgaaacaaatgaaggtcatctcagatgactgctgcctcttctgcagcaaccattctgagaccaaaaaccatctatttttctcttgtatttttgcaactcagtgtttattgcagattaaatcttggttgcattggaggattgaatcggtggatcttgatgtaatattgaggtggattgaaagatcaaacaagggcaggtttcgaaagagcttatggtacgctgttattgcttccgtagtgtaccaaatttggaaggctcggaacttaatgttgtgggagtccaaggagccgagagtcactgaggtgactaagaacatcaaagaagaaattaaaagcagatttacttatgtatggcctaaaagagtctcaaaaaatgatgctcattggtttacaggaattgtacagcaatagtgatttgggaaaaagaagggacattgtaattttgggatgtacattgtaagtagatgatgattcatacatgggaatctcgcatagaatttataggtcttctaatttgaaggcgctaatagtttgtaaaaattctgttgaggtaatgcattgctctgatttaccaaaaaaaaaaaa

SEQ ID NO: 134793 - DNA, 596 bp, Cannabis sativa
aaggatgtcgcaaactatattgggaagtttgttcaatcggatgaaatgactttcatgggcttatggcaagataattttcgtgttcgtgtgactttgaatgttacgaagccattaaagagacgtataaagcttcacaatactgctgggatcgagttctggactaactttaagtatgaacatctccccactttctgctttatttgtggaattatggggcattccaaaagcttttatccacagcgtttcgaggttggagagggtcagataatcaaattgtatggggaatggatgcgagtgagacatatacgtagaaaccacatgatcggagctaaatggcttaagcagtttaatgctgccatggacgatgattctgcagcaaaaaccacggctcgtggtgaggtgtctcgatcgacgatggcaatggttgaggagaatagtggtgtgctggggttgggtccgatgataatggaggaaacttcgggtcaacgtgaggcagggatagggtcatcaacggttgttaatggggatcctataattgtggaagatattttaccaactgctaagaataagaaaatatctaatgatatcaatgagga

SEQ ID NO: 134794 - DNA, 711 bp, Cannabis sativa
gatatgttagatgagttgcatggttcttgtgtgttttctaagattgatcttaagagtgggtatcatcaaatacgtatgaaataaggagataagtagaaaactgcatttaaaactaaacatggattgtatgaatggttagtcatgcctttttgattaactaatgcacctagaactttcatgcaattaatgaatcatgttttgcaagctttcattggaaaatttattgttgtgtattttgatgatattctaaccttagtaaatgcactttttgcaccgataagattgttttataggatttgttgtgagtgctacaggtattgaggttgatgaagaaaagatcaaggccatcaaagagtggctaaccccctcaactataggtcatgttcgaagttttcatcgccttgctagtttttacaggaggtttgtggaggattttagcaccattacagcaccgctcatagaagttatcaaaaaggatgttgcatttaaatagggtgaagcacaagaggaagcatttcaactacttaaacacaagcttactcacgctcaagtactcactttacctaatttttgaaacacatttgaaattgaatgtgatgatttgggtataggtattggcgttgttcttatgcaagaagggagatcccttgcatactttagtgaaaagctaagtggggctgcacttaattaccccacctttgataaagagtt

SEQ ID NO: 134795 - DNA, 1221 bp, Cannabis sativa
tgtcaagacctcctcccaaggtttgtttgtaatttgttattaaactgttaattattgtttaattatcaatatttatttttaatatttctttttttatgtcaaagattctcctgatgttgaggaatacgataatgatgaagatgctgagattgaggaggcttctcatgagaatgaggatgatttggaagatgatgatggtgatagtgaagagagtgagactgatgagggtgcgaatgaagagggtgaggatgaagggggtgataatggaaaggatgagaatgaagagaaggaagggggtgtggatgaggatgtttctcagggcgagaagaatgataacgaaggtgtcattaatgatccggatgatgttagtgatggtaatggtaaaggagattgtgttaatgccggtgacgtaccaaaagattgttttaacgatgagaaaaaagaaaatgttgatgctgattttttcaaaggttatagccaacttcttgttgaggatgatgatgctgttatggctggtttgaaagctggtgcaaaattttaggtattttattttttattcatttaattatttaattttttatgtgttgttgtttttttgttgtaatgttgttatttgcttcttttgtagcaatcatgtattgtggttccgtatgatccacaatcaacaatttctgctaatgtggtaacttttttccctaattgttttgtttatgtataaatatattatttttttaaaagatgtgttttttttatctatttcttttatgtaggatttggctgctgagcttaatgttgttgttgataatttagttaatgttgatgagatcactcctcctgttgagaggagaataccaaagcctagtttacatttgcagtctccttatgcacagcagttgagttcatcatctaaggctgctgttgttaaaagtaaggttaaaggtttatgtgctttggatcaatctattgtagacgatgtcaatgatgaagatgagaaagcctttgatgcttggtacaaatctggtttgcttaagagacccacgtatgttacttttatgtttatttctatctttagttgtctataagatttatttttttatacatgtgattttctattaatatttttgtttgtttttctgtttataggaagaatttgaatggtcattccgtatattttggtcctgctgataataagattgagccaggttttgattttggttgtga

SEQ ID NO: 134796 - DNA, 1090 bp, Cannabis sativa
aatggtgggaaaccattaaggtaattggttaaagatcttgcaaactgataggggtggagaaacatttggtagatatgtagttcaaatatcagtaagttaactttttgaattgtatctaaacttaaacttacctcccctacctccccagaaattccccagaaatttaatttgcatattgataatagtataaggtatgtgattagttactaaccgttgcctaagtccttctagggaaataccctatagtgataggaaaactttagagtgatggaatggttgtgtacatgtaaagaccgcttagcttaaatttggaaattagtagataattagggtttaattataaaaattatttttaactctaaattattaatttatagtgatttatttgaattcagaatgcattttatatgtcatatagtgaaatttcatatttttgcatgttaggtgcccgacaacattggaacgcggtgtatggcttagtagaatcagatcttagtactttagtttagcggggtgatatatttagacattgggaatgtccagattagtcgggaatttagaatttcccaaaatattctttagtggttttagaatgtttttgtgaggacaagggcattttagtctttttgcctatagtgtattttgtccttttgtgaggtttttagtttatttttaaatcaggttttctattacttttagtagctgatttaatgcaaataaaaccaattttataatttccattttacaaaaaattaagaaaagaagcaaaaaacacatttctctcaaagctctctctctctctctctctctctctctcaaaaattccttgggctgctagggtttgagttttcttcatcaattctaagtgatctttagctaaattcaagtgtacccaagccaaggtaagttcttagcttcaatctttttagttgcttgaattgtaagaaaatggagttttgcatgaaatgttgttttacttgctgttcttgttgctattgttagattatgttttctgtagctatattatggtattatagagtagtttgcgcaggttttgttggctagtttgttggatgagcaagctttgagt

SEQ ID NO: 134797 - DNA, 672 bp, Cannabis sativa
ataattaaattataaaaatatatcaaattttaatataaattttttaatattatgagtaattattctactaaattttttataaaaaaataaataaattaatgttgtagaaaattttatcatatgatttcttatttaaaagagaaagcaaattaacgaagagctatctttaaatattacagtaaaaaataattgagattgaacaattctcccataaaatagagatttaaaaaatatattaaatctatagaaaattcattatatgatttcaaaattgttgtcatttaaaatcgatgttatcatcacatcttaattctaatcgtcactacatcaaagttgttattatcgtatcacatttgtggtcatcactatacttgagctaactgaacatatcttgattctgaaagcaaccttcgagcataatcatatacaattaaaagattcgcttattttgtaaaagattcgcttcttcctttgcttcttgcttattttatttttcggctagatcctgtaactttatggcccataatgtggtcaactgggcttttatccataatttatatggttgtattgacgctactactattcctaagaacatttgctgtaatgaccgcgaggtctaatatattatgaatgaatgaacgttgcttttcaaaaatatataattaaaataaa

SEQ ID NO: 134798 - DNA, 1632 bp, Cannabis sativa
cttcatcttctaaggttccaagtgatatcagattcctcctcaattctggaattaatgtgcctcacattatgcagaatcttcacttcaccattaaattgccttgtagccacattacaaattttaataaccctgcaagaaacatcattacccattagtattctacgactattattggtttctttataatcaaaaaaatattctaagttggtacacatatgataatcctgaatcaaggatccacctttactattaatattttctgaaatagaaaataattccccatctgaacttccatctccattgctctcagccatagttgcagagtcttttctttgatttccatgatcattggattttgagtactagttatggtttctgttgcatctcttgtcatcgtagtttaatatgaaaccagattgtatcttcaatcgactgtagaatcttttaatgtggccaatttttccacattagtaacattgtcaattgtctttgatgaccctctctttggacttcttcctcttgcaagataggcttcttctttcctagtctccttctggagttgcaattcaaagtcctttgacttcaatgccgcatgagcacccttcaatgagatcacatccatgccatacttgattgctactttaacttcttaatctgagcaatatgattgcttgacttttttcatctaccttatgataactgttagctaaaccaacaattatttcattaaatttatcaatattatcatctaaggaaagagaagagttcattctaaacccttataatctttcaagaagattaatcttgctcgatattgatggtgccatgtatagctgctctagttttttccacaatcctttgcggtcttttcttggattagctttcttctaactccattggacaagtacataatgatggtgcaatatgccatctcttccatctctgcaatttcctttggcttcttctcagctagtaacttttcatctctaagtacttgcataagtatacccttcaaactctctcgccatagtgcgaaatcagttgatccatcgaacttctctagttcaaacctagccatcgatattctccttcaatctgtgttcttgtagaatttcttggtgagtacttgatgagttcttggtccagaagcaagtgatctttgaatctcccttgatgattgaagaaccaagctctaatttgtaggaaatttagctctgatacatataggaattaacctctgtaattctagcttcaagatcacacttaaacaaacaaatgttaaatcaaaacaaacaaattaagaaaaaaaactagcaaacacattaaaccaaaaaaacaacacatatgaatctagatagctttcagacacaacaacacatgagatttatactggttctgatcctaagttctatgtgaacttggtcatactccagtttgaaagtattgccaccaatctttattaataatgagaactagagatatcaatctcaggaggtacaaaaaaaataatcacagtataagtcatccatggtgttatccctcaacactcattaactcactaacctgagcaaatataatcgacaatgttgctcaatacaattttccaatcccagctctctctctctctctctc

SEQ ID NO: 134799 - DNA, 556 bp, Cannabis sativa
  modified_base (486)..(517): a, c, t, g, unknown or other
gaatcagtcatcgccctggaaaagaaccattgagtcctcagggatctattgaatcatcgcatgaacagactacaagccccaggaaaacccggtattgaggtccctggttgatggaccttgggtcaacaacaaccggtcacttcctaaccaggttgatgaggatggcgcctacgacccaaccaaatacataccaatcgtggaattggaaaatggccatcttaggaattgattggaggaagcaaccagacataatgccgagttagagcgtgatagctgcagtaagagcagcacgtgagaaagatacccaaaatcaacctgaccttgggagaagagatccacgaggcaaacctcgcggatcgcaaacaaaggggcaggagacaacctagagatatactcagaactctcaagagatgcaacctgaagaaattgaggaaaatctggggacatagcctgggatatgcgaacattgttgggttttatgccctnnnnnnnnnnnnnnnnnnnnnnnnnnnnnnnncttattaatatagatctgaaataacatttaatgttgcat

SEQ ID NO: 134800 - DNA, 861 bp, Cannabis sativa
tttaattaggaataattatatttaaaaattaaattaagtataattattaattaattttttgcaaattattattaaataagtttcttttagcaatttatttttttacacttaaattatttaaatttttataacaaaactttttataatttaaaattacacttataatttcataattgaaattttatcatacttatacttttaatttaaaattattacactaaattatttaatttttttatttaaatattttaaaagtgaaaaatgaaataaattacgctgagaaagaagagagggacttaatagcagatggtttgaaactgtgatagatcatggtgagaaagaagaaagaaaatattggattccacaaatgtgaaagattacgttcattttccttcagcttcttccttgaacaaaaccctcgaaaatccatagctgacacagtcttcctttcggaagtgaataaatttttggaaaagttccaaaatacaataagcaagatttgaggtggaaagacaatcaacatagctgagagagagaatttcaaaacttcctatgagttgaggatttattttgaactcaaaatcaatatcattaagaactttttcccatttagattggaccttcttttttctagatagtaaaccagctatggcccctattgcaagtggcaagcctcgacattttttgagaatcttataagataatttctctaactcttcaggacaacaatcattaaactcgtgtctatttaaaaaataactcaagagccattttattgtaaaaaaaaattatttaaaaatttattataagcttgaggcctcatcatctaattgttaaaaaaatttattataaggacaaaat

SEQ ID NO: 134801 - DNA, 909 bp, Cannabis sativa
tgcacagtatgtttaaaaatcatgtaatacgcctatgctagttagggtgttacaatgaccctacccaacgtatgtctggccagccatggagacatcacgggcggctagaccttgccttttgcaggtctggctggccatggaggagtacttggcggccaaaccctacctaatataggtttggtcagctaagcacaacaactgggcataagcctggctgacctaggccaactcccgtacttgggaatggtcagccatgctctacagggcatggttgatcttcaccatacactttcccagggtatggccagccaacccttgtctcttcataataaccaatctccctaaggagggccagtcaatcaagtcctgacaccaacaaatccttctgtgcaagcacagttggaccaactcagggacatgatccagggcatagttggcctaaagcctttagacctcgaacttgatcagtcgaggggatcaccattctcgacatatataaatgccctacctctaccaaagttcaaaatgctggtatggaagatgtataccagacgggaggacccgctggctcacattaaacactttgagatgcagctcgacctccagaaggtcactggtgatgtgaactgtctcatattcccagccacactgtcaaagacagtccaatggtggtactttaaactcacctcagggagattcaactcttgggctgagttctcacgagaattctacacataattctcgtccttgagacttgtaccgtcacagctagaagaccttgtcaaagtcaaacatcgacaaggggagcctctgaaagattatatttagagatttatggccgaggctaccaaagttaaaggccttactgaagagggtcgatatacagccatactgtggggcatactccca

SEQ ID NO: 134802 - DNA, 589 bp, Cannabis sativa
cctggaacatttttttgggaaactgactaaaaatggcccaagttgacaatatgtcaacctgggtgctgggtctattgtcaacctgggtgttgggtttagtttaaggccatttggaagttccatttggtcaccgaaaatagttgaatcttaatctttgctaaaaatggagaatatgcctaaaagacttctaaaaaatactcagaaatagccaaggttgataaatgtcaacttgggcgttgggctagccccaagtgtcaacttgggactgagcccttattcaggcacccaagttgggttattttttccccaaaagtacctatttcctcgtttttaatgaagacgaagaagatgcacgagtcagatttttgatctgatgcttggaagtggcctaggttgatagattgtcaacttgggcactagggtgcccaggcaccgggtgtcctggcactgggtgtcttggcactgggtgtccgagcaccgggtgtccaggtccttaaaaatgaacgttctctgaatctgattctgatgcctcaaatatgttcttagtatgtctagttcatgtcccaatgcaaagtttgacctatttgca

SEQ ID NO: 134803 - DNA, 948 bp, Cannabis sativa
aggaaagatctaccaaaatatagcataaattcttagataatgaaacttttattttgtcgcttgatttctttatgtttgtttgttacccttttataaaatctaaaatttattgaatcaagggatcaagaattctattaaaaataagtccttctattctccttttgggagatataatcttaatacttataccaaagtataatagaattctcatgattcaatttatattttgtaccataagagaaaggtttcttatatgaggcaaatttcaataaattcataaattaaagagctagtagaaccaatattggaaaagacttttaaattctaaatgaacaagaatgtcctaacttattcaaaatagaattcaaaaccaaaactcatctaggtgatgatactgtataagtcttttccaaatccaaaaaataactagtctttaaccatagtttgaatatccttatagcctcatatgtagatgtttcacttttgcccctaaagatgaatctttcatcatcacttggcttttagtttcatagataaccttccatagtatacttacataagaaatttcataaaaaattacttattaagtatagttaggtacaataaattaaatcatttacaaaacaaaccatagtgagaaacttattttcattagatatgtctaatgacatacttggaacactttaaccttattttaattccttttgtaaaagtcatagataattccatatctaaaatcttttgcactttctttaacagtgttccatatgcaacatactgaattttatctttgtccttatcctttctttaaacaaggtagctaaagaagcatatttgcatctttcctttacttaaaaatttatctcattggcatgagaattaactttatgttggtagatataactaaaacatgagcaaaaaaatagaacaaaataaccaagggttcac

SEQ ID NO: 134804 - DNA, 784 bp, Cannabis sativa
  modified_base (27)..(29): a, c, t, g, unknown or other
actaatcagattgtaaagagttttatnnngggcataaaacccaacagggaggttcgggggaaaaacagtatgaactcattctgaaaaggaagacgatgttgaggaggagcaggtgactccgctcaaaaggaagaagaaacttctagccgagcccaggcttgttgaacatgcaattcgaatcagggagcccggtccacctgcttggctgtctactcctgtagtaggaaagggaaaagccgtcctaaggagataagagacttctcaggtgatgatgagccttcaagtcttgctcgggcaaacgcttcttccaaagtgctagatactctgccttgtttttaaccttcttgattattatgctttcatacttctagtgcttttctctaatcatgttgcttttatttcgtgcagacatgtctcaaaagatgatcgaagctctgaagaagagagtgggagggagctcaggctcatctcctccggccaagagatctaggggcggtgagacgaccccgtccagggaaaaggcaccggccgaagcagttatcgatcttttcgaggagctaacccttgtggacccttctgccccgaaagctgctaattccaaagtctgttgaggagggagctcggacaggctcaaacagtcaaagggtcgatccgagctggccaaaagtggatctgagtagatccagggccctaccccacctccatcactgcatccggagactaagagaggcgaggatatgctcacccactacatgaatcggtcggtccctgaggtgaatgagca

SEQ ID NO: 134805 - DNA, 604 bp, Cannabis sativa
agaccaggacccaaacaaaaactcggaccccgagacccgaaataggaacaagaaccaaaataaggaccctggaagaggaattggaccttgatccaaaaccggatcaagacacagaaccgaacacagacccggacccagacagggatcaataccaggacccaggaccgaacgcggacccaaacttgcgccaggacctggggcctaggacccgtgtcccgagacctggaccataacccaatcctgtatcagaactcgaacatagacccagacctagacccaaaccaagacccggacacagacacggacacggactgaaaactgggccaagacccaaacccagaactagacctagacccagacccagacttgtaccaaaacttggactcaaacacacaactcatacccggacatagatcaggactcgaacttagacccaaactaggaccgagacctcaacttggactaggactagaagtcagactgggtccgggacagggacccgatactcaaacgcgggacctcagaatcgaacctttaaataaacccagaccaggccaagacacgagacaaggaccaatttcgaacatggaccgggacctgcact

SEQ ID NO: 134806 - DNA, 873 bp, Cannabis sativa
attttagtaaactgcattttcaaaaaagatatatcataaacgtttaagtcatatttttttaatgtaaattaatatatatatatatattttgattagttaaataaaaaaatgaagttacaaataatttttaaatcattacaaatacgatatttttttggaccaattagttatgattttgataatataccaattggttactttgataaaatcataaattttaaaataaaaagatgatgatcataccaaatatcctataatcagatatgcctatactcatatatgtccaaaaaacttattagtttattttggcatattcaaacaaattttcattcttcgtttatattttttatatagcctaacatcgtatatgctaataaatctattagtttattttgacatattgaaacaaattattatttttcttttcgtatattagaacaacaattcatttcatttcatataacctacaattgtatatgttaataagtctactagtttctgtttgttagaacactattttatttttttcaatacaaagtaaactataatcaaacataatgatatataccaataaacttattattctatttttcgtatattggaacaacaatttattttttatttcaaacaaaatgtgtgcctataaaataacaaactaattagtctatttttttttataggttgagacatcaaatctaattatatacaaagtatatgactgtaacatatcttgtatagtaaacttggataacaatatatgcatttgtcaaaaatttgaatatgataaaaaattttgctcacatgaaatgccttgctcataagtttatttggcatatatctcaaataaacatattagtttattttggcatattg

SEQ ID NO: 134807 - DNA, 949 bp, Cannabis sativa
aaaagcaaactccatgaatcaaagttgtaaaccaaactacaccaaaaggcacacgcccctcgaactcttagaagattatctaaaagacataatctaagctgtgtgatgctagtagagcttgaactgccctttgggagtctgattgaaagaagatctctaaacataacaatcatattatatctctattgtcaaagtcaatagttgaagtttgaaaagatatatatctctgttagtaaatgtctaacaaaatataatgcgtctcacttgtgctaagaaaatcaaacattctatgatatattataatatgcccaaaaaaaattgaagcggaaatacaatatgcccccaaaaaatttcaagtttttgatataatcgttaaggcactcacaatacaaagattctgtgaagcaatactaccacaactcacctcgagggaaggtgttgaagaacccttccaccaagaacatatcatcatttttagttgtcactacaaataaaacaaaataataattatatcgctattaatgagcaaaatcaaaatatatctactaattctttcgaaattcaaaactgtgtttaagaacacatgactgtaaaataaagaaaaaataaatacttactgaataggaatagcctgtccgagacaaaaggactatccaaaagacaaaatactagacaacaacaggagcaaatataagaatcaacagcaaaacatagctctcactacaacttatttatcaaaatttcactctgcatttggtagattagtatgttctataaaatttgacaagagacaggtattataccaaaataccaaagcattatgcattatttaaaattaaaaaaaaaaccaatagatagtgatgaagctttctatttttactagtaatgttatggtgagggggtcgtacataacccgccaccaagggcatgttgggttttatgccttaaa

SEQ ID NO: 134808 - DNA, 726 bp, Cannabis sativa
caattcatcaatactgaccaaaaatacaaaaataaaaattaaagacattgtgatacaagagtgaagcttaatgttacagtttggcaaataaatgagtagagattgcaaaaataaagttcggggaactactttcccatgccaaagcttgagattgagagcaatggcgatgttgatggtgatggtgacaacgatgatgaaaaattgaagagcgaccgggtgaagagagatagatcagagaaacgagagagtgggttgagtccgtcggggtgcggataggtggagagggtgagctgagctgatcatgaggttgtgagagaaatctaaaagagagtttaatttggggaagaagataagagagagtgctaattgtgcaataggaggttcattaaggtagttaaggtagggaattgaaaatagggagggaaaatttggagtttaccgccaaaaataaaatttttagaaaatgaatattgtgtgttatgaataattatatattttttaaaaaaaaataattatttgttatctttatatattggttaatattttaataaaaatatttttatattatatttttattatattaaaaataatatatcaaactaacattaatatatctaaaaaaaataatattttcattatgttaatcacattttttaaggattaaattagtagttaatgtatattcaatatagtaataattaatcttatgttttaaggtaactaaat

SEQ ID NO: 134809 - DNA, 610 bp, Cannabis sativa
  modified_base (77)..(77): a, c, t, g, unknown or other
catttaatgtaccttgagacctatttaatgtaccacagaatacattccgtgaaagtacatcacgggacaaaatcatntccctatatatatatatataaattttatataaagttgtggctatgtaattttttttccagtggaactattattttcgagtttcgacgttaactttaacagaattcctaattacttaacaaaatattttttttattaattttataatataattatatatattaaaaaataaaaattatataaatattttatataaaatacttaaaatattattgatatttttaattatatttgtaaatttattcgtttaactttaaattaaaataaaaaaaaattatcttctatacaataaaggtacctgctaaaaaatgtaactgtttgttttctatacaataggatcgtctgtcttttcactacaaaaaattttacttttagtcacaacaaaatttgtaacaaagtgaaaaaattgtgactaattataaatcatgatttctatgttgagtccaaaaagtccgtggctaaaagtatatattagtcacaaaaattacaatttgtaattatgactaaatgtatttttagtcacaatacttgttgt

SEQ ID NO: 134810 - DNA, 744 bp, Cannabis sativa
ccactcgcactaaaagtaagtgttgttgtatgttttatataactcctcttatagatgttgtatctcatttgactattctgggtaagtcttatgaacgagatcctccacagaatgtagttacaaatctcggagtctacgacatcattattggacaaatatgtagaattttattctcttatttatttatttattttatttctttcaagctcatgttttggttaatcatttaatattctcaatattaaatatttgtttattcaaaactattgttttgaaattgattaatctataaccttctagtagtcacatctaatttattctattaattatgataattaatgaattctatagatccgatgactaattaagtccaatgttggaatgaacaattctatttcacatccttacttgttttatatcactaatacacttaagttattttaatatttaagattacataattaataagaatagttatttctgatttcataaacgatactctaacaaatatatattcttaaattaaatagctctttaatcttaaattctaataacttgtcacaaatggattcacctctcgaatggtcttttaaaaatatgaaacactcgtacttttataaaaatattaattttatttaacgtggaatttataatgttgcatttttatttaatacttgaaaatattcacaactggccagttttcgtacaaaagacataataaataataaataaaaataattgcaa

SEQ ID NO: 134811 - DNA, 1232 bp, Cannabis sativa
  modified_base (1177)..(1200): a, c, t, g, unknown or other
gagagagagagagagagttatcaaacttagaggcttcgaatgaggcttttcacttaggttttcgaggattgagttaaggccctttatataggagagcttaaatccaaatttaacaataaaataagtagatatttgcatattaaattaaataaatacaaaagactaaaattcccttaaacatagatattttttatctactttattgggttgttaaggccaaattcgcgtgtaaagctgggcacaaaatcttatcaggtccattcctggccagctagttcctacaagaagcaggctggtcggccctagctggtctgtcacttgttgtcctgtttgagcatcgggacccttgttggctaaggcgttaaattgaccttcttgctggtgagttgtactaccacatagcactgattttgtccacataagaatgccacatcaggtgggcaatagtcgggataatattttcccccaagtctctatgtagacatctgtacaaatagggacttactaattaagttggaactgatgtagcctttcctaaatagaagttactgtatttttagccttttgaaatacttgcttttgactgtctaatcccatttgttggagtaaactaactgttgttacatgtccctttgttgagtatgtgtggcaagtacaggagtggtcccacatatactatttaagtgcttttgggggaaaactctcttcacttttcaattttcactctctcactagaaagtaacttttgaagaagctcctccttctctctagagggccaaacccacatagcatcattctcctgagatttttgcgtcgttttgacgatccaagcttcccatcctctttaccaacgatttcttattatgggtaagctttctatttttactattcacttgatttagttaattttgctatgaatgcatgaacattattctttgctttgaatgtcttttgattcccacattagattgttatccttttggtattttgattcgcatgatagtcttaggatatgtaatgtgtgatttctagacaaaaaaagatcttaatctgaccttcgctgtgattcttggttctttcagtcacgaagaacgtgtttgagttcttgaaaaaaaaaacataagtttggatccatacacatcctagtcggccaaggaggtcttgtttaagacttggnnnnnnnnnnnnnnnnnnnnnnnngtctggccagccaagggggatacccaataggc

SEQ ID NO: 134812 - DNA, 1304 bp, Cannabis sativa
cactttttgaatttagcatagagcttatgatcccgcaaccattgcaaaactgctctgagatgcaactcatgctcctcttctgactcaggatacaccaaaatgtcatcaacaaacatgatcacacatctatccaggtaatccttgaacacctgattcataagatccatgaattctgccagggcattggtgagtccaaaggacatcacaaggaattcataatgtccataccgagtacgaaacacagtttttgggatatattcctctcgaattctcagctgatgatagcctgagcgaagatcgatcttggaaaagaccgtcttccccttcagttgatcaaatagatcatctattcgaggtaaaggatacttgttcttgatggtaagcttgttcaactcccggtaatcaatacacatccgcagagtcccgtctttcttcttcacaataataccggagcacccaaaggtgagtagctcgatctaatggatcccagattcaataactcttacaattgtatcttcaattctttcaattctgctggagccattcgatacggtgctttagatattggatccgctctcggaaccaactcaatctcctaggtaggaggcaatcccggtaaatctttcgaaaagacatcaagtcgcataccaatcttgtattcacaggccctgatgtcataggttggttggtctccgctgcagtgactatgaatcccacacaacctctgctcattaggtccttaactttcaacaatgttattcttggtatgcgtgcccgctgaaccttacccacgaacattgctgggttagcactatcgggctcaaacaccaccatcttccgtttgtagtcgatcgttgccccatacttagagaaaaaatccattctcaagattatgtcaaaatcagacagttgcaattcaattaaattggcggtcaattcacaatcggcaatccagaaggacaaagactgaatccacctaatggatactataaggtctcccgagggtaacagggtaacaaaacccgaagcatatatatcacattgcttatggaaactttcaataactctactcgacacataggagtgagtagctcccgaatcaaacaacacagtatatgaacagccattaatagacaattgacctgtcacaactgacggactaccatcagcgtctgcctgggtcatggtaaaattcgcctcgagttctatgtagtattcttcttaggctcctctttcttagcctaaggacaatctctgataaagtggcccaccatgccacactggaaacatgtcttggcctgaca

SEQ ID NO: 134813 - DNA, 569 bp, Cannabis sativa
aaattaaaaaatatggcattattgaaaaaaggatacatggttgaaataaaggcaaaattataactagtgaagggccattagtgtggccgaccacttagtgaatttttcctattattttattattttttaatccatataattaaatcttaaaccctaactgaaatactataaaatgaacatgatgctctcattctcatccaaactaaacctagttttcattctttgacaactagtagatgagagactccttttctataatgattttgaatccttattcattgttcttcatcattttgagacatagtgatagagtaccatgcccacgcatagcaagtcaaactcaatcatagtgtgaaagacgatggtaaccaacctgaatgagagaaagagatccaaactcagatcttgttattactttgcgacaaaaaagaacaatggttagagatctaagcgaaatgagtcacattattctgctatcatcaatgtaaggttttcaaaactctaatgtgttttatttcatcgtattagagaattcatatttaggttgttaatcaacatacatgttagta

SEQ ID NO: 134814 - DNA, 819 bp, Cannabis sativa
gtgaatgatgttttttttttcctgttaatggagatttttttggtaggaataaatttgatttgtagtttaattttctatggtcccatacaaataaacgtttttatttggttttaattacacatactattcaagaatctaatctcataattaatggaagaaaatgacacatttatggaacaaaatagccgatttccttttttgattggtcggtaagtaatatttttgataataaggtatagttgctgagttgtcacattattaaaattatatataattactcaacgtcacttatgtcattaatatgtgttttatgtatataaataaaaatttccttaataaatttaggtgatttagatattcattattaatattttataatataattggctcattaaaaatcttaccaaaaaatctaataagacaaaaattcggtcaagtaaaaaaaagcgtgctaaaacttttattataactcatacaatgtaaaatatttttttggacatagtaattagaatcacacataaatttacgaagtagattttcgcagtcggtgcaagaccctcctcaaatcaggattactcatcgtctaatcgaaaaacgtactttgtcaaaccattgactactaaattcttaaagcaaactacatggaacaaaactgctcccaaaaatttaaataataaaactataaagtgttcaaacagcacacccagtacattgaaatacaccttccattattaatagccgttgtcagagctagcaaattcaaaaaaaaaaaaaaaaatcgcaaccccaaactataaaacaaaattatattagaatgac

SEQ ID NO: 134815 - DNA, 578 bp, Cannabis sativa
caactttttacttttattgtatataatttttgttttaaaagtagctagctaataaattaaaaaaaaaaacaattaaaatgtctcaaaatattctacacaacaattaataagatgcactttcttttctagaattttctaattaggtgcgaaatagtatagcaagaagtaataaatagctaatagtattggaatagaaatagtttacatataagtataattataatttatgtagttaattgaattcgttcttaatcaaattctgataacatcatttgtcatctgatcatatccaatttaaatttaattcactctaattataattagatatctaatttatgatgaaactggattagtttctatgaacgcagtcataatagttaatcaaattacaataagaattaagattatatacaatacaattattaagcttttcatatttagatagtatctttttgtttctttaatttcgaatcatttataattaattatttagttgtaaatttgcaaaaataaagtattatctcttcacaaaatcataagtaaaatgatctatcgagtaattatttatgataatggat

SEQ ID NO: 134816 - DNA, 1261 bp, Cannabis sativa
  modified_base (1209)..(1216): a, c, t, g, unknown or other
tgtgtttggacaaggtttgagctttagagctcaaactttggtctttagtggtgatttgagtttctagagtatgtttgttatggtctatttagcaggtctggaaggtttggtagcatttgggaacgaattgaggctgttgtggagttttaggtgtttcctacactgaactggtcgaccgatttagtgggacctataagaaccggaattttgattggtccccaggaaaccccatagaaccggtcttccggttggggaatcagtctgccggttagggcagttttgggaaccctagtttttcacgtttttgcgatatttaaggtatttctatgttatccatcgataaggaaacttttagtttcaattttaagtccctgaaaagtgatttagcatgtcactaatcagttttacgaataatgtgatttaggggcctataaatcgtcgagcagcagttccacttaggttggccgacacacctgaatttggaagtgatgtaagattagtataatgatatgcatatgtgtttacatgtttagtatacatatttattaagcctgttaaattacatcgataacggtatctatatacgtagagttatattaaatactgatagatgtatgtttggctaagatactgatcgacgctttcacacctgtacgactagagtatgactagcgtactgagtataggcctatattatggtcgatagttttgtcatacaaatgttctagactcagtactgtgtgggacacggggatacgactatggttgagtgtatggacgcctgattataatccgggttataggtatgttattgattatgtttttcttacagagtctgtcgactcacatatattttttgcatgtgtaggtaagggcaaggctaaggttgagtagtcgtgagagcgagcagatgaagattgtatatgtcgggacagttaggcctggatcgtacgatctttgggacagctgaacatattttgtatagttgtcagatgacaacttttgtgtctagtactgaaaacgattgtaaatattttgtacacaggatctcggttatatatatacgttattttggtatttataagtatttaaacaaagttttaattcatcatgtttttcaataaactcgttgagtagcaacgagttgtacaataatcacgataacacgctaaactaataaggtgttacggttgggttttatgccctaannnnnnnncatttcatataatcagatttacttgttaataaagatcagaaataa

SEQ ID NO: 134817 - DNA, 665 bp, Cannabis sativa
ttaatagctaagtaattaatgtcggtgtgcttcctttgactttcacttttgttgttcttagtcaagaaaatagcagatgatttgtcacagaacattcttaatggccttgatatggaatcaacaactctaaggcctaaaataaaactctttagccatacaccatgagatgtagccttaaaataagaaacgaactcagtctctacagtataagtagtggtcaatgtttgtttgttactcctccatgacacagcttcaccaacaaacataaacatgtaactagatattaatttatgtgcatcagtacaaacagtgaaatctaaatttaagtagccaacgacttttagattatcagttcgtttgaacacgagtttgtaatcattagcatcctgaaggtacctcataaccttctttgcaactttccactggtctattctcgggctactctaaaatcttcctaacactttgacataataagcaatgtcaggtcttgtgcacacctgagcatataataggcttccaacaacagatgtataaggaatgttcttcatatattctcttttaaaatccttctacactggcttaaattcaaattatcacccttatcaatggaagcaatgctcagtgaacaatctttcatctgaaaactttctatgactttatttatg

SEQ ID NO: 134818 - DNA, 891 bp, Cannabis sativa
gtatccttacttgggagtgggagaggcactgattcatgggttgaaattcgtcttgatcgagctctcgttctttctaactggttccagagatttcgtatggctcaactgcataatctggaagtatctgcttcagatcactgcccgctgcttcttgaaccgacggtgcgttctgtgacggtgccgttccgtcaatttcgtttcgaaaatgcctggcttcgtgaaccgttgtgccgccaggttgtaaaagatagttgggacctttgtgaaggtcagcatgttatgaagaaaatctcttattgtggggaatctcttcaagtgtgggggcgagattatacaggcaattttaagcaacgaattagccactgtaagcgggagatccagtattggaagaaggggcgtgatgctatatccatttagaagttgcccgaggaggagctgaatcttagtgaagttatgaaccaacgagaagtattttggcgccaacgctctaaacagttatggcttcaagaaggtgatagtaacagtaagtactttcatgttaaagctacttctaggaagaaacacaatactataactcagcttatgaatgatgtgggtcaatgggttacttgggaggatgagttgccgaatgttatggttgattacttcaataatttatttacttcaaatgtggctgattactcaactgtggtagaggagattacttcttcaattaccgtggatcagaatgtggctttacttaggccggttttggaggaagaagttagaagagctctgtttagtatgcatcctgataaatctcctggtctcgatggtatgacctcaggctttttccagaaatactgggaaatagtgaagagcgatgttgtgaaccaagtttgccaatttttt

SEQ ID NO: 134819 - DNA, 1016 bp, Cannabis sativa
aatataccttgaaaagaagaataatttcaattttttaattagggggtcattttaacaaaatttaactcgaatccaatcttcatattcatgtcttagtagtacaaattcttgcaagtagtggcaaaaaatattcttcgatggctccgggccacatttcacaaagggctaccactatcagaaatgtgtgattttcactattgtgataaaaattatcattagtgcatgaaaacaagtttatatcgcaacgtgtccatcagaaaattgatgcacaacattcttgcttcttcctcgtaaaatttcacaatttttgagatgtgtagggtgagaatttaatagaacactaacgagtgtaagagtaaataacttgttgaaatttaccctgtagagaagaatattttcaattttttaattagggggccattttaagaaaatttaacgcgaaaccaatcttcatattcaagtcttagagtaaaaattaatatatgccattacattcgttgatacgtattctctaaggttaacacgcgtcatcctctatcatgccagtcggatttcaggtataatagaaggaaataccattccagactaacaagataaaatatttaatgattttcatcaataattaatgcatttaaaattttatcttattttcattgatattcccattccctgaaccctaaaccctaaacccaaaaccccgaaaccccgaaaccctcaaacccttaaaccgtaaaacactaaaccctaaatcctaaacgccaaaacccaaaccccaaaccctaaacccaacaccctgaaccctaacccctgaacacaggccctgaggtggcattttgttagaggtaatgaaatggaatggaaaagaaataattttcattccattcttttgtttcgaatctttttaaagtcttagaatgtaatcccaatagaatgacctttccaccattttggtggaatgaatattctatttcgaaatggaaggaacaacaattatcatgtaacatgagaaaaaattt

SEQ ID NO: 134820 - DNA, 1974 bp, Cannabis sativa
  modified_base (1152)..(1153): a, c, t, g, unknown or other
acaaaaagtgttcaactccatggatgtcactttctttgaggaacagtcttattatcccaaatttgcagttcagggggagaatcataatcaagaaatacaaaattggggaaattgggactttgtttcacacattgatcctcattcttcttttgacaacaccaatcctcattcttcttctgacaacacaattgcttcaagcactcatcatcactctgttactcatactccaaactattcagtcaaatcacatgagccaagaaatcctcatccaattccttccttaagtcttgttcccatcaacgaggaccgactcaaccattcagccaattcacatgagccaaaaactcatgtccacatccaaaacaaagaaatttgggtttacccaaggaaaaagaaaaatctagccaacattgaacaagctaccacgaaaactcagcaatgtcatgaatataatccgattccattcattcttgaacaaacacaggaagatgctcgagttgaacctgttgtagaagaagatgtgtctgatgatctaagcattcccattgctctcaagaaaggtgttcactcttgcactcaacatcccattcacaactatttgagctactcaagcttatctcttacctatagagcttctatcaccactctagatcaagttgagattccaaattcggttcaggaagctctacaggatcccaattggaatgttgccacaatggagaatataaaatcacttgaaaataataaaacatggatcatcacagatctgccaaatggcaaacacacagttggttgtaaatggatattcttggtcaagtataaggctgatgggagcattgaaagattcaaagcccgattagtggctaaagaattcacccaatcgtatggcattaattaccaagagacatttgctcctattgctaagttgaacaacattcgagttctcttatctattgttatcaacaatgaatggcctttactccagcttgacgtaaagaatgcatttcttaacggcgaccttgtggaaatatacatggagattcctccaggatttgaggatcgattctcaaaaggaaaagtgtgcaaactaaataaatctctctacagcctcaagcaatcccctcgagcctagtttgacaggtttacaaaagnnttgaaaggagatggttacacccagtgccaatcaaatcatactttgtttattaaacacccaattggtggaattttaacaacattgattgtttatgtcgatgatattgtgattacaggtaatttcgtggaagaaatttctcatctcaagcagcttctctccagtgaatttgagattaaagatctaggccaattaagatatttcctagggatggaagttgcaagatccagccaaggtatctcagtcactcagcaaaaatatgtcattgatctcttacaataaatagggatgatcggatgtaagccaagtgaaactccgatggaccctaataccaaacttgaagtacagacagaaggaacaaaagttgatcgaggaaggtatcaacgtcttgtgggaaagctaatatacctaactcacactcggtctgacataagcttcgttgtgagtgttgttagccaatttctcaataaaccctttgaggaacacaaggatgccatctaccgtattcttaggtacctcaagggaacaccagggaaagggttaatgttcaggaaaatactcaacaaagatcttaaaatatacacatatacagattgggctggttctctcactgatcgaagatccacttctgggtactgctcctacgttttgggaaatctcgtatcttgacaaagcaagaagcaacaagtggtagctcgcagtagtgcaaaagcagaatttcgtcccttagcacatggaatttgtgaaggaatgtggctgaaacgtcttcttgatgaactcagaatcaaacttgaaggcccaatagatgttctctgtgacaatca

SEQ ID NO: 134821 - DNA, 502 bp, Cannabis sativa
gtaagaaaataagttgaaaataattatatggatttatgtttaaggaaatgagagaattgaaggtttaattttcaagacaatgcatgcatgcatgcattatacgacccacaaaattatgaaaaaggtccatatgagataaaaacccaatatataatgtaataattaaatccataatgaggtctcccatttcctacctttaggcagcttctagagtagttagagcataattttaattttatttaaatatagtttcttaaaacggctaaagagccattagcaaagtgtgtattagtgattcaagaatgtggtgttaatttaaagttgtgtttgattgaaagtaatgaaatggaatggaaaagaaataatttttattttttgtttagttgcattttaaaatattgaaatgtcattttaatgtaatacttattttaatgtaagggtaaataccattttggaccatttgttttacaaaagttaccaattggactctgtgttttgttaa

SEQ ID NO: 134822 - DNA, 644 bp, Cannabis sativa
aatagagttttagttagggcacaaagcccaagaaactcccacttgcactaacataaaactatcagtacatttcaattaatcctaaattcattgtgtgcttttcaaatgtagtgaaagtcaaaactttagtgaatggatcaggttgtcttcagtatccactttctcgaccagtacgtaccctcttgcaacatattccttgatgatgtggtatttcctctctatatgtttgcttatcttggcttcgagacactttactgttgtctattgcaccagtgttgtaagaaagtaaaaccaatggtttttccattctaggaacaacaccaagtcctgacaataactttcttagccaaacaagttccttagcagcctcagtagtagctatgtattcaacctccatggtagagtctaagattgcagtttgcttagcacttctccaaaaaactgctccacccccaagagtaaacatcatccttgtagactttctgtctcatgacaagcttaaaaatcttaatcggtatagcctatgggatttaaagcaccacccttgtagcctaacacataatgcctagtacattttaaatatttcagaatatgcttaactgcagtccaatgttcctctcttgggtttgtctgatacctgctca

SEQ ID NO: 134823 - DNA, 3048 bp, Cannabis sativa
  modified_base (136)..(140): a, c, t, g, unknown or other
  modified_base (643)..(655): a, c, t, g, unknown or other
  modified_base (1210)..(1211): a, c, t, g, unknown or other
  modified_base (2319)..(2323): a, c, t, g, unknown or other
  modified_base (3017)..(3023): a, c, t, g, unknown or other
gacatctggggttattattttgtagtcactgtgcgacctggttatgtattttgtgtattttgtataaaagtttaaaaacgggatcctgatacttgtaaataattttaaaaggttataaagtttaatatttaatatnnnnnttttaatttgacacgattttcaagtaagttctttgattagcaaagatagcactgtaattgaaaaattactgtagcgtgccttagcatgatcgggtgacctctgccacatttcagttccaagaagacgctctcttgtggtgggagttggtgtcccttacttgagaagtcactgtaatgacctgggaagagttccgagagttattcaacgccaagtattataatgatgcagtccgcagtgctaaatggaaagaattcactgagttagtgcaaactgaggggatgtcagttagtgctcctttatttcgtccttactcttccaaccaaacgctcgagttatcgattctcgtggaaacaatacctgttgaaacattgctgggtttgcttcccgagcttgttttcaacagattcatttcctttcgggcttcttccttccaaacgaacacttgagccctttcgttgaactcattgatgcttctcaccggacgtccttgtaagtcatcccnnnnnnnnnnnnntatggttaatggatcagtagagatccccgcctgaaggggtgtaagttgcgtgctgtcatccaaattcctaaccctagctgcagccgtgctaaaacaacttaggtacgatttaagtgtcttgtcgggctactgctttatactggttagcgaggccgcttctggttgcctatccctagaagcctggaattgtttcttgaaatccctggacagctgctcctaagaaattattgaatgatgagtaaacttgttaaaccagctactcgctgctccaacaatcgaggtggggaaaaaatacagtgtaatttttttgtcacattactcgctcgcattattgtgttaaagttattcaaatgtgagaccggatcagtggttctgtcatatgacaagacatgcgggtttttgaatcttgaaggaaaaagggtattcattatgtctggatgataaggctcaagctcctcgtcaaagtcgtatccagatagtttccctaattcccccacttgacatctcctaaacttgtcctccagctcgtttatccgcaattggattggatcctcnngctttggaccaagctgttggcgaaggtcaggtttcttccgatgcaattgctctcgcagatccggttgggagtaattgctgccaaacctcaccttagtcaccgattgagtcctactcatagactttgtctttgagtggctcgcggatttactggttcctatactttctcgatcattagcttgttgagtaatttctcctcttcgagttgatcgactatgggttcttgaccgcctcgaagtcacacttgcttcttcatgctctactctttcccccgagagcggtttgtcgtatttccctcatcagggtctgtacgagtcctcgctctatgggttggggaagaatgttggtgatttctagcaggtgacctccattctcctggttgagtcccaagatcctcctcattctcatgagggatttctcattcatcactttccagttgtctcccatctggctgttcgttcttatttttagacaatgtctcattttccttgggttgttcttcctgggcctttcctgtctcctggttcgtgagccacaaggtctgcctcgtggtcttctcattccaggttcaggttgattttgagcatccgtcccctgtgctgccctggccgaggctgcatcacgttctaactcagcgtttctacgctgcgcctcttccagacaacatctcaggcggcgattttccatttcataagttccttctcccatagactgggcacctccacgattgagctcttcatccctcgccctggggttctagccattccaaccctgagttctcctcgagcgtgttattcgcgtactaggaccaacgtcgggttgggttctccgggaacgggtggtccttctggtctgcgggctggtagatcttttggagcccatgggctctttcccagaatgaagattggtttcctcatgtggggtgttaacattttctagattttcagccatgaaggaggtggtttttcttcaaaagaatggagggttttttttttctgagctctttcacagtagtgaaagagctatagaaaaaataaaagctatagaaattaaaaatatgaacacagagttttttacgtggttttgtagttaaaattctgcatagtccnnnnntcaatcttattcagatttctgattatttttcaaggcctctcctgtatgagttttttcgtccattttttgatcttctttgtcactatttataattacatagtggacagttaattacaaagttgactggaatatgtttacaacaattatccctaaaatcatgagatttgattatatatcacgtagtgtaaatgcggtttatgatttgaaaatcatatagctgtgattttcccgctttttctgggtcataatgatcgtgttttaaatcacgtctttgattattgattctggagttgtctcgatagaagtttggttccagtgatctcgatagcgagctgaggccattggtctttccgagatcgacgatgcatgtttggtgtcaaccatgcttcttaagagttcttcgaggctcattcaaatgttatcttccagctcgtcaggattgtaagcctcgctaatgctaactagatgaagttataagaagtcttccatagcgagacaggcacctcgcttacttggtctcaagtcgatccaacttttacacttagtttgtacattgtatgctaaagactttcacgattgatatatgccgctttcgtcttccaatgtgtactgtccttgatgtctcgcgattcacacttagtgacatatggtttctcgctaatatactaagtgccagtttgtacattgattcctnnnnnnngaccttacagtcagcgggttacaaa

SEQ ID NO: 134824 - DNA, 615 bp, Cannabis sativa
aacttcttcataatttacttttaccattttctccactaaataaactcagagcaaaaaggaattttcttcaagtctgtcgtgagatttctgtcagaggcatccgagcagcttcgtctggactacgtttaggcttcacacagtgagtaagttttcaatcctcttttaactttgcatttttaatttctgagtttccatcgtagaaaatatatttgttcttgacttgttgtaaaagatacatagaaaatctaggctcgaaactttgtagttttctctgtaacagttcgtaaaacttcatgatttttgacattctggttttaatctcgcaatgctcgattctcaccttgctcattcgaagcttcatgaaatttaacatttaacccaaaaatcgctatgtgtgggcatgacactctttcactcaaggtttcgaatggtgagagcagtgaaggaggcttgaaatcactattgaaggtgtctctcatctactagttgtctcacatagaaaactaggtttgatttggatgaatagtcaagtttacaggaggatgagatgagagtgtcatgttccttttatggtgtttcaactagggcttagggctgaattatatggattaaaaa

SEQ ID NO: 134825 - DNA, 1776 bp, Cannabis sativa
  modified_base (1560)..(1562): a, c, t, g, unknown or other
atgaggtgactgccttctccaggtgactgccttctccagcaatactgccttctccagcaatgtacatattgacctcaccggcctgcgtgcttagttgccaggagttattttggactggatgtatctgttgtattttgaattccttttgtctaaagtcttttgtaaaacgttttataacaaggatccttaggacacgttttttatgccgttgtaatgttcgttttcagtcttttattttagtcaagtttttaatattatcacagttttaataactaattaatcaattagtattaaattagtttgtaaaatcacatacgtggcgtccctatggaatagggcattatcagaggagccaaggttttaaaggtcctaaagactggtcaaatatgtacatttgctgcgaagagaggtcgattcatggtatagtaagtgtttatattatttattattgccttacttgcttagacaattatagtgtatgatggaaagaagtagtgtactgactatctatactaagaatatgtgtatggtatattcatattgatattgatatctgttatacccaaaattcggtagccatctcaatggatgacacgtgtcacgataaggggaatatggatcgatgaaatcgctttatatggaataactcattaattacgtgagtatcagagtatatttgtaacctacagactataaggtcttatacgaggaatcaatatacaaactggtgcttagtatattagcaagaaactatatgttgttgaatgcgaatagcgaggcatcaaggacagtacacataggaagacgaaagcgacatgtatcagttgcgaaagcccttagtatacaaactaagtgtaacagtcagatcagctcaagaccaagtaagcgaggtgcccgtctcgccatgggaagacttcctataacttcatcaagttaatgtcagtgaggctcacaaccctggtaagtcagaagctaacattcaaatgagctttgaagaactctttgtaaataagaatcgcgatcgacaaaagacatgcatcgtcgacctcggaaggaaaaatggccccagctcgctcttgagatcactggaaccaagattctatcgagacaactccagaataattaaagacgtgttttataaacaatcattttgacccagtaaaagtgagaaaatcagagctatatgatttttaaatcatgaccgtatttacactacgtgatatgttatcaaaccctgtgattttagtgatgattgttgtaaacatattacagtcaatattgtaattaactgcccactatgtaattataaatagtcgtaaataagatcaaaaaagaaaaaaaactcatacaagagaggccttgtaaaacaatcaaaaatttgaatcagattgactcgtggactatgtagaattttaactgcaaaactatgttaaaaaactctgtgttcatacttttacagcctttattttttctgtgtgaaatttgaggctcaaatttagttaacgaaaaatctgcgttaacagtttggtgctttcactgagagcctctgtgaaaaagctnnnaaaaaccctcccttcttgtgaagaaaaaccaccttcttcatgggtaaaaatccagaaaatatcaacaccccacatgaggaaactaatccttgttcaaggaaagtgcccatgggcttgagaaggtctaccaacccgcggtccagatggaccacccgttccaagaggactcaacctgagggtggccctagtacacggaccacacgttcccagagag

SEQ ID NO: 134826 - DNA, 1337 bp, Cannabis sativa
atatcaaggtttaacgaaataacagaattagaccattttacccctagggctacgagataactttgcggggaaataagggcattttagtcttttcaccctaatagcttagtcactcttttggaagggataggtggttgtggctcatcctttttaggatgaccagctgcttaggaagcaaacaaaaaggaaaagcaaaattaaaaggaaccaaaaagaaaaagcaaagtcaaaaaaacaccaaatcaccttctccttctccctctacttcgtggcttctgaaccagggccaaaactcagattttaaaccattttcaagcctcttcctagttggaattcatcaaggagttcaacccctagctcctccaaacttctaaggtaaaacctaacctgaaatttattggttttctagggttttgtttgtttttagtggttgtttataatataaaatgttgaataagtttaggaaggttatgaaatgattattaaggttatttaggactgtttagaagtggtttgaattgttttgggtagttgtagcaaaagttatgcaagtttgagttcaaagaactcaaacttaacttggttgtgatgacttgaattctattgcaaaatgggttaagatttcttcatgaaatatgttcattatgatgtgtttaggcgctctacaaaatttggtaatgtttggatccggattagatgggttatgggatttccaaactcggacaaggagtttcgggccatctgatttaggcagttttaggacggccatttagtttgatttctattgagattttgattaagttttcttcatgaaaaatgttcattgtgatgtttttagatatcctgcaaaattttgtaacgtttttcttagaatttcaggagttatgcaagttttaaaatgggatagttgagtttcgggcgattcgatttaggcagaatttggggttccataatcttgacttttcctaggacccaattgagttttttctatgtacttagggtatttccatgatgtatatcactaggaaaagttttagttgtaaatttaagttcccgaaagtgttagggcaacacttatttgtttttttggaaatgtgacttagggccttcgattacctgcagctatttccactaaggttgaccggcgcacctaaaatcaaaattgaggtaacactagtatagcacacatacatatgtacatgttaattttatgtttttagatgtatgacatatacgttagaatgatagttagtgtatatatgattgcctcttgatatcgtgaatgtatgtgtttggcaattcagaaagtatgaaccaatgctaccaatactagtacg

SEQ ID NO: 134827 - DNA, 577 bp, Cannabis sativa
tattttagtatagcggggcagtatggttagacattgggaatgtcgggattagtcgggaagttagagttttcccaaaataccctttagtgctttttaatccctttagtgcgggagggcaaaatggtcattttgccccataagcttttgtcctttagtggacttagtattatgtaattaatggttttatttttgttaaggttggctgaaataagataggttgtaggctatttttgttcatttattcaaagattaaaaaaattggaaattcaagagaattgcttttctctctttctctctttcggccacttcttgagcagctagggtttgaattacttttctgcatttccagcaagaatcttcaaggttttgaagtgcttaagctctaggtaaattcttttagagttttctttagtttcatgggttttaaggaaagaaaattttgcatgcttggtgattttgctatggtggttggtgtgattatttgttgttgttcttagaagcttaattatgttttaatatgaggatttaagcaggttgttgtggttgtttgatgattttaagcaagtttggattttaa

SEQ ID NO: 134828 - DNA, 1100 bp, Cannabis sativa
  modified_base (413)..(427): a, c, t, g, unknown or other
  modified_base (950)..(952): a, c, t, g, unknown or other
ctatttcaaattaattattttttagaaaatacataataataaatataaactaaattaataatattaaattaaataattattcaattatttatatgtctgtattaataaccatatatatgtgtgaagttttttttttttactttacagaatatagaaaaagtgcttttattttttatagaaagaatttatatgaatcaaacattatgaatggaacaacaaaaaaagcaggtgtgagattatgtagaaaaagaaacacgtgtgagattatgaatcaaattttttttataatgtattatttttatatcccgatcatataaagttgatgtcatcattgtatagttcctattgatatcctcaaatttttaaatttaacactcaatttaacgtcctgttagttgatcaataaagtatcnnnnnnnnnnnnnnnattggccaaactaataattcttttagaaaagataattttaaaaaacaaaaattaattaaaataaattcatattattcaaaaaaaaaaaaggaaaaaacattgtatacatattaaatgaaataaaatcaattttttcatcttcttccagtcataatatctttatagattaacaataattttttttaaggagattaacaataaactttaattctcgattcaaatgttatttttcaattctattttcatatattcaaaattctcattccataaacttactactaatatttttcaattaataaacgaaaaggcaactttaattcttgtatgaaaaatcaaaatctcaatcccaataatcaatagaaacaacatcaaatttcaagttctcaaaatttataaaaataaataaataaaaatagatctcataaacacaaactcaaacattagaaccccagtaaaacactaaaactcacattaaaaaacacatacaataatattcgaacctagaacttaacacacacatcannntaaaaattaaaccataaatgaggatttatgctactatttttttaatttcggtatttattaacaataaatttaatattttaagtatttatgtcacaaattttttaatagtaaagttaaaattttaatataattttactaagtaattatt

SEQ ID NO: 134829 - DNA, 550 bp, Cannabis sativa
aaattataaaccttgacaatatttttctttggaaacttcaacttaaacaacatcagaggtcttatcacctacctgaaaatattaggatgacaaagttaataaagcaatgaactgataaaaatacaattaatagttataaaaaactgtaagtatatcatgtacaaaacaacataaaaacaacaatacaactaaaaaaaataaaataattgtaaaacttaataaatatgcaactaaaacaactccaaattaaaattcaaatacaattgataaatgtaagacctaacccaatgatctaaactttttttttaaaaaaaaaaaaaattaagaaccctagaataagaaccgtataaagactaaattaaaactgaaaaacaactaattagaaacagaaaaagtgagagacataaaccatttaaggttgaacaattcttctaactgaatacatcagaaaaaaaaataaaacataacaaagtaagtctttgaacccaaacaaagataaccaaaactaatatactaatcttttaatttgcaacctcatcatcattatctc

SEQ ID NO: 134830 - DNA, 1000 bp, Cannabis sativa
aaacttggtattctatttatctctaatatttatcccactaagaaattgttctagacttacccatgtgactcaaatggccatccatcatatttttcgtcgtcgccgtgcaaaaattataaaaatagcataattcatatataacacaaataatacctctagagtttaataaaatctctgaaattgagaaattataactcagtgcccacttttagtaatgggatcgacaattacataaattcatgaataattataaaaatatttataattaacgctaattgcatttactaatccatattctaaaatgtggtcattacaattatcccctgttaaaaggatttcgtcatcgaaatctaacttgaatagctctggattttgagtcctcatgttagactctaattcctaggtggcttcctccaccttgctgttcctccagagcactttgaccaaggctatggtcttgtttcaaagaacattttcctttttatcaaggatctgaattggttgttcctcgtaggataagtttgactgtagttcaagggcttcgtaactcaaggtatgagtcgagtctgaaacatatttcctcaacattgaaatatgaaatacattatggatagttgataacgttggtggtaaggctagccgataagctacctgcccgaccttctcgagtatctaaaatggcccaatgaacctagggcttaactttcccctctattcaaaacgtccaatacccttcactggagaaacccgcagaaaaacatgttcgtctgcctgaaatgtaacatctctgtgcttcgaatcagcataatttttttttcttgctttgcgaagcaagcatccaagccttaatctggtctatagcttcattggtcttttgaacttattccaaaaccaagtacttcctttctccagtttcgccctagtggattgaggagcgacatttcctaccatacaacatctcataaggagccatccctattgtactttggtagctgttgtt

SEQ ID NO: 134831 - DNA, 510 bp, Cannabis sativa
  modified_base (345)..(364): a, c, t, g, unknown or other
gttatatgactacatattgttttcttgtatgaagccttctgcaacacttgtggcaccaccactttcaaacaagtgctttgcttcttctgtaccacatccgaagcccatcataaggtatgaaacaattactaatggggaaaatgatcaaaaatctaattattattattacaaaaacttaagtgtagatttgtcataagtttatggtaatgatataattaactgtccagtattttttttttttctcatgtttttcacttttgcagatttatcatcacttcgtgaaggaagacttgttataattgaaacaattgtgtacataccaaattaattattattattattatnnnnnnnnnnnnnnnnnnnnttattattattattattttaatagattttaaaagaagaaaaaatgaagttagtaatcaatagatttttattagggctatttacaaaaatgtgggaaaataaaagtaagttttgatatatatatggcataaaaacttaattacacta

SEQ ID NO: 134832 - DNA, 1284 bp, Cannabis sativa
acaccaatcttgtattctcaggttcagatggcacaggttggttggtatccactgcagtgactatgaatcccagaaaacctttgttcatcaggtccttaactttcaaaagttttattcttggtatacatgtcccatgaactttacccacaaacactattgggttagcactatcgggctcaaacaccaccatcttccacttacagtcgatcgttgccctatagttggagagaaaatccattccgaggattatatcaaaatcagacagttacaattctattagattggtggttaattcacaatcatcaatccagaaagacaaggatcgaatccacctagtggatactataaggtctctcaatggtaacagggtaccaaaccctgaagtatatatatcacatggtttatggaatctttcaattactctactcgacatgtaggaatgagtagctcccgagtcaaacaatacaaaataagaacaatcatttatagataactgacttgtcaccactaacggattagcatctgtatagtcaaacaatacagaataagaacaatcatggtaaaaagtcgtctcgggttctgagtagtattcttcttaggctcctccttcttggcctgaggacaatctctgatgaagtggcccaccatgccacactggaaacaagtcttggcctgacattcaccctaatggtgtttcttgcatttcgaacactctggatcagatcgaaatgaagatccgcgaccatgacggccacctctgtttcctcaaaactttctgttatcccctgatgttctggaagcatcagccttccgtttgtgatcagggttaccactgtcggtccccttattgacattaccactagcaggaagattcgatgccatggcgacatcctttgcagtctgctcttttattacatgctactcaacctcttcaccaatcaaggctagctgtaccactttcttgtacaaagtttcatgtgaagtggtaattttcaagtctcgactgattgtggcattcaatcctctcacatatttctattttctagtgaaatctgtgggcaccaaatcaccagcaaacttggacagccaatcaaactccagggtgtactcggccacagacatcttcccttgagttagcttcacaaaatcttccatatgtgaagtcctcacagcaataatataaaatttatcttcgaacaaattcttaaactcatcccaagtcattacattgacatcacgagtctgtcccacaatatcccaccagacgcgggcatgatcttgtaa

SEQ ID NO: 134833 - DNA, 1106 bp, Cannabis sativa
tatggtatatatgtgccctataatatttagggtggttataacagattctagtagtgtttccgtgagtgtgtatacttaaaaaattatattttttgctcctgaataaccagtcaactagttgagaaccggtcaaccagttctggccaaccggtttacctttttgggcagcctcgggaactcgagaatcgtatttttaccctaaattttcactcgggtgtccgttttagacgttctatatactgtttcgaagcttgcgacgagctctaccgtatggtatatgttttggagccaaaatataagttttattttagtgtacttaaattatagggtttggtaggaaaccctaggttgtcctttgcaattgttaagcagtattttgggataaacacttattggtttatcattattatgacatagaacccaggatcatcgatcgtactccaagcaagtcagccaacatatctaaactgaaacttgagataagaaaagtatacagtactacatggcatgacaagttcttaaagtataggcaatgataatgtgatgatactatggacataatacacgggctcacctgattaggtgatgcaatatacctggcgacgtaccggacgtaggtacaggcaacagtgatatatgatgagtaccgagcataggtacgggctcacctgattaggtgatgtgatacacgtagcaacgtactaagcgtaggtacgagcgtcagtgacatatgatgagtaccgatcataggtatgggctcacctgattaggtgatgcaatattcctggcgacgtaccgagcgtagggtgttagtgatatgaaaaattcctggttatggcatcaatcaaaactgttgttaagttttttcttggcggcgtattttattagatacaagcgacagtgatatatgaatgctaggttatggcatagattgaaaccgttgctaggtttcttcttggcggcgtaccttattaggtacgggcagcagtgacatatgaatgccaagttatggcatagatcaaaaccattgttgggtttcctcctagtagcgtacctgattaggtacgggcgggagtgacatgtgagtaccaggctatggtacgggc

SEQ ID NO: 134834 - DNA, 1004 bp, Cannabis sativa
  modified_base (357)..(363): a, c, t, g, unknown or other
  modified_base (534)..(537): a, c, t, g, unknown or other
taatttggattttttttacgaatgaagttatgattttttttaatttgaatgaaaatatcttgttttgggaaacacaggtgcgcgcgcggggatgtcatatcacctgtctgaagggctgctcacgccgagctccctgggccaacataggctgcacgcagcctcttccctcgtccattccattgcattcgcgcgcgcaggggtatgcattgcatacccatgtgcccaattttatttttgtcatatcttttgattcaaaaattatatttcattgaaacaaaattcaaattttagtagaattttgtgtagaatctgaatgttcaattaaaaatctaattatcaaaataaaattaatttttnnnnnnnttttaattaattaaaattagtttttgatattagtagcctttaaattagaaaatttaatttttcacaaactagccttatcgttaattttgaaatatttaatttatttattttaattataaaatcatattttacttattttattatttaaatttgaaatgatcttattttgannnnaaaatattaataaaatttagaaataatctagttaaaatttcaaatttgctaaccatattagattttcaaaatttgatatttttttgaaatatatttagtcaattaaattataagattaaaaaaaattttagttttgacattttatcttattggatatttattttaattaaaattttatttttggcaagataacataaaattttgaaaagtttgttaatgttcgtttgaatagaaattttagggtttccatagggtttccaaccataaaaatttcaaaatttcaaacttttcaaacttaggggatattttgattttgttttatttaattattaaataaaattgataatatcctaaccatccaatatcttatttttttaaattatttattttttattatatttaattcattatattataagattaagaatataatattagaaatatctaaattttaaattaagatatta

SEQ ID NO: 134835 - DNA, 709 bp, Cannabis sativa
  modified_base (27)..(34): a, c, t, g, unknown or other
ttaaatcaacatacttgtgagtaaatnnnnnnnnctggtaaaataattccaacacactatgctttgagattttagtttgacgcatcaaataacgaggctgagtatgaagccttgattgctggcttaaggatagccgaagcattgaaagtcaaatacctcatttgccatagtgattcgcagctgattgtaaaccaggtcctcggggaatactaggccaaaggtttaaaaatggcaaagtatttagagaaggttcggaagaacttggaaagattcgattactttaaaatcgaacaaattctaagagaacagaactccaacatcgatgccttagcaaagttggcctcgcagaacgacttggatgaattgaatttggttccagtggaggtgctaagcgagccgagcatatgtgaaacggaagacgtcgagatgaaagacaattctcctacatgaatgactcctcttatcaattacttactcgatgaacaacttccaaatgacaaaaatgaggcgcgaaaattattatattcggtgcctcgctacataataattgaaggcaaactttatagaagagggtattcgatgactctacttcgatgtgtcctccctaccaaagcaaatgaaatcatcagagaaatccatgaaggcttttgtggggatcatgcaggttggcaaagtctatccaaaaagatcattagacgaggatattact

SEQ ID NO: 134836 - DNA, 702 bp, Cannabis sativa
tgtaatggtggtatagatatactattattcacttacacattctttatgcggtactcgaaagctatacaatattgctctaggttcttgaaaatatttgaataatctaggcacattaataattaaaatcataactaatttagggtgaaatcaaaaccttgacaattatttttatatgtttattctaaaaacctcatttatgttaacggaattctgagttaagaataagatttaaacattttattataagtgtctaagtaatttttatagttgcatacgatgtagttatttagagctacctataaatttttagaaaaataagatttaaatattttgttataagtgtgactatatttttctatatcgactctgtaaaatatttaaatttttttacaaatagttctaaataactacaatgtacatgattatgaaaaaattggattacttttatttttcttagatgcctaaatagatggggatctaccaaaatacttattttataaagtgattgtgctatatatttttttaagaggaattttcaaaaatattctttatttatatgttatttacaattttacgacctaaattttttatttataaaaatagtcttttgaagtgttaaaattacaaaaatatacttttatcagcaaaatatacgaatacaacttgaaatcaacctcacgataactataaatcaactataaa

SEQ ID NO: 134837 - DNA, 591 bp, Cannabis sativa
agcaaaatacatgatctgctcgcacaattcaaaagctacagtctcagacacattccaagagaagaaaatacaatggcgaacgcgttaactcgattggcaagcagcaatgtaagtaacaaggtgcacttggttcctatctagttcctcgaagagcctaacatcactggcacgaaagaaattgcattattggtacatccccaaactggatgacaccaatagcagcctacctcgactctaggaaacacccatataattggaaagaagctcgaaaaatgagaaggaaagttgcacagtatatcatagtagagggaattatgtacagaagaggattctcaatgccattgctcagatgtgttactcaataagaagctgcacgacccctatctgaggtgcacgacagattctgtggaaatcatgctgccgggcaaagcttatctaagaaaattctaaggcaaggatacttcttaccaacgatgattgaagattcaaaagtctatgttaagaagtgtgacaaatgccagatatttttaaagatacctcgagctccacctaatgagttaactcagctgtagagtccatggccctttgcca

SEQ ID NO: 134838 - DNA, 648 bp, Cannabis sativa
  modified_base (274)..(277): a, c, t, g, unknown or other
tgttagttagggtgttacatggtgttaggaagattttatcaggatctagatttactaacaagtatgttcaattaacatcctaaacatgaatatctttaaaacaatgaaattaaacacataagggtttagaaaaccttacattaattacagcgaaatattatgactccttctgcttagatctctaacccttatatgtcgcagagtattatcaagatctgagcctaaatctctttctctctttcgggtttggttaccaccgttttactcactatgnnnnagtacttggcttgctatgtgtgggcataacactctatcactatgggttcgaatatgaagaacaatgaaggagggtttgaatcactatattaggtctctctcatctactagttgtctgacagagttcgaaactagattttggcaggttgaaagagctggatgagatgagagcatcatgttccttatatagtgtttcacttagggcttagagttgaattatatggattaaaaaagaataaaatattgcgcaaaaaatactctaaggtcggccacttaaagggaccactttctagttataattttaccactttatttcaaccacttattcttctttcaataataacatatatattttccaattcaatactataa

SEQ ID NO: 134839 - DNA, 1079 bp, Cannabis sativa
aaagtgaatgagttagaagagcttaggaatgatgcatatgattattcaaaaaagtataaggaccgagtgaagttttgccatgacaaaaatattttgagattaaaaatttctcccaatcaaaaagtctttttatacagttctcatttgcatctctttccaagaaagttatgctctaggtgggtaggtccatacattattcgtactgtttttccacatggagccattaaaattaaaaatcctaataattgtagtgtatttaaagttaaaagataaaaattgaaactatttttagaattaaaaaataatgaagtggatgaaatcctccttgaggatccaatctactgtgattcttaattgctctcatcaattattggtagattgtgttttatttatgttttagattaactttttgttttgatttttgttactttttgttgctcttgacatgcttcaagatgaggtatgaccattctaaactctcaactcttttactttcaatttatatttatattttaatacattgatgactattcataaattaagtttggggtggtgggttcttatgattatttctttcatttgcttaaaaattatagagtatttttcacttaaaaaaattattgtttagatgctaaagaaattatattatatattttttataaaatatatatatgtttttctagtaaaaaaaaaaaccaaaaatatatttatttactttcttatctatatgtttccattttaaaaaaaaaaaaaaaaatttgctcatatcattttttcctataataatactattgattgagtttgattttagtttataaaaatatgaatctcttttaagctttatttttaattcttggctcaattttgcttaaaaataaaattttgaaaaaaaaaattattcatcgtgatatgtgaaataaatattttattacaataatttttctaaacatagaacttgatgaatggttttttatttatgacttaaaatatattttcaaagcaagattgactattgaattaattacataagcttaatttttattcatattttatataagttattttcaatgtgcaatttt

SEQ ID NO: 134840 - DNA, 1756 bp, Cannabis sativa
  modified_base (530)..(531): a, c, t, g, unknown or other
acagtaattagtgggctttgggttaaacattcacatattggatctaaataattataaaaatttgtatttttataatgtgtggtgcggcttgaactgcatatgaacaattcaaaactgcaaaccacatcgcaccaccaagtttaggaaaaattcaaactgcgatcgcatcgcaaagaatttcaaactgcatttttttgcggtgcggtgcgatttgagcagtttgatgaacacccgtacattgcactacacagcaaaaaaatacaggttgaaatttcatccatattagactttgatatctaccaaatcacgcccctaaactttgacatgtaccaaatcaagccccttgaactttcatccatattagactttttttactaaaattagaaaaaaaaagtctataaatctaacaatctcaatagttcaggagagatttttaacggccttaaaagttcagggggcatgattttgtacatgttaaagttcagggggcaaaagttctaattacctttattttaaataatatttaattnntttctattttattatatataatagtggtaaataattttgttgtcatagtatatatatattttaattttgatatataatttagttagtatagtatatatataaataaattagtaacatattttttttataattattattgttagtatatatgttttggtgaatagtatatgtaatttttatacagtatattatttttttaaaatgatatttaagttctattttttattgtacttttgttgacgtgacatataattttattagcatgctatatattttttgttattatatatatttattgtaaggtatatattttttgttatatgatatacaaattttattgtatattatatcattttattttaaattatgcatgtttagttttttattttattatatataaatgtggtatttaattttgtaaaaatagtatacttattttttggttgcatataattttgtgaatatggtatatataattttttttttattttttattgtaggtatatatgttttattgtatatagtataacatttatttaagttgatatttagtttctactttattaaatataatgattatatatacattttttggtatgatatacatattttaatagtgttatataaactttttgttagcatgatatatatattttttaagtattaagagataattgcggtataacctccaatactttcactttacttgcacttaacctccaaaactcaaattttagctgtaaaatccccaaaactaagaaacagttagtaatttacaattttcatccattttaggtgttaagtgtcatgttagactattcatgtgtacatctatatggacacagtgtacacagaacacaattttattggtccacataaaaaattatttaaaaataaaaaaattgtaaataaaaaaatattatattttttttaaaaaaaaaactaacttttttttttccttcctcttcattctttttttattatttttttttttttcacttcttcactttcacatataccatcacccaccaccaccctccacaacctatctgttagaataagttttaccagaatctaaatttactatcatgtatgttatttaacatcctaaatatgaatttccaaaataatgtaaatatacatataaagtttcagaattcttacagtgggtgcagcggaatattaatgactcattccactcagatttctaacccttgtatcctgt

SEQ ID NO: 134841 - DNA, 1177 bp, Cannabis sativa
actaattttatgattttaaatggtgcataatattctcttagttagtatacatattataattttttatattatttaattatagttgttatgttatcaaaagaaaaaattattgcgtaattaaaaaagagtaacaatttcggcctcttttcttttcttgcataaaaaaatcctatcaaacattaaacactataataagtataaatatttatataattattatgtatgtaatataattaattaatagtattgtatataaaaaaaatatttattagtaataatggataataaaatcaaaaataattatattattgtaaaaaattgttattttcgaatcttttaatgcgattgtgaatatattttttttaattatttttcccttttatataataatatacttgctaattagattttcagtatatatatttttggaatggtatgattttattttttttctttttggataatgaatggtatgttttagtaacctaaaaaaataattattatcgcttttattaaaaaaattacaatttaaaaaagttaattttcttttaaccaaatataattgtcattattattaattataattgtgcactgtagttaatttacaaattatggtgtctttttctcctcgtattattagataaatgatatctctttttctattatattgcatttcatttcttttttattctttaactcaaatacatatataaactatcacctcctcgtaattattttcctttatataaatttattacaaatactatacctatagtctcttagttcacttttttattttttattttaaaaaagaaactcccaacacaactaataattaatttatacacaattgagacaataaaatatgaattattaatttgataaataatattacaaatcatttaataataatattaaaaattatagtcattattatataatattatttaggttaaatcaaataataaaaataaattaccgtagaagaaaaattaccaatcttaagatttacatctttccatttccaaaataagaaagaaaaaaataataaatttataactttctaattttatttatttacttaatgtaaataaatttatactgacatttattcatagtataataatataataatcaagtttcaaaataaattatttttcttccaatatgaatggtt

SEQ ID NO: 134842 - DNA, 650 bp, Cannabis sativa
  modified_base (237)..(255): a, c, t, g, unknown or other
tataatttaaaaatagaactggttttataacataatgaataaaaataaataacacaaaataacgcaaaccggttataattaaaatataaccgattctgtgacatagtcaataaaaacaaataacacaaaataacttaaaccaattatagttagaagagaatcggttctataacagtgttataatgaaccatttttataataatgttataattgataaaaataaataacacaaaatannnnnnnnnnnnnnnnnnnaaaatagaaccggttatatagacataatgaatgagtattttgaggtagatatggtatgggtgtaattatttagtgggttggagcatgttgaatggatgtttttgtttaagctattttatttaactgagttttgtgtgtgaatttttatcttagtttccttacggaaccagttgttttatcttaaatttttaactagttgataaatataaaccgtttctttatattatatttgagttattgtgtgttattatttgtatttatttattttgttatggaagaggttcttatacatatttatgcctcaatattttttgaaattgatcttcatttttttttaaaaaaaaaaattataatcggttttgttgcccctagttttgtccaaaatacgtggacca

SEQ ID NO: 134843 - DNA, 582 bp, Cannabis sativa
  modified_base (357)..(361): a, c, t, g, unknown or other
atactacttgcagactcagttaattgattctaattaatcaattataattctaaaactagactatgtcattaagaactttcagtaagcaagaacttaattgtgaagaaaagaggttttcgggcaatttgctaattaagagactttgtgtggtctaattaataaataatataaatggtaattttatttgataataaattataattattatataattaattttgtcatttataggattgaattggaaaatatagtattactgaaataagaataagtgtttgaaaaaaagtggcaaaatcgtaactagagcttggtccttttatggccggccctaagtgtggatttttgcccaatattttnnnnntttttaatccatataattcagtcctaaaccctagtagaaacactataaaagtaacataatgctctcatctcatgctcttgtcaacttgacgattcaactttctaaatctagttttcattccctgacagctagtagatgagagacaacttcaatagtgttttcaaacctccctcattgttcatccaattcgaaacctcgagtgatagagtgccatgcccaca

SEQ ID NO: 134844 - DNA, 543 bp, Cannabis sativa
gaaattaaattcaaacaacaactataactacagaaccaaaattcctaatttaagtctcaaaacctaactttatacctattagaatcaaagagaagaagactaggaatccataccttattcaaattctccttaaagagattagaaagactataaattcagcaactcaaacccttttcttgctggttctctagggtgcacgaaagagagagggaaagaggaatacttccaagcttgatcatctatttctcaccttaatcttctttcctttaatagtcttattattatctaagcataagttaaataaaaggaagcttctattacccactaaaagccaaaacaccaataggtaaaatgacctatttacccatctcttaaaaatcaaaagaaactaacaactcaaggacgatttggtcatttccaaaacccgactattagcatttagcaaaataccccgagcaaataacatacatcaaaatataaggtatgactctctaaaggccccaacgccgctttccacagcttccgaacacaacacagaaatta

SEQ ID NO: 134845 - DNA, 828 bp, Cannabis sativa
tatttttgcaaacatatttactttgcttgttattttctaaacttgtgtatgaatttattgaaccaataatttatttctgtttattgatatttgtagtgtcaataatatacaacccacacccgaatcctcatctagaatatgcctttaggaatgaacttcgaagtgtgtagatgactcctggtcagagtatcacttcacacttgcttatgatgaacatgaaattctagaaagcagctatgctagtaattattttatctggacagcaaagagttcattttgttctcaatagcttatcacgtgagtttaacgaattcgttattaacaattggaactcgtctgacatagacaagctggacgctgaattgcgtgcttatgaatggacattgtcacttgcatggagatccttctccagtaatgcagataagggaaaaagggaagctgaagatattgagaataattcctccgacaatcctactacttcaggctcagttgaaaaggatagagaaagtgattcaacttcctcagattatccttcagaatagattgaaccaacaataagaacaatccaaaaaccgttaagtagtcatattaatggcaatgctttagtttttgaatcatgcgttttagagaatgacaaatccatctagattcttgattctggatctactaacaatgtctgttattgattgcaattgcttgaaaacttgaattatttaaaattcggagagtttaaacttataatttgtaatggcgaaatggtatcggttagagctagaggaaaatccaaactcaagtttcagaatagaattttggatttagacaatgtct

SEQ ID NO: 134846 - DNA, 648 bp, Cannabis sativa
ttggcgccattgccggggattgatttagtgaaattttatttgtggaacttagttactatcaatttgtcaatttgtttttttttttttttgttttcatttgcttagttttattttaatgttctattttacgctttgtttgtgttgttttggtttcttttgcaaggtcttgagatgtctcatctacaagtccttatgaattttgttcaacattatttggagcccttgtatgaagcatggtggagatacaaggcagttctaatgaggtttccatatcatgggttgtcaaaaaagtgtcaattagagtttttcctcaataggttgaatccaagcacacgagaatgggtagaaagaggagttggtaccaccaatttctacaaactatcaatcgatgaagcttattggatgttggaagacatgacgaagtacaatgagtggtgttgtaattgtccaaacaaagaccatgtttgggaggacaactacaataatttggagccaaattttgacccttacactcaaggaccaaatggtgagattttagaagatttacaagagtctaacatagaagaagatcctcatcaaatgattcaaccaagctcacttgaagtgttgatgatggagttcatggctaaaaatgatgccttaattcaa

SEQ ID NO: 134847 - DNA, 1095 bp, Cannabis sativa
  modified_base (1037)..(1038): a, c, t, g, unknown or other
ttcccgagcagatgttccaagtggattccatgtgtcaccattcatgtgatgccacgttagagtgcaaaaattgggataacaatttccatttcccttacctttctctctctgctcttcgaagcttaaggactcagctaaaccagggggaaatttcttcacaaatcaagtaaattttgactgagttagctaaccctagatgttgttcaagccttgaggtaaggttttcttcttctatttaattcttttgttttgagttaggttttgtggaatgtttctttggtttcgggtctgtgttattgctggagtttatatatgttcttaggtttgaattgatgttagtttaagcttggattgggtgaattttagggctgttaggtttgacttggattaaattgagtttaagaactcaatttcacttaactatggtgttttatttaatttgatgaattgatgtgtattgatgatttgtgtaaactgttttaatgatattaaactgttctggagagtttcaataggtttggaggagatttggttggattttggtgcaaataacctgagtttcccatttctgtagcagggaaaacgggttaaccggtttcacaggtatagtgaaaccggtcaaccagtttgccagtagggaaaaccctagtttttggcttcgaaactagttttaatcggggtgttcttcagagcttagattagggtattttagtgatgtttgagttatttcgaatcagtggggtcagatttgttcggttacgtaattagggttttttttcgaagtttggataagttgtttatcaagtttcgttatcgtgacataggacccgggatcgttgagcatggttccacccaggtcagcccgcaccctcgatattggtttgaggtaagaaaagttttttgcaccgctaagttgttaaataagaagtgattataatcgttagtgcctcgactaagattgagattaataatatgtatttgttatgactcgattgtgatcaaggtaatgatgagaaacgattattatcgtttgtganncgattatgatcgagggaaagacacggtcattaccgttattgtgaatgaataaagata

SEQ ID NO: 134848 - DNA, 526 bp, Cannabis sativa
aagagaggattatacaaactattgtctcgtgtgttgatgagaaatcgttctacgataaaaggtacaaggcgagggatcaacctcgctatgcatgagaagatgaagatcaggcatgatgactgctaagacactttgcgtataatacacattatacaaactaagtctaatatttgaataaacttgaaggcgagatatgtatctcgctacaagacatactcatggtacctttgctaatcggattcaaacatctttcagcgaaattcactgcaccaccgagtcaagtctctcagacagagtattatgtatttaatagcataaacgacgagaattacattattaacctcagaaagatatgagagaagctctaactcgctgccagggatattattgctatgtccctagcgagatgtctgaggacaatatgctttataacatatttaatacacgtatgcattgacccagtagaaacgaaccaatcacagctgtgtgattctcagatattgacaaaatttattttacgtgggat

SEQ ID NO: 134849 - DNA, 699 bp, Cannabis sativa
ccggcaaaggtggtgctcatccaatgctggtgatccagtctttctctctctgacgattttcccttcgtcttttctttcaagatccttcgttcttctcctctactcccactatgtctaataatgatcaagaagcaagggctgaaacaggagatcctactcccattgttaccagaaacccacagcaaattgtcgatcaaggtagccatagtatccagctgcaaggatcaagaaatccacttgaagacccctcggatccatactacctacatcatggtgataatcctggaaacattcttgtttctcagccactaacgggacaagacaattatatttcatggagccgtgcgatgcaactagcaatttcagtcaagaacaagctaggattcctagacggttctatccctaaacctcctcttactgaattcaatctttataatgcatggattaggaataataacatagttatatcttggatccttaattctgtgtcaaaagaaatttcctctagtttgttgtatgatgaatctgcagctgcgatttggacagaccttaagattcgtttcaaagaaatggtcctcacatttataatctgagaaaaggtttgatgaatctcagacaagagaatcaaaccatcagcatgtattacactaaactaaagacaatatgggaagaactgtcaaattataggcctagctgtac

SEQ ID NO: 134850 - DNA, 964 bp, Cannabis sativa
gtttatgatatcttatccaattttaatatcgatccaatccgatgtatactcaataaaatgaaccacacaattaatattactcaactattgtaaagagtaagagatttccttggcctcaatttcttggacaaaaaacttccccttaattggtttagaaattgcagcaataacctaaccattagaattgcgaacaatacctccaatacccattattttaccatcattatctaaagcagcatccacattaagtttcagcataccagtgggtggaggttgccatgtttgagtgttgacatttaaattctgaggaggcgtagtagacgagttgttgttcatgcaaaattcacgaaggtatgcaagagatttttccataaggacatgttgaggaagagttcgagagccatgaaaattattattgcggttgtaccaaatgaaccacatgagagagaggatagtctccatttgatcatcatcaaaatgagagaataatgaatggataaagtcactgctagttgaggactaataactctatggtatagagttatttcttatgttcttaaactgaaattattgtgagaagagtagtgaaaatgtgtttgtttgttagccaacttttaagtcttgtaaaaagttgttattttagttgtatttttttttttaattaaatgttgcttgtttgttgtgggaaagaagaattaacttgctagaaaaaaggaaatgatgcaaaggaaaagttagaacaaaaactgaaaactagaaggaaatgctgccagaatgctatagcattatgggcagtttggcagtgacgtggaagaagtctaaaaaacaaattgtacttatccacatcagtaattatgcaccagtcactcaaagtatgctagctggctgctgtggaaggaagaagactaaacctagtgggccaagattggaaaggattgagcttctatttttagggtgtcatttt

SEQ ID NO: 134851 - DNA, 1345 bp, Cannabis sativa
  modified_base (1313)..(1319): a, c, t, g, unknown or other
taacaggtaaattttataatttctttcatctgtgataaacctagtaacatgatagggctcgtacaaattatttgacttgtgtgagcctatatattcacttttgggcttaaatgcacataggaagcccatttaagtttaatatttaaatggactaggttgctaaaataaaaatatcaccttgatagttttatttaggcccaattagtattgggcttactcaatgaataattataattaattcaaggttaaattcctctcatttgggccttgtgtgagagttagggagccatagtagtgggtacgacatactgaactcagccctcccttacatgaatcaccccaattgtggagatccatttaccttatttaaataattgtattacggtaattatattagtttaccctaattaaattgattagcaacatataattaactttaaaataaatgaaattaatttttcattggattattttaaaaccaatttaaaaaaaaaaatacacttgtttaataaaatatattttagaaagttatttctagtaaataaattttattttctaatatttaattaattagaaaaatatatttaattttagatcaacttaaattataatatttttcttagatattaaaatagaattaataattaagttgattttattcaagatacttaattatttctttctaattcgtatacatttaattaaatagaaaattaaatatttaagttaataattttattcaagacacttaaatattagttgttttcaaaaaatttatttagatagaaaattatatttaagttggaaattctattttgaggacaacttaaatttgaataattttcaaaatatgtttttattttattttattaataatttcccattaagttttgaaatgcattatttaaatgcagatattttgaaattttaaaaaatacattaaagttagaaattaaatattttaattaattttagatcaactttaatcaagtaaattttcattaatgattaattaaaatgaaacacttcttaatgcacctatatatatatatatatatatatgaaaaagaaaccgtctgtcccaatttttcctgtcccttccctgtccctccaataaatagatgtcagatgttaactttctgctctctcactcatttgttaactttttaaactctccgtcacgttctttacctatctttattccccaaaatcacttcccactattaatactttcacctttacatcaaataaataaataaataaaaaaataaagacttttacctcattaaatttagggaaattaccccatatannnnnnntttaacttttttttttcaaatttaag

SEQ ID NO: 134852 - DNA, 651 bp, Cannabis sativa
  modified_base (269)..(269): a, c, t, g, unknown or other
ggtaccagcaccggattagccagctattctgggtaatatacgtctcggatcatgccactggttagtaatttgtccacatctttctctagtgcttcggcctttaccgagtcaaggggcgtcttttctgttgaaccggtggcatgcccaggttgacgttaaggacgtgggttatgatgtgggggcttatgccggtcatgtcctcttaacaccacgcaaaaacatccgtggcagcccttagtgtctttattatcttttctttttcctccggntctaggctttttcctagtcggaggaccttggtggggtcgaggtcacacatcgacacttcctcgacatcctccacgggttctataatttttttagatcccacacggggatcccactcatcttcttccgccattcctggctcaataacttcacggaccattagaacgggtaggtgggcagcaacgttgtagcactgcctggtctctccctggtttcctcttacggctcctatcccagcctcttgagtagggaatttcagacacaagtgtctaatcaatgtgactgcgccgaaatccaccagggccggccgaccgaggattgctttataagtcgttgggcagtccaccaccacaaatgtgcagtatttgaaggtgctttgaggtg

SEQ ID NO: 134853 - DNA, 943 bp, Cannabis sativa
  modified_base (880)..(897): a, c, t, g, unknown or other
cggacacttgccaaaaaagaaagcctcgagaggttttccttgacaaaagttgggtgcaagaatcccacagatggtgacattacgaataagcaaaaagaaaggaaaagggggtagaaatcgagaagacaaagtctactctaaacccctaagtgtcattacgcgggacaaagatgggtcctcgacaaaaacacgatgaaaagaagcaattcaaaagcaaaaaaggaggaatctaacgcgttgtatagaaacttaagacaaaaaattcccagaaactcaacatccaacccagaaaaagcaaatgaatagtcaagcatgcaatgtaaacaaacaataagctaaagtacaagacgcaaagaacttacataaagcttgggaactgggcgttggtgttgatcgacggtttaaagttgattggcaacgacgaaggaaaagaagtaagaaatctatggtgtttaaggtttcttttctctctagaaaacttgagaaaatttggtgaaatgctgaaagtaaccaaatgaagtaagaaggtggcttttataggccaaggcatgcgtgagacagctgtgatcaaccaccatcgaacggctaggaaagaaatcgattcgcattctatagatccaacggtcagattggatcgtcatcagggcagtaggaacacttaagtacccgtctgacacccattaatgcgccgtatcaataaatggacaagaaacgaatcgacgcctgcaaaaattgaataaccgcagtaatgatggtaattaaatacgccatcacgcgcccaaagcacgtgccaggaaaccgaggaggcaaccggaggcgcctaaagcaagccttgttcattccataattaaacaaggcttgggggtaaatgttgcccctnnnnnnnnnnnnnnnnnntggaccaaccggacgatgacacgtggatggaaagggtagcatttga

SEQ ID NO: 134854 - DNA, 1188 bp, Cannabis sativa
tcccctgaaatcatggggtttgataacatatcacgtaaaataaatgcggttattatttgaatatcacatagatgtgattagtctgcttttactgggtcaaaattgataaacgtgtgttaaatacgttgtaaaccgtattgttttgggacgtctcgctggaaatagagcagtggtaaccttgatagcgagttggagcttttcttatttctttccaaggttgataatgtaattttcgtcgcttttactcttgaaacataacaccctatctgacaatcgcagtttttggtgacgaggtgatctttttcgcgtgcatgtcttcctatggcgaggtggacacctcgctgtcacttgctttggttcatccgcctattatacgtagtttatatattgcatactatacgctagtgtcttcacagtcagtatatctcatccacgtaatcgaggttagtgcctcgtcttatacacctgaagttacatggtttctcgttgatgcgcaaggcaacagtttgtatatctttatctcgcataagaccattcagacagccgatcgagttgtaaataaactctgtcaattatgcttttaacgagttattccacctcaaatgtaattataattatcttcctagcttgacacgtgttttcctctgatgtgttagccgaatttcgggtataacaattaccccttaaaaagttcattttttaataaaaagtactttttaattattacaaagggtatttttgtcataatcccttttgaaaaaaacgcatatcctctgattttggcagttttacgatttcgacgtacatcagcattaaatggccattttccacttctactttgaattctgtctgtaggatcaaaaatctctttgatccgatgaaactaatttcaaggatataaagtaagaaaaaggaaccacctttgcattatttcctccattttagaaattctgagaaactcttaagcttctttgctaagaaaaagcatcgagtttgcccgagaatttgcatgacatccctgtccttgacattttttctgcgagtttcctctgacttcacattcttgaagagatcctcactgcattcaaagatttgcaggtcgaagagctgtctatcgtcccaaaccctaacttcaaacagtaagtagcttttcttcttgatatcttacatgcttgttacgttgcattt

SEQ ID NO: 134855 - DNA, 1464 bp, Cannabis sativa
ctggtaaaattaattccaacaatgggcctactgtaaaatcccaagaaccacaactggccactcgccattttcaatggcatacggctttgaggcaatggtcccggtggaaacgctattcccatcccacaggagaatgacttatgatctaacaacaaactaggctttattacaagaagcgttggatcagattgacgaactccgggatgagtctcaaatacaaatggcagcttatcaaaagaaggtggctaaacactttaactcaaaggttaaaagtagaaaatttactattggtgatctggtcctaagacgagtattcccagccactcaggaacccgaaatggggttacttgggcctaattgggaaggaccatacgaaattgaggacaaaattggctccgggacttacaagctcaaaataatgtacggaaccatggtgcctagggcctggaacgctgatcacctccgaaagtattaccaatagtcgaaaaattattctcatgctctgtaaagtaaatttgtaccagacaagtatgtgcaacctctaaattaatatttaaagctgagtgcccttaaaacaattttcatgacactcaggggggtagtaaggcataccacgcggacaaatgtaaaacatgccaaagagtttaacaaagttaaaaagtttaacgaagttaaaaagcaaagtatgtattcaaacatagatataaaagatgttcaaacccagcgaaaaagctctaaaaaaatattaagggcttggggacgggccttaaattgttcccccttaagaataaataaattgtctgaaaggggggagaaaggactgtaaattaaaaaaaaaaaaaagatagtgataaaagcagtgatagttaatgggggtacagtatattccttggcttcaggagggatccctgaattagagctaacagccggagtggccaccctcctagaatttttggaagactcagcctccaccatcttgcctttgcactttcggtccagcggggccacgatttcaccttcctcctcctcctcgacctccccgtcttcatcgatcaagacgattgggcctaagaggacactggaagaagacctctccggggtcaccgtctgggcgggtgccggaggaagagaagagtccgggctgtatatttgggtaagagtcgctaaaagatcctccattggatgagctgcttcaaaaggacaaataaattgagtgtcagaatggccataaaaacgtatgtacatgaaaacaaagcgataaaactagtcctaccctaaatatctaactcagtcctagcaaagtcttgcactacaatactggcttcatcatccccaagaaagctgtccgaggggaaaagccagctggaagacagataagctgagtgatccagaggaatgggtgtaggaggtccggaacctatccgggaccggcctaaaaaatgacctatgttggaaaaataaaag

SEQ ID NO: 134856 - DNA, 660 bp, Cannabis sativa
  modified_base (615)..(615): a, c, t, g, unknown or other
cgaacgaacttctccattgattagtatgctgagttatatgttagaaaaattgttcgtcttcatggtgtcccaaagtctattattttggatagagattcaaaattcacatcaagattttgggggagtttgcatcaagctacgggaactcagttaaagtttagcactgcatttcatcctcagacagatggacaatctgagagaactattcaaatcttagaagacatgctacgggcatgtgtgcttgactttgaaggatcatgggtaaagtaccttcccctaatcgagttttcgtacaatgaaaactatcatgcaacaatcgggatggccccttatgagattttatatggaaggaaatgtagatcacctattcattgggatgaagtgggtgaaagaaagttcttgggtcccgaggatgttcagagaacaagtgaagtagttgataaaatcagagcacgaatgttcgctgctcaaagcaaacagaagagttatggtgttccaaagggacgggacattgattttcagatcggagacatggtatttctctgagtatcgcctatgagaggcatcaagcgctttggtaggaaaggaaaacttagcccgaggttcattggaccntttgaaatccttgagatgatagggcaagtagcgtacaggttggct

SEQ ID NO: 134857 - DNA, 719 bp, Cannabis sativa
gagagagagagagagaaatgataaaaagaaaaaaaatattaaaaaaaagagtgcaccccattaaaaaaaatgtagccaagttatataaatataatttgaaattaagtttaggggtgtagtaaaataaataaaaaagaagtttccttttctctttcttattttgaaagtggcaagtgtggtattcattgtttgtggggacattcttttagggaagtgattatgtgctcttattacttgagtcctagaaagattgaggtgtttaaggtaatttgagcctaaaataatatcttttatcctacctttaccttagcctaacaatacaagtttgataaagtcctattgatccttggttaagtctttgtctacattagtggagaaggaagcattgagtcaacttatggagacaaaatgttaaactttaggattgaggtcgaggaaaaattgagtttgttttgggaagagctatgcattagctattgggagagacacttgcattataattttaacacttcattaacacttgagtaaattagtcgaatgcattagcaagaggcataatcatcataatcatcatcttccatcctcattttaataaagttttgagagtatttatcattattaagttgcatgttaagtaaagatctcctctctttgtctcgtgtcttgtgtgttatttattttcttttgtgtgagttgtgttttgagtcaattttctttgt

SEQ ID NO: 134858 - DNA, 645 bp, Cannabis sativa
gggctgctttggaaacacaagacacaatattctccaattctctgacaataaagagcaatatgtctctgaaactacgtattcaaactggagcaacggtagcacaggagtagtcagttgaataaaaagtatttttccatactggaaaagacctttgaagaaggacgcaaagtctttatctattgaagtataacgtaaataaaattgtgatgcttgaggctcatatgatgacaaatgaattgtgtctcttcctactaatgttgttaagtcttcactatgctccaatcctacatgcgtcgaggtagcatctaaaagaccgcttggaggagttggcaagcacagttcatgagtgcttcgatcagtgtctgtggcatgcgtctaagatagagaaaacagattgagagctctagagaaacctacaaacccggttgtctgcacaatatacatacatatgtaagtatccatactatactacacatatacataaaatatatataccgaaaagacttccatacctttaaaggcgcaattgtgggaggtaattcatgtgtgatagtactttaaattgtgctgctaccagaagaagggacaagtgggtatcttgtaatgaccttgaaattagagaaaaggatatgtaatgaaaaaaaa

SEQ ID NO: 134859 - DNA, 902 bp, Cannabis sativa
gggcataaaacctaacaaattcttatagtgaaaataaggaggtgataagttcaatagatgcatgtttccttcaaatgttcatttgggagcatttttcaaagcttgcacctctttgcaagtcactgcaacttggagaaccccgtccttgggcatgggtaagttcgaagtgttgaaaaaccttgtgtagtgttacaaaggatgtttcgaattttacgtttcgccgttaccttaccaatatttgtacctatttcaccctcgatatgtatccaggaagtgtagtaccactgatagattaggtttgttcttctttcactacttctgctggggaagcaagattttggtttgttgtttgccttccctgatcagtgttatgtcttcaagatgattcgaaatctttatcttggtcatttgtttcatatcgctctgatcgtgtaaatagacaatttgggtttgatcaacatgttcctcatgatcggaagataggggatttagaaaaaacaaaacaatcatgtttgttgggttccttccaactctcaaagcgatctcacgacacattttgactacccagtaaagaaagagaaggtggggtttctgtttaatttgttaacatttggatgcggcatcattgtactagattaatcagtcgaggtgaggcttatgaccgagagaaagacgtgggtccatcgtcaagtatctcctcacttgctcctcttctcttaataatgcaaaatctttgataatttatacaagataatatgactttgctgttgaaaacaggggtgtatgttccttcgcaaaagtcgcctcctttagcaccccatgaactctgtttagttgatgaacgtcatactcctgccaatcttaatatcgggtccatagaagatgatgtaatggtagcttta

SEQ ID NO: 134860 - DNA, 1194 bp, Cannabis sativa
  modified_base (27)..(41): a, c, t, g, unknown or other
aggatgttaatgaaacatacatggtannnnnnnnnnnnnnnggtaaaatatttccaacacaatctccaactttgattcatgctccatcatctagcgatttcttcgccatcatcttaactccacgattttttttatgcttttttcttctataaatttttatataatggctatcatgtgttcttcatcttcttcttctcttactatgataaaacccactcttaagaaaccattgctaaaagttctaaacctccagtaatagatgtgaagttgttggtgaaaaataggcaaaaaaaatggcctattgtttggatttatgctttaaaaataagtaattaatggataatatattaaaagaatatatgaaatacaattataagataaataatatgttaattataagagtataattattaaatatcaaaaaattatctattcatatggagaaggtataatcttgtaaggatgtacaagagaattaagattatatgatatgaataaaataagtcggtagtatattaaagtattgaaaatctttaatatagaactgctaagtacggtttactatacactgtacttctagtgtgtgttattttgattcagatcacatatgtagatgaaatacgtagtaaaaaaaactgtgtataattagattatgcatgactagacctatatgaaataaaactctttcatccaacttgtcgtttaccatgaaaagagtttatcatatcacaatgatgatcattagtagatcagcctgaatcccgagtatatatgaaatcctgtttgtgttcattgagttctttgatttactcgttaaagtttcttagagaaaataattcttacaacttctattttgggagcttaataacatgagtggctgagaacatgttatacaatagtggaattcaagctttcctaatgattcgaatattagttcccttatagtgttaattctgtgagagctaacagttagatccaaatctataataagttataaattaactattaacattgaattaatggtacataaagaatcaagaaataattagaagggtaaaacggtatttcgatcaactctaattatgaactaattattaaagggcaagctacttatattgattatatcttacaagtaagaattctataaatataattctatattgtgaaagagtgcaattctatatttatagtgga

SEQ ID NO: 134861 - DNA, 1241 bp, Cannabis sativa
cattaaatgcgaggtgactgtttagagaggatttgatacctcccggaggtgcttcgttgtagccttgctctccgggagtgtgtgaaacgtacatgccttctccggaggcatgttaaatgctgatcccttggattaaaggcttagttgaattatcccaaagtcttgcctcttcagtctacgtgtcttaatctggttggtccacgtattttagacaaaatcatgggcaacacataccatttaccaatcgttgatatattgctccagctttttttagtccaaatggcacgactttataacaataaagtcccatgtttgttacaaaacttgtgtgttcttgatcagggatatgcattttaatcttgttatatccagaatatgcatccataaaagtcatcagctcgtatcctgttgttgcatccactaactggtcaatcctgggtagtggaaaacaatcttcggaacatgatttatttaagtctgaaaaatcgatacaagtcctccaagtgtcgttagcttttaggacaagaactggatttgagatccatgagggataaaaggtcttgcgtataaagtcattagttaacaacttttcaacttcttctttgagtgccccttgactttcagatctaatggccaccatttttgtcgttttgctggatagctggggtcgatgtttaaatgatgacaaattacattaggatttatccctatcatatccaggcaaattgatccttgtttgcctttacaaaatctattaattgctattttagtttttctaccaaacttttcccaatgtaaacacattttgtgggattatttggatctaaaataacttcttccagctcattaattggtttgagctggttattttcatcttggattcaaatcttcttcttccctctcgccttcttcagttaagattatcatcaattggtgattggctctcctattctgaagttctattcgataacactcctgagccaataattggtcacctctaactactcctacccctgcctatgatagaaactttagggataagtgcttgattgagcttactgcccccagtccaataagtgttgggcaacccatcaatacattgtatactgatggaagatcaacaactaagaactcttacattagcgtcgttgataaggatggctctcctacagtcaatggaagttcaatgtgttgggttttatgccttaaataaaactctgtttcaatgtaatccagattat

SEQ ID NO: 134862 - DNA, 837 bp, Cannabis sativa
ggttcttcccaatgtatacacattttgtgggatttcctgggtcgagaataacctctttcaattctttgattggtttcaattggtttttctcatcttgaactcgggggtcaagatcttcgtctttcttttcagtttcttctgccaagatcgccatcaactgatgaccagctttcctatgctacaactcgatgcgatagtaatcgcgagccagcatctggtcgccacgcaccactcccacgccttctggtgtttggaatttcaaggataggtgcttgatcgaaccgactgcccctagtccgattagtgttggatgacctaacaatatgttgtaagctgatggtaggtcgacaactaagaagtcttgcataacagtggcagataagggtgcctcgcccaaggttaatgtaagctcgattatgccaagactggcaatgctgtcttcggtgaatctgcaaagattcaccatacaaggccttaatttggcttttttaagccccatcttccttagtgttttcttataaagaatatttatcgagctcccgttatctattaacactctcttgatccttttattggcgagttgaatggtaatcaccaatggatcaatgtgaggatatctcacgtttttcttgtcttcctccgtgaatataatgggaggttcctcagttttcaccttcttggaaggttctagggcaaatgccgactgctcattctttatttctttcacatatcgtgtttgggcgttattgctttcccctgcgatatgcgaccttcctgaaataaccaggatgtcctctcctttattgggcagactaggctggttgtatccgtggccct

SEQ ID NO: 134863 - DNA, 531 bp, Cannabis sativa
acatattacaaatattgattccgattatttttcatttattccgttacatttctttattaattttttcagcatttagaaaagtttacttcaaacagttcaaaacttctcacattgactttatatcatttatacactttataaatgataaaaataggcctccaacaactatatttctataactaccttttaattacattcaaatacaattagtaactcaatttactaattaattagaaggaataatatggaaaggagttacaaagtttgttattttcatcttttaaggatttgcaacttcttcttataatttatgctcaaactatgtaacttcttacatatattaccatttgacaaaattactatttaatttattacacttaactatttgtaacataattatttaatctaaatataatgttatattaataatataacatatacctcaaaaaaaatatatataacataaattaataatttataatgatatatatttatggcacgtttactatacagtattcagaattagaataa

SEQ ID NO: 134864 - DNA, 883 bp, Cannabis sativa
cttctctgaattcatggatcttagttattgtgaaaaactatacggacattcgaagtagaatcagataagcagaacccaacgcagcaggccatttatcaacttgggggatgggtacttatttcagagcttcctggatgtcgttttgatacttctaagattatagagcttgagattaaggtctccctcttcgtttttgaccattctggaaagaatgttcagaccagatttgacatttggatcatcgaaactagcacaccaggttgattgtcaacttgagcgctaggcccaacaccagctcaacttgggcactgtgctctatttccaggccttcgggtttgtggttttttccccgagttttcttgaatcttcattacttctgatgaaaaaaatgccctgaacacttttttgagaatttgattagaaaggcccaggttgacaacatgtaaaccggggcactgggtctcagttttggccccttggaaattttgtttattccctagaaatagttgaatcttaatttttgcaaaaaacggagaatatgctaagaagagttcttggaaaacatcatcggaattggccaaggttgacattgggcgctatgccttgcttttggcacccaggaagtgttatttcttccccgaaattgcctattttcccattttttatgaagatgaagatgatgcaaaagtcggatcattgatctgataaatgaaagtcgcctagactgataaattgtcaacctgggtgatgggtgcctgggcaccgggtactctgggtgctcaaaaatgaactttcttcgaatctgattctgatgcctcaaatatgtctgctatttctagttcatgtccaaatgcaaagcttgacccatttgcactaagacggt

SEQ ID NO: 134865 - DNA, 634 bp, Cannabis sativa
aagcaaaacataccaaacaaacacccacaattttccatacttttatcccaaagaaatttgtaaaagattgagaacttccactttatgtgcctaccatcatgttttttctctttcttctttaaattgatgcttttttttttcttcttttcttttctttttggtatattttttttttcaatgatgagtaagacactttcacattacataacttcctcaatctcccatttctaaaatagtacccactcataacacttaattccctcaaacttatttaaaaacttatggcataataaggtacattgggaattaaaataaataatggaaaaaaattaggctcaatgaaatggttaaaattttgaaacagtctaaggttcaactttgggtatactaaggacaaaatttttacaggtaagcttgaaaggctcagtcggtccaaagaaaattgcctaaatcattttccaagcaacaatcatcaaggatttcgcttcaagagattatgtcacacaagttctatttcatgtcaagcaaacattccacaaacccaagtagaacaaaagtgatagtatccaaaaatcaataatttacatctatagaacaaatttttttttcccaaggcatccaattcaatccaaag

SEQ ID NO: 134866 - DNA, 531 bp, Cannabis sativa
tagaaaagacttgcagaagaaacataataaggaggaaattggaaagagcggcacttgagattgaacaagaaggagtcatggctgacaacgccaacaatggcaacaatgggaacaacagaggaggcgtagaagaccaggctaatggacacaacaacaatgaccgtagaatgggggattacttgcttcctaacttgacaggggcccgatcctgtataaggctacctgctgttgacgccaacacttttgaaatcaagccagccatactgcagatggtccaatcttcagtccgtttggaggactgccgtcagttgacccaaacatgcaccttgccaacttcgaagaactgtgctagacattcaagatgaacggagttagcgatgacgccatcaggctaaggttgttcccattctcactaaaggacaagccaaaagttggtttatctctttgccaactcactctatcaacacttgggaggaattggccctaaaattcctatccaagttcttccctcctacaaagattgccaagctg

SEQ ID NO: 134867 - DNA, 714 bp, Cannabis sativa
actgtctaactgtctaactgtttttccttattcctaacactaagttaggtctagaacacaccatggagtagtatatgagactcccaacacaacttgtataggaaactttgctcatcttaactctttcgcatctttttttagtgacttataagatgcagacaattttattgtataaaagatactaatctaaccagcccataaaactggagactcaagcaagcaaaacaatactcataaattgaaaaatataaataatttttttttcttttattacactttattgttgttcttcttcttatcttttttttttccaaattttatgattcttcattccccaccaccaaccctcactacccaccatcaccaccacaatagatttttcacatccaaattacacctaaaaaaacttgaacaaaaatcaaaacaaaataaacaacaaacccaaatctgaaatattcacaaaaaaatatcacgtttatactataaataatacataatagatttatacactaaaatttcaacaacaaaaaaaatactaagaaatttaaaagaaaactatgtttctctttctcccccactctctctccatctagttctcttccacgcgcggtgctgaagcttcattcagatcgtctgtttttggccaacatcaacccaaagaaccttgcaatgagactccctactcctcaaagaaaaaaaagaaaaagaaaaata

SEQ ID NO: 134868 - DNA, 884 bp, Cannabis sativa
atttttctgacgacgatgataacttcggtaacttttctggtgtattttccggtgacaatgacttttctggcaacagcaatttccccagtgacttttcgatgatacttattattaaaagttttatcaaatttatttatagtcttgaaataaaaatcatccataaaaattaatcagaagtaaaatctccgaaaaaaaaagaattaaacataaactatagtaggaacactcttgaaaacaaaaaagagaaaaagtagctagagagtgtatgtaataagaaaactaaactaaatttgtataaaaggaatggaaaaaaagaagccaattttcactccagggcttcccaatacttcaacttcaattaggaccgactagaatttggatctactagtacataaataaaatatagggttggtgaacaacttgaaattgtcgaggtgatgtcattagcaaaacttaactttgttaattggtacaatgctcaaaaacaaaatttagctaccaatagtgaaccaaatatggtatgtgtagagcattggaccctctgagatttttctacaataaaagttaatgttaatggagcacttctctctaatgagagacagtttggtattggtttggtggcatgtccagccgttggtatggttccacaagctaaaactttgaaatggataggattgttaatataaaaaaataacacatttgaaaaacaaaacttaagaaattagaaaagatcaaatgaaaaaatgctccaagaaagacgaacaaaaatgaaatttatgttgagaacgtatactaacacatatgtaaactaaaaataaaattgtaataaatacgtaaatctactttttttgaaaaaaaaaaaaactataaagtattagacacta

SEQ ID NO: 134869 - DNA, 1377 bp, Cannabis sativa
agacttgataatttcataagagcatttttagaatttttctaagtatccatgtgaaggagaaaataacttttaggatgacaaagattcttgagccttgattaaactattgtgttgagtgttctcgttcttattcttctctcattattttgtaatcttgatgtaatacatttttatatattttatgtatctcgttgtaatcctttatattttctcttgtaatgagaaaattacaattaggtatagtcaaaaaataataattataaaaaaaaacaaaagatattattaggaaaccaaatacaaggtaacttttttttttattattctaatttgtcatattaaatacaatttagtggatggtaatatgatctatattcatgggacattattatgtatatatataattaaaattatatgacttttatgtataggtatgcatggaacgttgctttcagtcttatgtatatatgccttctccatatgcatggaacattgctttcagtctattatttttgtgggcattgctttcagtctctataatttcatgttttactttttcttagatatgaatcattataaataaaaactacgctgaggaaaacgaggttgactataatgatctaatctttcaagattcacaatacctagatactgcttgtaactgctcattctcacttaatgaccttgataaagaaatatgtaggggactatctatttctccacctgtcaacaacaaacccatttatcaacaagtggcaacaaaagagcgagtccttcatcagcgtggcaagaggacgatagtgacaaagaagactacatgaatcttagtccctcacatgacctcattaacaaaaattggtaaaactcctaaaccactgcaaagatacccacctgtgtttgtgacatgcttgtcctatgtcaataataaagtgaacatatgactcctgaaaaggtcagtccattattttatatgccttgaccagtgactattcacaagaccaaaagagattccctctcataacaaaatgacaactagcgacaagaaatcattcagacaatagagatttctctggtcatctgaaaatttcgtctgtttgtagttgtatataaaaaagagtctggaatgccagagattctctagctagggaaagatgtaatttaagacttaataattaaggtttgtaatgttttctgtttgttgatggcccatatatatggcctctcatttctgttaagggtatcaaccttttgaatagaaaaaatcttaactatctttccaaatatgtctttctaaatctcctctctgggctatttctctactaggatagatcataagaatattatcagtagctccaataccacccagaagatatataaaag

SEQ ID NO: 134870 - DNA, 653 bp, Cannabis sativa
aagttatatgtggatggtgcatccaacgagcacggttcgggtgcagaggtgatattaatatcgccggaaggctttaagtttcactattctctcagattctaatttgacgcatctaataacgaggctaagtatgaagccttgatcactggctgaaagatagcacaagctttgaaagtcaaaaatctcatctgccatagtgattcgcagctgatcgtaaaccaggtccttgggtaataccaggccaaaagcttgaaaatggcgaggtatttagagaaagtttggaagaacttggaaagatttgattaccttaaaatcgaacaaattccgagagaatagaactccaacgctgatgccttagcaaaactggcctcgcagaatgatatggatgaactaaatctggttctggtagaaatgctgagcgagccaagtatatatgaaactgaagacgtcgagatgatagatagctctccaacatggatgacgcctattgttaactatttactcgacgagcaactttcaaatgacaaaaatgaggcacgaaaagttttgcatacagtgcctcgctacacaatgatcgaaggcaaactatatagaagagggtattcaatgcccctacttttgtgtgttcttcccgcaaaagcaaacgaaatcat

SEQ ID NO: 134871 - DNA, 1025 bp, Cannabis sativa
  modified_base (597)..(609): a, c, t, g, unknown or other
  modified_base (670)..(671): a, c, t, g, unknown or other
atcaaaagatatcacaaaaataagattgcacaggggagtatgcaaagcatactccccgcgcgcgcataagggggcaaatggcgtgacaagaggctacatgcagccttctagagggggaaagctcggtcaagtggggcttaggacagcccttgtctgagtaaactcggtcatgggcttgtctgaagccgtgtgcatgcccagtccgcgcgcacatgcgtgttgctcactttcaaatatttttattcaaattcaaaaaatataactaattcataaaaaatccaaattgagtaatgtaacagcctaaatttattaatttttcatctactttcaagaaaaatacttctagaacgaaactaaaaatatttattatcgtaaaattgcaatttccatacaatcatcaaatatgcacaaaaaccaacatgaatacatcaacacaaacatcattttaaatccatattttatgaaagtaaatcataacctggctctgataccagtttttggggattattttatcaggatctagatttactactgtgtatgttatttaacatcctaaatatgaatctgtaaaacaatggaatttaaacacatataaannnnnnnnnnnnntacattggttgtagcagaattaaatgactccttccacttagatctctaacctttgtatccnntctgtagcagagtatcaccaatatttgagcccgattctccttcaattgattgaattcttcacagtcttacccactatgattgagtaccaacttgctatgtgtgggcatgtactctatcactataagagttcaaatttttgaagagagaaagagagaaggattcgaaaatagagagaagaagagaaggctcaaaatttgattgaaaggcttaagtacatcaacggttatcatctttcatttgagcacatcctatggccggccactttagctccctttcaccatttatttttaaattttttaatgtcaaataattcaaacctaaacctagaaggattcctacaaatagatagtgat

SEQ ID NO: 134872 - DNA, 509 bp, Cannabis sativa
cctccttcgtctcacctcagggtcggccctgctattacagatactaattgcatttgataaaataaatcatagtatttgtttggttcaaaacattttctttaaagttactatgttactagtttgtataatttctttctattcatacttattttgtttatttgtagtgaaattaaaatataaaaatttacaactatttatttttttattttatttttaaataccactaatataaaatttgtttgtgcagttaaaacactcttatccctttcaaagttttaaaaaaaggagaaaaagaataagttttttaaagtaaattgggtgacattggatagaaatttattactgtgatttagtaactacaaatgtttttattattagaattttctactctaatgttttaagattatttgaagtatttgcaagtttattatttgttaattccatttttggcatatttaattgacaaaactattttactattaattgtattttcggctggtatgtattaa

SEQ ID NO: 134873 - DNA, 664 bp, Cannabis sativa
atgagtccacttttgggaagaaaattcgagtggaagtgtttccagaaaagactccgagagtggtggaagcagcccttgttgaggttggtaatgagaagagagtggttgttgttattggttatctctcaattctaaggcccattttaaatcacatttattacataaatacacaataaattcgaagtttacaaaattaaattatgatagtttaaaataattaattttattgaataagaaaaatcatttgaaaatgatgtcggtgaaatatctatctttttttaaataaaaataaattaaaagttaaatataaatcctaatttgagtataattatattaatgatattctttatatagataaagcgtaggtgtaagtgttatttagagaaaagaaaaaaattattaatatttgagtgtgtgttgaagttgaagtagtaattaagtatggaaacaaaaaaggcatccttcagagaaatcttgatggtgagtaaaatgttcttcttctattcttcttcttttattctttaattcattcattcacgatttcttcatctataattagtgaaagagaattaattaactttaagagagtgaagtgatgatgagtgagatatattaagtttaacatatataccccaaaaacaattaaaccaaagtaataattctt

SEQ ID NO: 134874 - DNA, 1283 bp, Cannabis sativa
  modified_base (1244)..(1247): a, c, t, g, unknown or other
gatcagagtgacccactactgacaaatcctgctatgcaaaccctaaggaatataagagtcccaccaagaaccattcctgagcagcctaacacacagccacctactgtgggccaaggtgtgacttcccctctagctaagatcacaccatgtgtgcaagagactgggaaactaattctgcagccgatcaaagcactcccagcactggaatcccatccacaaccaatgcttagaggacagtaggggatgacactgagattcaaaacctctatgacgcccttggactcatgcaaggtcatactaacacaatgcatcatgaccaggaggatctccattttgcaataaaccttgtgttcgatgagcaacggtgccagttcatcgagtggagggatagggagatggaaacattgaaggctcagcaagcagccatcgatgaccgaacaaggtaggctactgtactgatacggagagcctatcaagtttctaatcagcaaccagctgctacgtccagtatcccattgggcggtatcgaagaaattgctgctgggcataccgcccagactcataatgatcagtcgtccaatcccttgtcacaggtcccacctgtgggccaagtggtagacagctagaccctatctaaccgttctttaggtggagttatacctaataaccccatttaaactaacagttttgtacaacccaccagccaaaccaatcaaacactgaggccacctagtgcttcagtattcaatagattgggtgtagcccatgatcccaagaattatttgaacaaaagaagaggtctggataaataatatgctcaaccggccactcagctaggcatccacattcatgacccagctctaagagatcctgacgtgacacaggtgggtcaagaggctgaaccaattcacccatttgtgaaagcatagttagatgaactaaaaaatatgtttcaaggcctaaccgacccaaaactaattgatcttgagttgtactgagcacgcagatcacctttcacctccgagatcgatgtcctttagctacccctaaagttcaagatggtgacctggaagatgtacacagggaaagaggatcccttgtcacatcttaaatattttgagatgcaaatggatctgcaaggagtacagggtgatgtgcagtgaagggtattccctaccacacttttataaactgcacaacagtggtattgttggaaattatttttccaggatcttagatctacnnnnaagtatgttgattaacaccctaagatcggaagagcg

SEQ ID NO: 134875 - DNA, 803 bp, Cannabis sativa
ttgtaacaagtaaattttgtaatttctttcatctgtgtaaacttagtaacatgatagggtccattcaaatcaatttcacctgtgtgagcctctatgtttccttttaggcttatatgcatataggaagcccatttatttctagatatttaaagggggttttttcattagtgtacaacaaaaataattatattacaaaaaatgtgcaaaaaaacacaattttaaaaatgtacacatttgaaaacatatttacaaaaattcatacatatttttaattaaattataattgaaatattaatgattcaactttctatatttagatttggataataaatatttatgtcttgatatggtattaatgaaaaggccacaactaattaacaaaatttgtatattaataatttaaaaattctatttataaacaatattatttgttgttctcatacaactcacggcaacatcatttataacataaatgcaatatttttaaaatttaaaacatatataatcataattttattgattaacacatgaaataaaaatctcaatcctaatataaataaacacatgaaaataaacaccatgaataaatttatatgaaaagtacttaaaatacacacatgaaaaaaaaataaaaccaaaaaataaacaaaacaataacatagatgagaagatgatttataaaaaatatacagatgtaatattttaaatataagacataaaaaaataattaacgattaaaaataataaacagttttaaattaataataaaaagcgaaaagaatacattaaaaaataaacaaaaa

SEQ ID NO: 134876 - DNA, 693 bp, Cannabis sativa
ttagtaattggatttgaaaaatcaccatccgatccaatccaattagacctcaaaatccaatccaatctaattactaattaaattagatcggttttttaattggatatccaattactaattaaatatgaagaaaatacgtaaaaattaaatatcactctttatttaagtttaatacttcataaacataccatcattacattgtaatgtaactaaaaatttcaaataattaaaacaactatatttctaaataataaaatagaataaaatatcatgaaaataaatatacaaaacaaccaactattgtaaatttaacacaaaaaaatccaataaaaatataataattatataaataatttttaaacacatataaatgtaattagatattagatcggtttttaattagattttgagattgacatccaataaccgatccaattcaattagaatctaactttttgcatccaatctaatccaattgtaattggatatctaaccttttgtaattagattggattagatcggttgggttcaattggattggattggatgttgcacacccctatataaagaggtctaagatgctcatattgtgtcaacctagtttctatcaacaaaacactttgttagaaaccctaaggagctgtttggtatgcatgtttcatttcatgggaataggtttaacattgcttggag

SEQ ID NO: 134877 - DNA, 685 bp, Cannabis sativa
ttttgggtcactttatatagttgttttcctttttagttattctttttggaaaataattatgtttattttctttggtttcatgtttcacacttggaatgtataaattgatcaaatttcggaaaacaacaatctatagaatagagaaaattctgcaagaaaataaagctgaaatttcaagcttaaatttgactatgttctgttcagatttcggaaaaaatcaaaacataaaagttttagatttctttttcttctttccaacgcatcttgaatcaactcatttagagtttgtatgtgaaagttatggacattttattgaaagatgctgaagctgtcaattttgcatcagtagtcgcgaccaccactttccatggtcgcgaccctttttcatggtcgcgaccatagtcgcgtctaggaggccaaacagcaagtttatttttgtattttgcctatggtcacgactaggctttatgtagtcgcgaccaggggcgaaatacgagatttttggccagttttttactttttcaaagatatcaactctaatttctatttaaggggctcgtgttttaggaaaagggaagcagaaacaggcctgaaaagtgaatgaaagaggggggaagcaatcttgaagacccggagcgatatcaccatctagtttctttcttttttacccttatttatcttttat

SEQ ID NO: 134878 - DNA, 557 bp, Cannabis sativa
  modified_base (26)..(66): a, c, t, g, unknown or other
taatagttttagaagttcatatttannnnnnnnnnnnnnnnnnnnnnnnnnnnnnnnnnnnnnnnngtaaaataatttccaacataaagaacttcatacaaaaggtttaaagaggaagcttcaaagaccaagaaggtggatgacggacaacaacttacacttcttcaagatgggatccgtacagggatcccattttggaacgaaccacaataggagggagcagccaatttctaagatttctagaagaggatccaaaagtacatcaatctgaaggaagcccagatagtggcctatgggggatactatccaaccggagtatcaggatatgtactcggagctcagctcttgggagccatacccccggccactcctcaaatgagcggcatacaattttccgctacaccaggatataatcagagccaagccttggctcctgcatcaccacattttgggaatcccataagcaacccctcagagatgagtggtcaagtcttgtctcactccactcctaccgcaagcctaactagactaggcgtgttacgtgatttttaaacgta

SEQ ID NO: 134879 - DNA, 839 bp, Cannabis sativa
  modified_base (623)..(624): a, c, t, g, unknown or other
ttactaatccacattactagagcggtcattacatctatagtcttgtatttttgaagcttttactttggttgagtttgtgattttgtgatatgagggttgttagggtttagtggtgttaaaaatggttttcagagttaattttgggttgattctaagttctggatattggttttgttgagttatgattgaattgcacaagtttggactttgaaacccaaactttgatctttaatgacatatatgaattcagtgagtttttttgagaattactggttggattatgttgtgtataccttttttaggtactctggaaagtttggaggcaattggacaagtgttgagcgaattggaggttttttggggtggagtggtataaaccggttaaccggtttaccagtacctgtaaaaccggttactgtaaaaccggttaactggttttggcagggtccccaaaaaacttgttttctcaattctcgtccatttcagtgccttagttgggtgtttccctatttcttaggttaatgtaatccctatagagtataacagagcattgagtgtagactcgggtttcccagattagggtttcaaacatgtaatttacccggttttaatatgtgattagnncatccatccagcacgagactttccgttcaggtcggccaacacacttgaatctagaaaggaggtaagaactatatataatgtgtaatataaatatgcgagtgtatgtatatattaagtgcatatgcatacttatatgttaattacactaccaacatttgtacaattatggtacagagtgcattggtatagtttatattgttaaagagtacattacg

SEQ ID NO: 134880 - DNA, 1511 bp, Cannabis sativa
taggatgttaattcaacatactttttagtaaatctagatcctggtaaaatattcccaacaggagggagccctccttgcaagtggcaaagtctgttcataagcacccagttcagcatccaacttgtctatgtcgaatgagttaaaaatgttgatcatgtatgatacacaaaatccattatactcaggtggaagactgttgagaattaattgaacccattgctcttttgataaatcaattccaagcagatttgctttctagaatttcaggatcatcatgagtaagtgtaatgtgatgctcttaccaggagacatcttcacactatagagttcatttgcaatggcatgtaaaagatgaggattgttgtgtgggttgttcattttaacactacaaatatcaataaatagaaataaatatcttggttcaaataaattcatacacagattaagaaaataacaattaaggaaacatgtttgcaaaaataccaaaataaaacatattcaattattttccaagatttccaacaaactaatacagtgtcccgttttaggcgagaataaaagatatcatccattgaatagagtagtcagctcatctaaaatgtacaccattctagcaacttttattcgatcgaaaagagaatctgacgttgtcccattttagacgagagtcaaggtcattcctatttcatgatctttcatactttgtaagccctactctttgcagccactattaggatagattttactaagcataaagacttacaataatatttatctttcgagattttacagcgttaaattgctaatgaacaaacatctattaaggatgaatctcactaaaacaagaactgtgtaaacacaacaatggagatcgaatgtctctttgattaaagctcattattaaaaataatgtatttttaattaatcaattattttaatctatatatttttaataatgagaattacatgatttaagttagtccaaaattaattttcaactttaatttaattttcaatataaatttcgaaaatttaaaaatatatatataatatataatttcaaaattatataaaatataatgaaataaaattgctaaaaaatatctaatttaagttattctaaaataactaaatttttaacataaataattttttaaattttaattaaataacaaataaagtatcgtgaactaattaccttaatttgaaaaaaaaatattcctattttagttgatctaaaattaacaaattttaaacttaaaaatatttttaaagaatatatgaataactaacttcgtagaacaatctacttaattattaatttcaaaatattctaatttaagttgatccaaaatcaatttgaaaaattaattttcaacttaaaaatattttctacgaaaactcctataattaagtatctagaataatctaattagttataacttctttatttaattaaatacaaaaaaatacatatagtttatcttgaatatatttcattaaactaagtg

SEQ ID NO: 134881 - DNA, 671 bp, Cannabis sativa
aaatttaaagaaaacatcacctaatacaaatgatgttttgaaatgcttagtcaactggctttgtgcagaggtatatatagtctctctaaaattttgttgtcactttatttttaatgagttcttagcttgttcatcatttttaagcatatgggtgggtaacatttcagctgcagctaaagaagcctttgccttccaatcttagtcgtagctctccaactgcgataagctgtctcgcaaccttactgaaggagcctgtggttaaagcattctttgtccatctaatggagttaggttgctcgtcccttttataaacccacctttcattcaaccgtcaattcaggtaaacttaaattcaatatacaataatgatttggatattatctacacaagcatttgacttgagtttaattatactactttgaaacagcttgtgtatgaaacatgcttttggtgtggcttttatcttactatgaacccgccattgagcacttggctacctctaaagctcttcctcgactcatggatgttgcgaagaactccacagcggaaaaggtgagaaacaatttttatgttctcttgtattgagtaatcacgcatcactttatagtttgttgtggttagttatgtagttatcgaattcgtaattttaaaattgagtaatgatacgtgca

SEQ ID NO: 134882 - DNA, 504 bp, Cannabis sativa
tttggataaagcattagagatggtcttaaatggataaacttttcttttgctaacaatgtgtagtgctacgcacataaaatgtcgatcaacaagacttggatcaagaatccaaataaattatctgatgagtatggagctggagtagtggcatttcttgagagagctaaaaattttgtggatgaaacaggactggttaagtgtccttgtaacaagtgtgtcaatattcaattgcagacaatcaatgtaatagaacatcatcttttcaataatggttttcttcagagttatactaattggtattggcatggagaggaggaaataataccaacaaataaagtggtgcaacaatgtcagaaagatgagataatggatggtcttaatgttatagaacaaccagaaaaaaataaagatgatgaaattgtgtgtgattatgagatgaatacaagtgaagaatgtgtgtgtgatgatgatgagatagctacaagagaagaaatcgagtgtaat

SEQ ID NO: 134883 - DNA, 511 bp, Cannabis sativa
cagaaaacaaattcacaaaatcatctctccaaaggaaaacctccataagggtcctcaattttccttcttcttcttaattaatatcatacttatgtatataataattgattaattaattaataataggcaaatattggtgaaattgaagctgatggggatgacactattgaatttgatgtgatgaaaagtggaaacacaatttggagatttgtaaggccatattcagccaagggagtgttgtttaactctgcgtaacaactcttctttattaatattatatttatatgtacatatatatatgggtgcactcttaatgggtattatccatgaatgagtaaaattagaaaattttgagtttttatgcttgatttttctatctaattaaaaaaatctctgatttttatatcatgtgggctgagattgttccagcagtaaaaaaaaaaattaaaaacaaagttttttagcaagaaaaataagaaaagaaaaagttgagtttgaattaaatattttt

SEQ ID NO: 134884 - DNA, 1251 bp, Cannabis sativa
  modified_base (489)..(493): a, c, t, g, unknown or other
  modified_base (519)..(523): a, c, t, g, unknown or other
  modified_base (555)..(559): a, c, t, g, unknown or other
  modified_base (588)..(592): a, c, t, g, unknown or other
  modified_base (620)..(624): a, c, t, g, unknown or other
  modified_base (1201)..(1215): a, c, t, g, unknown or other
ctagccagaccattgtggaggccagcctggccagccatggtgtagtcccatagctggcgggccatagggccagctagcttctaagagggagctggtctatcaattgatgcccgtttgagtgatcgggtctccgtttgttcaagtgttgacttagccttcatattggtgaattgtactgccatgtggccctgattttgtctacgtaaacatgccacatcacgaggacaaaaattgggataacatttttcctctaagtccctgtgcggacgtctatacgggtagggactttaccagctatattgatgttgtcgggattgttgtagcctttgcccagtaaaagttgatgcatttttaaaatactttttcttcattgtctgatctcatttcctcagtagagaaataactactttagttgcctttatgatgtgtatgtgatgtaagtgaagaaaagggacccacatgtgctacataagtgacttttggggggannnnntacataagtgacttttggggggaaannnnnacataagtgacttttggggggaaacccttttnnnnntgacttttggggggaaacccttttttcannnnnttttggggggaaacccttttttcacttnnnnnttttaacttttcactttctctcactagaaacttgctctagataaagctcctcattctctctagttggccgaacccacaagcaccattcttcccaagatttttacgctgtttcaacgatccaagcttcccaccttcttctccaacaaaatcttgtagtgggtaagctttctattcctgccatttcacttggtttgattaattttgccatgaatgcatgaacatttttcatgtttagaatattctttgattcttatgttagattgtagtccattcgatatcttgatctacatgatagacttaggatagataatgtgtgatttttagacgaaaaagaactaaaattgacctttgttgtgattcttgcctctttgagtcacaaagaacacgaagaatatgaagaacatgtttgagttcttgaaaaaacacgtgctctgatccgtgcagatcctggccagccaaggaggccttgtttgaagcttggctggccataggtggccttcatggggtctatccagccatagggactatgtccttaggctggtcggcctatgcctggaactgttggaattattttacnnnnnnnnnnnnnnnctaacaagtatgtttttaacatcataaacatgaact

SEQ ID NO: 134885 - DNA, 1059 bp, Cannabis sativa
atgtaaggatgttcataagagaatgaaaaattttataatatcatgagcatgcaattggaaaacttgtatatttaaagtgtatgtgtaagttattattatgaggtatgttttgttattaagtaaaatatagtagtataataattcttaaattaagtagtatatattaaatgtgttatgattttaccagtaagacaaacattacatacatgacttttgggttcatgtggtagaagaggaggtaatgtggtgagagcagacacaataccctaagtgcatggaaagtttaatttcgaggacgaaatttcttttaaggagggtagaatgtaatatccagattaagaatagtatttaaaatttattgaaatgataatcgtataaaaataattgtcttatttgttttttttaaatagtgtaagcagagataattattaagtgtagtggctatttttctgaaaataagtataaagttgcattagtttcaaaaataaaagactttggtattcttatgagttaagaaaattatttagttaagacctgaaatataacttaaggtccattagcggtggagtaagtcggaactagcccgttaggctggaattgaaccatttaaattgacttgagttatatttaagagtcagtttaattaggcttaaattggtgatgttgttcttaagtatgtgtacgttatggtacataggcaaggtttcttggagcttataatgatcatgtgagtggaataaaaagactaagtttgattctaaaaagtggttggagaaaaattaggatatctcaacttaaatatctatgtcaatacgaattatattcggaagtgtatctcaagtgttgggcgtattataagatttatgattataattagaatatatattaccttaataataaagataatacataattgttagttagaaatgattataagagtgaatcagatatatatacataattagtttcataagattttatttataatttttgtggaggaacacgtgtagattagtgctaagtccttattgctttaggtttaggtgtattgactagtca

SEQ ID NO: 134886 - DNA, 526 bp, Cannabis sativa
ccattccgttaaccattcttctctttcacgctattttcaattggtcccaattagaattttactctcaattccaatcgagttaaactcagaatctggcgatcgattaaactcagaattttaccttttttttctatttttatgcatctttttctcactactggcactatcatcaacccactatttttttatcgtcctcctcctccataggcggcaactttattgatttcggcaccaataactttcttggaagggtttcgcgagtcgatcaccttgcctatggctgagatttcgacaaccggcgcccaccgaccggttgttaaatggaagaatcccagttgattatttgggtgagttgatagtctcttgattattttctatttagttagtgagaataatggtaaaaaaatgttaatttttatctatcagaaacgatgcatttttcttcttttttttgctatttctttttctcttcaatgatatatgtcccttataaactcaatgttgcagaaggatggttctctgaagc

SEQ ID NO: 134887 - DNA, 742 bp, Cannabis sativa
tgaggagtattgttgttgttgtgagtgagtgagtactgatgagaaaagaagccatccattattgcattgcaacaacatcaatcatctttctttctacacagacagacttacaaaaggaagttgtagaatttgaatcatttaataaacgacatgtcgttttttatcgtaagtaaaacgacctgtcgtttcttaatcactaattgctttttgcttgtatttcttttttctgctatttgagtgaattgaatcatttatgacatatacaatacattcattaactcaaacatcgtatttttgatgaactcagtctaatctttattaactcataggaagagaatagggaagggtgttttcgtcatttcaaatgccctgttttgtttgtttatgagtctccatttgaatgagtattggagggaggggtgttttcgtcgtttcaaatgccctcctttgcattcgccatcgtcttgctttcccaaaatttcttttaatttttcataaacaaaatgctattaaaataacataatttgaataaaaggataatatacacaaacaaacctattcatatgataaaacaaagtatataaataaatattaataaaagataatactaatatttatataaaataaaaggataacccaaaatatcctaattaatatgtttttttaaaaaagaaaaagataatcctaattggagtggaattataactcaaaatttttgtataaatattgtattatgaatcaa

SEQ ID NO: 134888 - DNA, 1182 bp, Cannabis sativa
tataaattgtgtatctctctatttactctacttatctcttattttatctcgctaatctagcaagcgagtgttgaccactttttagggtcaacaagtattttgggaaatagggaaaactttaggataattttattatggggtccaattgtatattattttttggttggatcaactttgaagcataaaaagtaaaatttctctctacctattgcgattgaaaaatgttaaggggcaccataaggtaccaagcatcataagatgtagcatactgttattggtttaatttaatatcgagtctcacacattttgatttaataaataatataggaaatcactaaacagacacgacaagccacatcactacggtgttggacaccttaaaatatctaatagcaatactcaatgagattggtggttacaattaggagtgtgcataaatcgttccaatccaatgataactgatcgatccaattacaaccaaccgccaaatattagatatccaattgtgattggatcagattggatgttatttttgaatatccaattggatcggatcagatgttggatggggtgtctaaaaattcaatatatccaacatcaaataaaataattagtactttcatttagtctggatgagtaattagattttatattgttatacataaaatatatgtatacataaaaaataacattaaaattttactcttttttttcttggattagatggatccaatcaaactcaatacatactatacctaaaatattgaatggatctaatccaatccaaaaaatactaagtctaaaatattagataaatccaaattaaaccaataaatatattattaaaatatatccaacagatagaactgatctaattcaacatccaatggatgttgaatcgattgaatgactaaaattaattggatcgaatcagatggtaaaatcttacatctaatatataattggatcggatttagatatgcctaaaaatattagatgtggtccaatgaacacccctagttacaataagaaatgcgtattttatttatttttgggatattggctgcaaaaccacctaattttttttaaaacttaaccacataaaccaaaattttgacagaaaaacctactgaacccccattctatttcgctctttacactttcatctaaaaatctcagtta

SEQ ID NO: 134889 - DNA, 711 bp, Cannabis sativa
atctttatggtgaaaaatgcgagatttatactgatcataagactctcaagtactttttcacccagaaagatttaaacatgaggcagagaatttggctagaactggttaaagactacaactgtgagattctgtatcaccctagaaaagccaatgttgtggctgatgcgttgagtagaagaggtcccgggcagatttccactactgttatgatagcccttcaactagcctttcagatggttagtgcaaggattgagtttgtagttggaaagttgcataagttgacactttaatcttatctgttagagagaatcagaaaagcacaactagaagatctcgagctagtcaaggtttgagatgaggtgatggctagtcggcctaaagacttttcagtctcgaataatgggatgttactttataaagctcgagtttgtgttcctagtgttgatgagcttaagaaagagatccttgataaagctcacaccacaccttattcactgcatccgagaaccaccaaaatttatcaggatttaaaaccctacttctagtggtatgggatgaaaagagatgtggtagactacgtgtgcaaatgcttaacctaccatcaaatcaagtctgaacatcaaaggccggtagggttattgcaacctttggtccttcctgagtggaaatgggaggacattacgatggattttgtaactagtttgcctagaa

SEQ ID NO: 134890 - DNA, 1601 bp, Cannabis sativa
accaatcacagcattgtatgccgagtgttaagtcagccatcgacttggctaccacaggtgcggttcccaaggtgattgggagtttgatcattccttttaatgcgatgacgtctccagtaaaaccgtaaatacttgataccataggtcgcagatccttctcatgtaaccccatttgcttgaaggcttcgaaattcaagagattcacggaacttccattatccacaagtatgcagtgaacattatctcccccaatatttgcgtggacgaccagtgcgtcagaatgtgggtgatggacccacctcgcatcactttccatgaatgtgatatcgtcacattcccttttgaacagtttttcgggtcgttcactcaagttgttcacattggtgagcggcttatccttggattctcttgcatatcgttcctgcgacttcctagaatctcctgcgatatgaggtctgccaataatagtcaggatattgcgaggagtcctcgaaccactcgcattttggttttcttctttgtcatctgctcgtggataaccttcctcatttttcttgtacttgtcgaattttcctcgcctgattagttcttcgatttcgtcctgcaaaaactaacattccagagtagtgtgaccaatatctttatgacacttacagaatttcttagggtctcttttatcgcggtttccgctgattgggggaggctttttgaagaccccgttcttttcttcgatggcgtagatatggtcccgagggactgccaattctgtataatttacaaagcgcggaccacctttcctcttcggggaggactccttctttggtggggatttggctaattttagacttcgctatctctgcggactgtgtcttctcggactccttcctctggaattcttccctctaggactgtgagatcatgactgtggcactggtgacttacgtttgtctctgcccttctctaactcagctagagaattttcaatcctcttatgcggctctgccataacgaagaactcgacaaacgattcaggctttcgagcttgcagttccttccagaaatcggttcttggcaggacacctgttatcaacatacatactagcgaagactcgggagccttctctacttttgtcacctcagcattaaaacgcttaaaatagtcttgtaaagactcaccaggttcctgcttgatattagccagagtggtatagggtggcctataggtcatcgtggcttgaaaatgcatgaggaagaggtcgacaaaggtctcccatgttgagatagatgcctcggacaattggctgaaccagtcgtgggcattttcttccaatgttgccgcaagaatgcgacactttgcaagttggggtacctgatccacttccataatagtattaaatttttctatatagtctatgggattagtggtacctttatattttagggattcagatagttggaatcccttaggcagccgagcttgtcgaacttctgcagtgaaaggagaggtcccatgcagcttgtatatgggctttctctgctgctcgagcatttttaaggcctgcagaagcataccttggtcgatattctcggtcaagggagta

SEQ ID NO: 134891 - DNA, 1333 bp, Cannabis sativa
  modified_base (1200)..(1210): a, c, t, g, unknown or other
ttcaattaaacaccttgaccttgatcttgatatccaaatcaagtacaagtatagtatgtagtattctctttgtaataggatctgataatttgtattctatacaaactttctccaccattacatctccttagtcacaaaattcttgatattgtgaaatttctctctatatgtctactcctctagggatactggattctttactgtttggcaactacatctgtgttagttaggaagtaatgctactaggtaattcactattggtacaaagccaaaaattgaatagaactatcaaaggctaaataagtatctttcttgcaactttaccattcagtctcactggtagagttagagaatccggatcaatttttacagttctccaaaaacactgctccaccctagagtaatcaccatcttaaaattagactttctagcattaatgtatagtctagaaacctgatttggtgtagtctaagagtattaaaatacctcccttatcgactaacatatagtttctctttttgatcttaaaattcacttgattgtcttccaatgttcctttcctggattaagctgatacctatactcataacttccactcaacagtaggtgtctggtctaatgcatttaaaacatacataagacctctcgccgttgattcgtaaagaatttcttgtataacttttatcttttctatagtagttaaaactgttccttagacaaataaaatctatgtatatgagccaaaagacttcctatagagttagccattagaaaatgcactagcatcttactaagtaagtctcttacactagagtaagtaaattactaggtataccataagccatagatttagataatcttaagcctactatactaggataggaagttttgtcaaggccattgaatagacttatttttaaaatttctcttcttgtgcttgtattagaaaacctttagttactccatatgaatggttttaactgtagttttctcagctttgcttcttagttccttattctgactatccattacttgtttaaattaacaatagattttatcaccggtgtcttccaagtcataatagggtgagttccttgaaaccctctcactacgacaaggaaacgtgataatctgtctaggaacattattggtattatcctcatgggttgtatcatgacaacagaggcagtgggaccatcnnnnnnnnnnnaagatgatagaacactttggaattgaaaatatctcctttactttgctactttcttttttagatttagtcattttcttagaaaagtagtatacgtttaaacaaatactttcttatcttaatgac

SEQ ID NO: 134892 - DNA, 594 bp, Cannabis sativa
gttgcagtgctagttgtaataggggtttctatgtagaatttcgtaaaaatgtaaaaaaaaactgatttaaagtgtaaaaataaaaaaatcccaataatataattcactagttgtagccaaaaaaaagaataatataataaactatgaaaccggtaagcaaacattgtggtgatgggcataggcatagtcatagacgatcatgacaatatgaatataaatgtagactaacgaatcacattcgcaattgatgtcttggagaaaattatatgaattctacaatctaagcaataatgatacacaaagttgagtttaataaattgaatcaagtctactacgaatcaactttaccctacaataattaaatgagcaaaaatttagatattaaaatactccaagttgaacaggcaactagctagcctcaactgctataaaaaattataaatttaattaattatttttctaaatagtcacaaggctcaagatccacatatgtttaaagtaaacaatttcattttatcagtatttaatcttttgattttgtttttttttttttttttttgataaatatcattattttatatattttttttttga

SEQ ID NO: 134893 - DNA, 938 bp, Cannabis sativa
  modified_base (28)..(42): a, c, t, g, unknown or other
taggatgttaatcaaacatacttgttannnnnnnnnnnnnnnggtaaaataatttccaacagtgcacttctgctagactacgagaacacaagttgattccagccgacactaaacttcagcaagaaccgatatataaggaaccttctatgaaataaaagaaagaatagatagacatctctcgaagcagactgagacaagtgtcaggtgatgcgacttaacgattactaataatgtctttctgctttccttagtttcttaaatttttacttattcataccttttcacatatatgacttttttaaagcaagctctacccctcaactacaaacaaaaggttaatgctacaactccttctgttgtgccaccaacactctgatggttgactcatcgaagaatcaccgaaagatttcccaagataaagggaacaaggtcgtgatggatcctgcgaccaaagctcgtgaccctgcaggaaaagtttatgagtgatgactttgttgaaaaagttgagggagctcctttcgaggacataatgtcttgcttggtcgaaatggccttgcaattcatgatcgtgtactcccgggcttctatcgtgggtctcgaagacttcgatcttctaaagaagcaaaacacaacttttcaagaaggcgtgaggaaggcaaagttgggcattgttgccaaagaaaaagaggttgacgatcttgacaaagctaaagatcaagcaatggagaaggctaagaagttagaaggcgataacgctaccctttctcgtgatcttgagaccaaaatagaaaatgaaaagaaggcttatgatcaggttgttactgattacatctacataaccctgaccaagctgtcattcgacttcattgtttttggtccaaaggcagttgagatggccaatgcttttcgcaccatgtctctgttgggttttgtgccct

SEQ ID NO: 134894 - DNA, 502 bp, Cannabis sativa
taagacttaatataagtagatatatatttatataaatctttataaataaaataaaacctctttatttatttataaattccaaaagataacaagctaaaggagttacactaaaactcctaactaaagtggagccatactaacactccttattacataaaaaaaaataaacacgtagaataaaatgcaacttgacttttctactcttctatgtctgacccttcctctaacatatcttctgtcaaatctacatagtcgagttctaagtacaccaagtttgatgaaattggtaacttttgaaggaattcagacctaacagcattattgggtcgatgatatatttcttctttagagccatcagggtgataaatggtgtcggtaatttgatattgatccactaagttgatcatgagtaggtcatatctttcggcctcatctaccccgacataccctagatgttcccaatttgctcttagactatgttggacttgtggcatgttgagag

SEQ ID NO: 134895 - DNA, 1733 bp, Cannabis sativa
tggcatttactttttatgccatatttatcataaccttaataatttttctcatatttttgaaaatagtcctaaaaaatttggcggtaaaaataccttctgtaatacctcgctgttaagtgccagtccaaatcattaactttttatttttcatttaaaaaatcaaaaaattcatttaaaatctaataaagtaagaaaaatatatagaaattcatattttaactaattctattttaggttaaaattgctcaaaataaatatttatatcatttcaaggaaaaataaatatttatactatttactaattacaataatactatttataaagtttttttattacaaaaataccatggagagataaattctaagtataaaaatggagagtgagatactcatgtggataagacaagagagtgagactcacatgcgagtggggagagtaaagagatttactgacgcgtgcagaattgcagcgtgagaatgtggcagggactctacggctgccacgtggccgtttgaatgaagtgaacttgaccgtgtagggttgtttttctcaatgcaacagttatgcaaaaacaactaattaacaatacaaaaacaacttaacaacaatcaaacttcaaaacaaatttattaaatattaacatattgcattaacacaattaaaatttataaataacacaacactatacaagaactactaattgaacatataaaaaaaaatatttacaaattcattgcaataatataaaaaattttgaaacacataaactaaaaaaaaatacaataattacacataatttaaaaaaaaaaattaaagtgactaataaaaaatatgctcaattagaaatcaagtaaacaacaatatcaaatattttataaataatttagacataattaactcaagtatatctataaaaaaattacacttaaaataataatcaactaaaatataaataaaaattaacttgatatttgtttactataataccattcaaaaattataaagcacctaaaaattaacaaaaaaattattattaaaatatgttacctacatatatatatatatataccatatgtatttattttttcttctcttagtgaaatatttaataagaataaactattaactaacagtaaacaaataactatataaaaaaaaaaactcaaatatatatacaaaaattgacttttaattttatttggcaacaaaaatataactacacaacaacactaattaacaaaaatatgcaaatcaattggacatcaataaaatacaatcgacaaccttaaaaaagcataaacacaacacgtacacaaccttaatacatgtttaaacagctaattaacaaccaaaaaataactgtataacaacacaaaagcaatcttaatacgtgtactcatgaaaaactaagcatattattatttttatattattttgacaactaaataacaacaataaaacaacacaataacaaccacattttaatatgcaaattaaatcgatttcaacaccacattgcaataacaaaaataaaagctacacaccaataatctaaaaaaaactaaaactaaaactaaaagcaattacaaaatacttgtataactcaaaattatatgtacctatcaaaaattaaataaatactcatttttatcttggttgaagaaataaataacaaaaagaaaagcatataataactctattttaatatgaaaattaattagacatcaaaata

SEQ ID NO: 134896 - DNA, 556 bp, Cannabis sativa
tacgactagttgattctatttcctctcctatactaatctattgtgataataatattgttgtattcttttcaaaaaataatgagattagtagtgcttcaaaacatatgaaaatagagtatctcagtattagagacttggtcaagaaatgagacattgtgatagaatattgtaagaccaagttgatgtttacagatcctctaaccaaaggattaagtgctatgttgtttaacaaacgtgttagttgatatgagcattttataatcttttgcacctttggttagtgggagtttcttattctatcatttgagattacatttatatgtaatttacttgttgatgttatgaactactttgtgggccaataatttttttgattattggatgtttatgctttcagttatgtttcattatattctcaagaataattgaattgaaagcatgttttaaatgcaattacttaatgacaatgatattttgttggcttaatttttaagcatgtttagtgacacttacttatttattaagtaatgtgtggttaattttactagcttattta

SEQ ID NO: 134897 - DNA, 676 bp, Cannabis sativa
ttttttttttttttgggcaaaacttccttattttttttttttttgtaaatttaaagtttcagctaaatataaccgttaaatagtaactaaattattactctatcgacttcgaagttgtactcttacatatacacaagtgtatacagtagtcatccagttgatatttaacagtaatatttaactggtgtgtcaaatttataaagaaaaataaacttaaagaggttttgccactaaaaaaaataaaagggttaagtgtatataaatcaatatatataaaggataagtataagatgctcacatgatactataaaattactcaaaataagtactctatttattttctcctcaattctctcattttaattaataaaatatcactctaaaatcacttaaaataattttatctattttttaattctttttataaatattaattgattaattaactaaaaaaatattgttattattattattaacaataaaaaaggtatctaataaaaattataaataaattttctaaactaataaaaaaaccgataagtagcaattaaaaaaaatattattattattattattattaaaaataatgtatatgtgtataataaaaaaactgtatttggaagcattagaaaaatacatctaactaattaagtaataaataatatattataattta

SEQ ID NO: 134898 - DNA, 630 bp, Cannabis sativa
cgtctgggttttggtcctagtttgtgtcccagatctagacaccgactactcgtctgttccactccccattacctgaatcccgagtcaagatctggatcactttcagggctttcggtcttgttttggtgtaggtcctaggtcccatttcggagtttgggttcgggatcgagactggcgtgcggttctaggtccggaccctggttttgtgtccctagtctggttccaagtttgggtttgagtttaggttctggttcgggtctcaagtccgggtttgggttgtgatccgggtccatcccaattcgagtctaggtctgatttggagtccagttctggtccagttacagttctacatctatgtccaatttcagttatgattccaagtccaagtccttcttccagtcccggtcaacttccagttttagttccaattttcggtcataaggtactagttcgggtccacttttgggtttgggattgggttcaggtgcgggtgtgggttcgggtccaaggctgggtcgaaaatctagacaccgactaagggttttgtcaaagccctgggtccagatgcggatcccaatctctggtcccagtctggttccatttcagatgccgagtcacgagctgggtcct

SEQ ID NO: 134899 - DNA, 735 bp, Cannabis sativa
agaagaaaatgaatggtgaaatgggggtgattttctgtggtggttggcgtcgatttctaggttggcgttgattttctagaaataactggcgcctgccgggtgcggttatttccaaataactgacgccataagtggcatcaaaatcccttccaaaacttcccaaccctaggctgtcggttctttaatattatgctgaaaaaaagtacctctaaaggcttggtttgtagtagtgtgaagactagaggtcgtttaaaccattttggtgttgtgaataattgtgtggtttgtgatgttattaggaaagatgttgaccatctttttttttattgcaccttgagtagattttaccttgacaagattaaagcttggttagggtgaaatactcgtgaaactaatgttcatagattgcttagattcttagatgtggttatgccgtggacatgggctttctcatttttgcaaaatatttttggagttgttgtggcagtgttggcgtatcatcttcggaaggctcgaaatgtggtcttggggtctcaaagttcctagagttaagtgtatagtttcacaagtttagagggatgtcttagcttagcctaactgttttttatagatataaaacttgtgtaaatgatagaaattaggtgcaaaccttacatgtatatataggaggcttattgcctattactagcttgtacaggttactagaagagacatgtggtgctgctggctgtcgaa

SEQ ID NO: 134900 - DNA, 526 bp, Cannabis sativa
  modified_base (483)..(487): a, c, t, g, unknown or other
atattttatgcttttttaatccatgtaattcagtcctaagccctagttgaaacactataaaaggaacgtgattgtaacaccctaactattttaggcatgttatcttgatttttaacttactgttcaactcgttactaattgacgaggtaattgaaaatcgtgattaattaaaattttgcttagttaaataaaaacataaaatagcttacatatataatttcaggatcccgtttacaaaagtttcactgtacatatataaattaaagtctatcgcctagcaattaaaaaaaataagccctgatgtcccaaagattgtacactccaggactaaccgccccgacatgtacaatgtccatctgcccgctctcacagctgcgagacttccgtaccggcatggacgggcaaggggcaggagggttcgaaggaagccatctttgtgtgagagctagataattttgttggattttattttaccaggatctnnnnnctactcacaagtatgttgtttaaataccctaaatatgaa

SEQ ID NO: 134901 - DNA, 903 bp, Cannabis sativa
gaaaattattatagataaaaaagaatgccataaaaaattataaaattgtggttcattttttatcatataaaataaccagttatttacataagtactgtaattataattctttttttttaacaaacaaaaaaaaactatataagctaaaacaattgtaatataattttgttaaggcaataaattaagacaacagtttattctaagtaatcaaagctaacttttaatgaaaaaaccagctatacagttgttaaaattcatatataaaattttcatatttttactaagctcaaaaacttatcatcaacccactatcaaaactaatgccaaaactaataccaacataatactaatattaaaaccagttacaaacttctcagaaactccaatactagaccatcaacaaaacattcaatatccactaaacaataatattagtcacaaaagaagtagaaaatatatagaatgagagtaaattgctagagttgttatcttaataaaaaaaaaaaaaaaaacagttattatatggatgtcaaaaattataaataaattttacatgcttatattctagatattgtatggaatattgaatatataaaatacaataccaaaataaaattggttaaaaacttctcaaaagctccaagatttaatcatcaacccaatacattatccaaaatagtcattatccactaaaataaaatattaaccgcaaaaagagtagaaaataaaatgagaatattcgctgaagttgttatcgttgtcagattgtcattaaaaaattcgttgaagttgtcttcataactggaagtcaccattgttagaaatcggagttgtcattggtgttagacgttagaatttgatacactgaaaccagttacaataatcagctagttaaaactataa

SEQ ID NO: 134902 - DNA, 507 bp, Cannabis sativa
cctacattttaaatagggtaccaactaaagcagctgtaaaaacaccttatgagctttggacagggcaaaaacttagtcttaagcactttcatgtttggggatgtccagctgaggctaggccttatatgccaaatgaaaagaagctaggacccaaaactgtgagcagctactttattggatattctgaacgatctaggggtttcaagttttatgatcccaaactaaagaatatatttgaaacgggaactgtaaagttttttttgaggatattgagtttggggggtgaaagaaatacggttaaagactttttttttaggaggatttagaatcaaccactcctcttgctgatgagtttattcctattccaatagttgcttttgacaatgttcagaattccattcctaatactgatcaagagcaaccaaacatagtcaatcaaaccccagaggtacaaactcaacaacctcaagaacaagtgcctttgcgatgatccactagagaaagaag

SEQ ID NO: 134903 - DNA, 679 bp, Cannabis sativa
tgttgtcctcaaaagtgagtgttttaatatttatactcgcaagtgcacgaatcaagtatggaatatagtgttcatgtaaccacgaggtcaaacccaaatgagttgatttatatctaagagagactttttaagctcaaaattaattaaactctaacctagctccaaatatttgatgagatttgtttcataaaagaaaagaaaataattaagcttttaaagtaaacaaaagggatttgatgaatagatgatagagaaaagattattaagactttagaatccacaatatataaataatattaaacagtgtattgactcccaaattttcttgatagttgaactcatccaaactatcattttttaaaaatatattttccatttaattataagttatttttaaaagatatgattttttttcactcaaaatgtataatttcataacattagttgtgaaataagttaatgaactacaacaatcaaagatattattttttaggcaaaaatataatttttatattctaagaattggatgtgaacaatctaatgaaccacacttaatcaaagttgttatcccaatttttgttctcatgacgtgacatgcttacgtgaacagaaccagtgccacatggtagtacagctgtaatatcccagaaaataaataatatttaaatggacatatttt

SEQ ID NO: 134904 - DNA, 632 bp, Cannabis sativa
  modified_base (246)..(254): a, c, t, g, unknown or other
tattttaaatattatctaattaggttatgaataatgtttttattatgtcattttgatctttaaaaaaaaaaaaatagcattttcttatgggtaattgattaaagtccaacatggtttggaaacacctaagtgttatccatgtaggttataaataacacttttgttatataactttccatgtccaataaatatttttctttattgatttatgttttatccaattaattttaaatttttatttaatannnnnnnnntatatctatatataaatataaaaaaagcacaaaaaagtcttggtggtatcttaaagttttttcattgtatttttaaaattttataacattttcatattttatttagaaataaactactacaaaattataaatacaaacttaaattttaaatttttatttaatatataaaattaaataatttatcattcatattttgataaataattatatatctttaataattaagtaatttacaaattatatataagtttttgtttgtttataatttttcattaaaataaaaatacacatatatataataacatattttttataatataataggaactataattaattcaatattttttatacatataaatatattactatttttaa

SEQ ID NO: 134905 - DNA, 936 bp, Cannabis sativa
  modified_base (487)..(497): a, c, t, g, unknown or other
caagtttaaaatcacgttaacacacctaggttagttagggtgttacactcggtcacatgcagggtcctaggtgtgcaccagttgtctaaacgaggggctgaccaaggattcagacaggggacacgggtgcatgaccctccttgtctaagtgcctgcgcgcatggtgctccatgctcgagactcagtgcatcaaaaatttcaaaacctcatatctttctcgtttttaatcagaatcgagttccgtaaaaactaaacttgcttaatttcacaagaaatccaaacaaattatttctagaacgaaaataaaattatttttcgttgaaaaattcataattcacatttaatcatcaattaaacacataaactaatatgaacttatctaaatcatacaaatatcattttaaatccatatttcatgaaaataaattattactatggctctgaggccagttgttggaactttttttactagaatctagatttactnnnnnnnnnnnttgattataaactataatctaacatcctaaatatgaattttctaaaacaattaaataaacacataagagattaagaaatccttacattggtggtaacagggtggtaacagaataataatactcattccatactcattccatttcattccattcaaatctctagcccttgattcctgtctgtagcagagcattataatgatttaaacctggatctcatctccatcaatttgattcagcacagtcttcctcactatgctagatattactttgacatgaatcggaatactcttagttcaccatggcttcgaaatattcaaaggaagaagaagagaaattcgaaatagatagcggctcttttctattttctattttatctgacaaaggagactaggattttatgaaaataagagttatactttctatttatagggagatacta

SEQ ID NO: 134906 - DNA, 595 bp, Cannabis sativa
tttttttttttttaagtttttttccttctttttttttttcttcaattttgtttttggtaaacaatttttttaagttgttattggtatttttaatgtgcttaatgccatattgataatatgattaatactatattggtgtggtactattttttcgtacttttaaactttgttttaatcttattttttttttttgtaataaatttttattgttattggtattcatactcaataaatagtttccaattttttttgtctcgtgttttttttttttttggatgctttttgtagtatttactattatttttagtaaataattactaattagttagtaatttttgatgtaccatttactaatatttatcttttatgttttttttttttttgtttttatttaattttattattttttttttgaaataaatttttgtacttgctattaatactcttaatacacttaatgctatatcggcatggccgaccatgaaatttagcgggccataaaaaaaaatatttattttgggcacttatttagaaaaaaatatagtatttttcaaaatcagtacaaaaaattgtataattttaaaagggaaatatt

SEQ ID NO: 134907 - DNA, 776 bp, Cannabis sativa
tcttggtgtgttgtgttctttattaagttgctctgtattcttggttaacattgctcttcttttttcttttttttaatttcctctgaaaaactaacggacctcaagtcttgaggtattaccccttgtgtttccgtgcttgctgtgatttactgcaggaaaattaggtatggagatgttccgtgaaggaggctccacctcttggccacccatgcatgaaggagcaaattatccctactggaaaaccaaaatgagggcgttcttgaaagttgttgatgaaagagtttggatggctgtgtctgaaggatggttccctcccttggttactgatgaagagggagataaaccaaagaaaaccagtgagtggactactgatgaaatggaaagagaaaacttcaactcaaaggcacttcatgctctcttcaatgcagtctcgactaatcagctgaaggttatctctaactgtgaaattgcaaaggatgcttgggaaaagttaagaatcaagaatgaaggaacagaaactgtcaagaaagctagattgagagccctagttaaatcctttgaaaacctgtcaatggatgaggatgagtcagttacagattttcatgccaagctatgtgacatttctaatgagtcctatgctctggggaaggtatattctaataaaaaactggtgagaaaggttcttggtgccttgccgaaaaaattcatgtcaaaggtcacctcaattgaagaaagtcgtgacatagaagctctagaccttgatgaactgattggtt

SEQ ID NO: 134908 - DNA, 1298 bp, Cannabis sativa
aaaaacgatatactattgtgcaaattaactataccaaacacttaattattcaaggttataattgtaatttaatcattacatttttaactaaaaagacattttgttaatcttttttaaaaaagggacatttattaacttaattgttagatttagggccattttgcatcttggtcctaaaacatatcatttaacaatgcaaaaagtaaacaaagttataactgttaaaaaaatatatatatcagaaaaaaaaaactagttaaaaacttaaaaactagtttaaaaacttacctaaaacatttataaatataatttaagcataaccagttcaaaataaaaaatataataagattaaaatattactttttccataaaacagtaaaaaaaataaagaaagtaacaaatgacaaaacataacagaaaaaaaaaaatcgattaaaaaaatagtcaaaaacttgaaaaatagttaaaaacataaacaaaacatacaatcataaaattagaaagaaacaagttaaaaacaaaattacgcttatattttaataataatttttctttaaaaatacaaaaaagtaataaaaaaaataaatgacaaacaaaaaccaaaaaaccagtaaacaaattaaaaacctaaaaccaaaacaataacacctataaattaaaaaaaaaaaaacggttccaataaaaaattataataatattctgatattacttttttttttctaaaaatgcaggtatggaacaaatcatatgtgtcatcaaataatgggggtcaatggagagaaaatacaaattatgatgactacacaatgactggaattctaattccaaccaattcatcactagcaaacttgatggagctgataaaaacagagataaactgcagcagaaacaacatagacatatcctactagatatcatcaagaacaacaccgatgaaactactgactgacaattccctcaagctttacattgagctaagaaaatcacaggctagagtaactgattccgcactatgcatcacaactacagacgaaatagctatacaaatagtgtaaaatcaatcttctgaccagacagtggaggaactggttctacaaatacacgacgaaccattcaaccagcaatccaatattgaaggacaacattcaaatcatgattattgtcagttaacaattgccccaaacatgtttgccatggctgaacatgttgcagattctataatagagcaatcaaatgaaacaacaaaaaagagaagggatgaagaaatagagatcatcacagattacatggtgcttgag

SEQ ID NO: 134909 - DNA, 1067 bp, Cannabis sativa
ggcataaaacccaacagtgtacacttaacctcttactattggttctcaggcacatcttgtaatgatatatatcttattctgaaactattagtttcttctagactaagtcatcgacatagcattttagtattaacattaatgtaaaatacttgcttaagaataagtaatcattaaagataccataaaacttttcataaggactaggggttttgcctgtgtcattcgaatagactttgcgaaattctcctatcttatcctcaaaatgttgataagttaattatattcatatgaatgattagatttactttcttagttttattctaaagtttctattcatttgtaagaagaatcttctacagatgaagaagattcttgggtgtaagtgtgagagttgaaacactttgtgagaacttaacagagaatctcgtctcgactgtattgtacctattcttgcttaataattaaaaaagattttctggtgttccaaaactagagtagagctatagatcacatcaatctattggacttgaaccaatatatttcttggtgttgatttttttattttctgcaattactattttctggttttgtttactctgtttgcccttgttttccgcgatctctgcttagtgtttgtaaattttatcattgctagttctttgattgttaaaagttaagttgatttggctcttcaccactagtcgaaaattttcccacatataataacccaaaaagaagaaagcataggtagtgaatttttaatagtttggactgctatctaacaatctgactctaactctactttttgctatgatatccaacttagcattaacaaactgcctaagagcatctccaatggtagaattttagaagatatttggtgaggtggatattttatgtggcaaaatattgatatgctataccataggagagaaaatgatgtcattctagaaatttacattgatactatgttgtagcagtgattaggggtgttcaataaaatttacaaaccgcccaacccgaataaaccgcccaaaccaaaccgaataaaccgacaaaaaatacaa

SEQ ID NO: 134910 - DNA, 669 bp, Cannabis sativa
tatttagggcgttaaacaacatacatggtaataaatgtagatcttggtaaaacatattccaacaacggtgtctgtttgacgagtcgtcttcaccactagactcatctaatcattgtagagaacaacctacactaagccatttcacctagccctctactttttctggtgacgttttggtagctctaccccttttcggtgactttccggtgacttttcggtgatattgtgtaccgtttcaataaatggttggcatgggtgtgatctactcgttgagatcatcgttttgatatatatgatccctattttcagtgacatttccaatacaccgatttctgctaccaccgatagttaatgtgcaccgcttaggtgaggtttcagaattctaaattttaaatatagtcatatcatacgtcgtgggacttgattttgaaagtagaatgcaatgattataattacttagcgatttgatggtataggttagagtgatatctaatattggactaaacaattgaagctcgggacttgagagcttaagatcgtcttttggataaaatctaacgacttgggagaggtagggactaaacttgattattggacttaatttttatatttgttgaataacatcatgcatattccaatttttataatttacaaattgtttgaaaaatt

SEQ ID NO: 134911 - DNA, 626 bp, Cannabis sativa
agaaaaggcgcgaaccttttaccgtcgcattaatgcgccgaaaaaaatatctcaaagcaggttcaaagcagataagggtatctatttaggctgacgtttaagttgtgtcggcgcaattttttgctggtaaaacaaggttttactggcgcatttcacctgtgcgacggtaaaaactcctttaccgaccaagattcgctgacctattttgttggcgtataattgcgccggcaaagctttgccgaggcatttagtttgcttttgtcgacgtatttttgtgccggcaaaagtaggttttcttgtagtgaccctccctaaaactcatgatgctgctggaagaagcatcaagagtttgcctaaaagaaaataaaaacgagaaatcgtatgtgacttagtaaaaaagtcagcaagctgcaacgatgaaggaacaaaaggcaaagtaatggtgctcactttcaaatggtgatgagtaaaataacaaacaatctcaatatgcttggtgtgttcgtgaaaaactgacttgggagcatctaaatggcactttggttgtcacaatacataggagtaggacaagagtcaatgacacccatatttgtaagtaaccatctcaaccaaacaatctctttagt

SEQ ID NO: 134912 - DNA, 658 bp, Cannabis sativa
aataatttaaaatatgaaagaaaaataaaatttaaatagtcaattattttttaaaaatgcgtaaaataagaacataatatataacttttatttttgtaaattattttagcgaaatttataaaaatactaaaatttaagttaacttttataaaaatactgtcacaccgaatttttttaaaaaatattttatttttataaaataacagtagaacacaaaagagaacaactaaaaataacagtgaaataactaaaaaaacaaccgtagaacatcagtgaaaacttaacacaacacagtacacagtatttggaaaaaaaaaattcgaccccacaataaaaaagttaaaaaattaaaaatttcagcatgtggtgtaaataatccattattttaagaaattgtaattctattttatgttaatgttcttctaaaagaataatttgtagcataaatatcttttaaaaaaaattattttaagttacaaattgttagcttaatttttagacaataagaccatctttactgagagatgtaaaaattgagttatatttttacattaacttttattattgtgttccaatggataattgtaaatctttatgtaaaatttaatatgttatttaatgtccatttaataattttttaaaaaatataataataata

SEQ ID NO: 134913 - DNA, 582 bp, Cannabis sativa
acctccacatgtcgagttcgagcttgtccaatgaaaactccgttgacccacttcctctaaccacaatcttcgtcaccccaagatggatttcaactgtgtgagccctcacattgacaccgaaaccctttgtcttgaccatgggggagccaccgaagtttcttgcaggtcagaatggtggtggacggctagatttagggcagtgagagaagagagcacgagaagaagagagaaattttagggaattagagtttttttttcttttttattattctttcattttatgatttatttttaattttagattaatttctttttaaataaatttgtttattattttaaattaaattatttttatttttcatggaattagattgatttattattttaaattaattaatttattttttttaaatattttttaggtgggctaataatataatgccatgtgtacattgtgttcatgtgaaaaataccttgtgtacacatgaacatccccacatggaagttaactgccaaaaataaatggaaagggctaagtgctaacggaacatgagtttagggggttttaccaccaaaatttta

SEQ ID NO: 134914 - DNA, 971 bp, Cannabis sativa
  modified_base (35)..(54): a, c, t, g, unknown or other
tttctgatctatactaataagtaaatctgattatnnnnnnnnnnnnnnnnnnnngggcataaaacccaacattttattattctacatttaattaagagtttaattaattaataaactggtattattaaaatatggaatttcatcccataatcacactttcaactttatccacaaagcggttatgctggctatgcttcatcttcctcgcaatgtgacaattctttttgacactttatcgtaagccaacgtctaagtatatgttgttgtatttctcgcattcttctattaatgttgagtgaggtatacatgagacgattgtcacaccaagacaattgcgagatgaatcatgttgaaagtgttgtatttagtctttcaatatactcacgtgtatgtaggtcaatgagctacaagctctttggataactcattatctaccctttccaaacaattctgttgatgtattttgtgtatcccaagatggactttccttgttcgtcccgctagtcccatcaattggtagttattatttatgcatcgtcgttgtctttaaaagagtgacttcgaatatttctacgaattgtatttcctaagacgagttgtctaaatgcatttattgttgcataattttaggctagttcatattccaactatactatacatgatgttgctcaaaatataggtataacagagaatattactagtttacttactaattatcttgaggcgtcactaattcatgttcatccctaatttatgttcataatcatgaattatgcactaaaagtgaatgatgaaactaatcatttcttcatccttttttcttttttaaagaaacttaattatataaataactataaaataggcctaataatcattacaaacaatgttatagtattatttatttttgggtaaatactattttagactttgtgttttgcaaaagttactaattggactttctgttttattaa

SEQ ID NO: 134915 - DNA, 1284 bp, Cannabis sativa
tttctgtgttagtttcataggggcacatatacccagcatatacaaaatagaaaatacatgacctataccataggtatcttaggagttaggtgtagtcgtcactagccttattgagtatagtgtaatagccgaaaaagaggggttacgccatctgtcatgtcgtttatggagagtacaatacgtcttcccccatgcggcattaaatgcaaagtgattgttcaaaagatctcagtacctcccggaatcgccttggcgtgtctctggcctcccggagagtaaagatactccttatgtctcctctgggagacaccttccctgaggcgctcctctttcgtctaggacttagttgatttcttaaacactagtccttacggctccacatgtcatccttatctaggtccacatattttggaaaaaatcaagggcaacatttacaacccaagcctcgtttagtgaaggataaatgaggcttgtttggtgcctcctgtttggcttatcgattcaatggcacatgtttcaagcgcgtgggctgtatttatgatggtcatcattaatatttatttccttttgcaggcaacaattcgcttctcgtccattgagaaaccaacgcatttaatcagtgtcttagaaaagtactcaaacgtttccaaccgccctgatgagcatttatcttaaccgttggatctatagaatacgaatcgattacgattcccaccgtacgatagcgtctgatcacagctgccttccactctttctggtctataaaagctagccttttttcttcacttggttactttcaccatttcgccattttgtcccaaaaactccttcgagaaaaattaaagaaaccatagattttttactactatttctccgtagttgccaatctgcgttctaccgtcgatcatcatcagcttccagttcacaacctttgtgtaagttttctgggtacttcatacttctgtagttctcgtgcatgttagggtagagcttttggcaaagtacttgatttctgtggagtgattttagcgaagactgtcgtatggtgtatatatcctcttttatttgtgttctactattttctttctcttttgctttgcaatcaacctttctgctgagacactgttcagggtatggaatgaatttcatactcttgttcctcttctcttgtattttctttctttttcctctactttcaccgcctttgagatatttgcacccgatgtttgcctaggagaatgtctggattttccatttttggcaaacatccggagggggcctctt

SEQ ID NO: 134916 - DNA, 584 bp, Cannabis sativa
taaaaaggaaaaataaatagatatggaaaaataaatagatataaaaagtattgtttagaagaggtgatgtgatgctttcctagaaaacgaaataattaaccaattgagaaaaacatgcatataccaaatgtcgaaggtactgtggaagaatagtcacgagaggtaacgcaactgcaatgaacagcgccattgaaactacgcaactgcacttttgggtagccatttttgcttctcactctaataatactatgaataatttatttaagagaaaccatgcatatacatgaaagaagaagaagaaatgtatggtattaaatgggcagctatagtcctattcgtatatagaaagaaattgggaaccagatgagttgtggctacaatattgaaacatcaaagtaatagaaataactaattttcttccttcaccattgctatttttctattatattgttggagtaaagttaagattatatatgttttgtactctgcgtaggttttatttttttaagaaattattttcaaaccaatcttttatttagtttttattattttattatatataaataatattttagatcggaaga

SEQ ID NO: 134917 - DNA, 679 bp, Cannabis sativa
tctgtccacctactgcttggcccacaagtggaacctgcgacaagagatttgatggttgaccttttatagtctgagaagtattcatcgctggatctttctctattttacctaagaatatgacattcgggggttgctgcccaatagtttgataggctttttgtaacagcacagtagcctacccactacgattgtcaatatctgcatgatgagcccttaacgcttccatctctttgtccctccattcggtaaacatgcgtctctgttcctcgaacgcaagatttaatgcagcgtggagttcctcttgatcatgatttagggtgttggtatgaccttgcatgagtccaagaacatcacggaggtttgcatctaagtatcatctccaatggtcgtttgaacgttggtagcaggcggaacagttgtgttatgaatgccctggttgggtgcaactggtattcccagtctcttgcataccaagcataatttcatccataggagtcgtcacaccatgacctacgtttgacggctgctcgagattaacagctggcggaacccttgtgtttcctgggttctgcaatgtaggatccaccgcctgtggattttttgaatcaaccaggcccgtacgagtctgtactgttaacttaaacttttagatctccttgttttgatgattaacaaatat

SEQ ID NO: 134918 - DNA, 651 bp, Cannabis sativa
  modified_base (583)..(603): a, c, t, g, unknown or other
tcttaaaagaactcttgaacttatatagttaatcttgtggtgttcaaacaaccaaacttatcaccttgattcttgagagattcttaagtttctgggtgtggcgtttcaaaatttcgtagtcttggttttcatctagttaggtgacgggtcaaagctcaagaaatcttgtctacacgaatcttggggctccaagccatcgttgttattgggtttcatcacaatttttggaggagttcatatcacatcctcaatcacccaacgtgaacgcccgtcgaaatcccatcgaaggctggtgacatcggatgaattcaaatgagtgtcagcaatacataacttcggtagtgaactcggttcgaagagcttttaaacatcctcaatcaacatacgtaaccacctagttgatggttgtgatgccgaatgatttaagacgagtgtcccccatccttctgacaatgaagttagtcaagattgctatcagacatcctcaatcacccaacgtgaacgcttgccgaaatcccattggagggtgatgacaccgtatgattttgtatgagtgtcaccaatacatcactccgacagtgannnnnnnnnnnnnnnnnnnnnaacatcctcaatcaaccaatgtaaccaccaagttgatggttttgacgc

SEQ ID NO: 134919 - DNA, 1093 bp, Cannabis sativa
  modified_base (131)..(143): a, c, t, g, unknown or other
  modified_base (210)..(215): a, c, t, g, unknown or other
  modified_base (1019)..(1047): a, c, t, g, unknown or other
atggaatctatagcgtctatctggacatagaagtaaaatgataatttctttcgagcttcgcttaatagagataaatggttgagtactcgtttcagtaaatatattagtttaatgaaatatcatttataggnnnnnnnnnnnnntaaggataaaatacattgaagtgcgtaacggtaaatttatcgctactcgatgtagatcatctatagnnnnnnattgattattaggattataataattgataatttcatagcgtatctatatcgtggaacgtatagagcgctctataaaattaagagtacaattccaaatctatagtggtgcaatggcttaatagtgaagaaaagaggtttagggtttgtttattaagtaaataatataaaagataattttattttataattaattgtaatcattaaataaatagttttggcatttataggattaaaattagaaaatatggcttttgtgaaataatagataaatggttgaaaaaatagcaaaaatataattagtggggtccacctatgtggccagccacttaatcctattttaatctattgttttatcatttatttttattctatataatttaatcctaaccctaagtgaaatagtataaaaggaataggagggtctcattatctaataacataagccaatgcttataacctagtttacattctgtcagacaactagagagttttgagacctccttcttccttcttctatttcgaatctccttcattgttcttcaataatttcaagcctatagtgcgtgagtgcatgcccacccatagcaagtctagtactcaatgatagtgtgtaagactttgaaaaatacaacaacctgaaggagaatcaggctcaaatcttgataatactttgcgatagaaaggaacaagggttcaagatctgagtgggaggagttattatattccgctgtaatcaatgtaaggtttcttaactttgtatgtgtttagattcaattgtcttagaaattcatatttaggatgttnnnnnnnnnnnnnnnnnnnnnnnnnnnnncctagtaaaatatattccaacattcttgccactagaggtttgggca

SEQ ID NO: 134920 - DNA, 620 bp, Cannabis sativa
  modified_base (329)..(333): a, c, t, g, unknown or other
attaaaataaaaaactaaaatattaaataaaactaacactacgtgacttggcacgtaataatcacctagtatatatatatatatataaaggaaaagtatgaggcgtttacgtggtggtctaaaatttctctaaagctatttttcttttttctccttaattctcttaattttttaatattttataagagtataattttacaaattaatattttactattattttaataaactttctataaaaatatctatcctaaattaattattttttaaaaaatacataataataataataaatataaactaaattaataatattaaattaaataatnnnnnaattatttatatatatgtattcataattataaaaaaaaaaattactttgcagaatataggaaaagtattttttttttatagaaaaaatttattatgaatcaaacattatgagttgaacaaaaaaaaaaatagatgtgagattatgtagaagaagaaatcgttctgttagttgttaataaagtgtcacatgtaaatatagtattgaccaaactaataattcttttagaaaaattaattttaaaaaaaattaattaaaataaatccatattattcaaaaaaaaattata

SEQ ID NO: 134921 - DNA, 543 bp, Cannabis sativa
tgcacccaatgtaaagttttcttaaactctaatatgtttatttcattgttttaaaattcatattaggatgttaatcaaacatacttgatagtacatctagatccttgtttttttttaaaaaaatatatccaacacccatgacaaaggaaaatcgcagagtttctaaacttatggtttcctacaaatcttctacagcaaagtcaaatgtgcattcaaaaagtaaacatgcaaggtaaaaggaagtcgagaacttactcaagaatcagatgtctggattcaggtaaagtcgaaccaaatgagcagtttcgatgaaggcacttcagtaagcttgaagccaaaaacctctcttttcgctctgaacttacttagcaaaaaaggattgtgaaaatgggtttgtgtacaaatgcccgttggtatttataggcaagtaacgaaaaggggtaatcatttcaaaagaacctcagacatcttggttcccccataaaagcaaatatgagaaataaaaaataatcgagtgcgaccgtcaaccgtggtgagagaaaa

SEQ ID NO: 134922 - DNA, 916 bp, Cannabis sativa
atatgattattacctacaaattttaacgagagttacatgcttgtgcacgtctttcgcacttaatgtatatatatatatactatatattaagaatggaaaacgccttgtttttgtcgtttttcacttttttttgtttttatcttttatatttattttattattattttttacaaattatttgttgtacttattattagcatcttaaggttatcaataatataattatgtggtactcaataattgactagtaattttttttttttaattttttatgaaagatctttgtactacatattttttttttataattaattttttgtaagattattgttatgtagtacattaaggtactcatctatactataccgatgtgatacactatttcaccaccagttttctaaatcttttattaaattaaaatttgaaagaactgatattgaaatgcaccaataacgatatgctaccttttgtggtacttgataccttactgtgccccttaacatttttgtcattaatatgtacatatctttattagcttcgattgtgtttttttattattattttttatgaatgatttttgtactctaatttttggtactattattgatatgtggcaccttaaggtgctcaatacgatactgatgtggtatctaataatttgttagcacttttctaaattatttatcaaattaaaatttgtgggaatttatattgaaatgcaccaataacgatatgccaccttttatggtgattgacatcttaatgtgtctcttaacatttttctcattaatatgtacgcatctttattacttttttattagaattttaatttttttaattatatataagtttgcaagaacatctctaatgagatatgtaaaaaaaatgtaacatatttggcaaaaaaaaatacttt

SEQ ID NO: 134923 - DNA, 3280 bp, Cannabis sativa
tggtaaaatatatccaacaactatacaaggatacactgaggaaaatgggattgcaacgtgaaaagttaaaaccttgcatggtgattttttgcggatttactggcgatagtgtcgccaatcaaggcattattgaactccattaaccgtaggagagccacctttatccacaacattaatgcaagattttctagttgttgacctactgtcggcctacaacatactgttgggtcgccctgcactgattggactaggggcagttggttcaattaaacacctatctttaaaattttagacaccgacatgtgtaggtgttgtgcgaggtgaccaactactggctcgtgaatactatcatatagaactaaaaaatagaaaagtcagtcattagttaatggtagtcataacggaggaaggcaagaaacaggacgaggatttacatcctcgaattcaagacaaaaagaaccagttgaaaccaatcgagaaattggaagaagttgttttagatccagaaaaccccactaagtgtgtgtttattgggaaaaatctggatgaaaaactaaaaaagcagctaataaattttctgaaggcaaaccaggatcaatttgcctgggagccattcagatatgatagggattgaccctaaagttatttgccaccacttaaatatcgaccctaattacccaactaagagacaaaaaaggcaacccttggattctgaaagacaaggggcactcaaagaagaagtggacaagttactgactaatgactttatacgtgaggcgttctacccctcgtggatatctaatcctgttcttgtcctaaaaccaaatggtacttggagaacttgtatcgactttttagatttaaacaaagcgtgtccaaaggattgttttccattaccaaggatcgaccagttggtggatgcaactgatggacacgagctaatgacattcatggatgcatattctgaatataaccagatcaagatgcatgtccttgatcaagagcgtacaagtttcataaccaacatgggagtttattattataaagtcatgcctttaagtttgaagaatattggggcaacgtatcagcgactagtaaatgaaatatttgaaaagcaaatagggaggaacatggaagtctatgtcgatgatatgttggtaaagtaggtaaaaagtgaaagtcatacaaaagacctcgcggagtgctttgaaatacttaaaaagtacaacatgaaattcaacccaaagaagtgttcctttggagtctccttgggaaagtttctgggattcatagttaacgcgaggggcattgaagcgaatattgaaaaaattaaggctttgatagaaatgccatcacccacaaagccgaaggaagtccaggccttaacaggaagaattgcagctctaaatagatttatctcgaaatcaacaacaagttcttaccattcttcaatgtgttgcaaggcaacaaaaagtttgaatggacagacgagtgcgaggaagccttccaaatataaggaaacatctatcaacgcctccagttttggctaaaccggtaactggagagactttattcctctacttggctgtctcggagaatgtgatcagtgcaacgttagtgtgagaagagggaaggaaccaacaaccagtttactatgtaagtgaaaggttactaggggcagagtcgagatatccccctcttgaaaaactttccctacgcctaatccatgcatctcgcaaactaaggccctacttccaagcacatcccataaatgtgttaaccggtcaaccactaagacaagttttgtcaaaaccagacgcttctggaaggttaataaaatggtctattgagctaggacacttcgacataacctatcatccaagaacatcaatcaagggctaggctttggcagatttccaaatagaagggatagttcaagatgaaaatccacttgtccaacaagacgcagaaacttggaagttatacgtggatgaagcatctaatgaaaatggctcgggtgcaggggtgatactgatcttgccagataactttaagtttcactacgccctaagatttcaatttgacacctcaaacaacgaggtcgagtatgaagctttgatagctggtttgaaaatagctgaagttttaaaagttaagaatcttatgtactacagtgactcacaattaattgtgaatcaagttctaggcgaataccaggcgaagggtttaaaaatggtgaaatatttggagaaggttcggaagaacttagaatagtttcattactttaaaattgagcaaatcccaagagaacataactcaaatgccgacgccttggcgaaactagcctcgcaaaatgaacttgataacttaaatttggtaccggtggaagtgttaagcgaaccaagtatatgtgaaaaggaagaatttgagatgattaatgcctctcttacatggatgatgcccatagttaactatctactcaatggaaaacttccattagacaaaaacgagacacaaaaactcttatattcaatacctcgctacacaatagtagaacgtaaattgtataggaggggttattcaatgcctctcctacggtgtgtgctccccacagaagcaagcgagataatcaaagagattcacgatggcttttgtggagaccatgcatgttgtcaaagcttgtcaaagaagataatctgacaaggatactattggccaacaataaataaagagacacatgaatttgtcaaaaggtgcaataaatattagagattttcacatatacctcgcgtaccatctacagaactaagaatgatgacctcgccgtacccatttgcaatatggggaatctatttgattgaggcattacccacagggtgaggaggagcaaagtacgcagtagtggcaattgacttcttcacaaactggacagaggctgaacctctagtttccataacttgctagaaagttcttgattttgtcgtcaagaacataatttgtagatttgaaatacccattaaaatagtatctgacaatagcacccaatttgatggtgaattgttcattgagttctgcgtaaggaataaaattattaagagcttctcgtcagttttaaggccccaagaaaatagcaagtagaaattgttaataaaaccttgaaggatactattaggaagaagttagatgccgctaaagggagatgggtagatgaactaccacaagtactttgggctcacagaacgatagagaaaacggtaatagggcatactccattctcgct

SEQ ID NO: 134924 - DNA, 777 bp, Cannabis sativa
ttatttttattggttttatttttagggaatcttacaaaaatatctatttgtttttattattttaacatttttaagtgttaaagtttcaaattacaaatattatattttagtaaaaaaaaacaactctaaaagaacttaataaacaataaaaaaataacaaagataaccacaaagtaacaaaatataacaaaacaaagacctaattgtaatatgtaaaataatatcaactctttaatatatttttgtattacgattttttaacttaattttaacaacttgatttatcttcttatacttttacattattttttttcatgaaatttgatattacaaattcatacttgatggaatgttaaatgagattgagtaagatagctgttatttgtatatgaattatttaaattatcatatatggaggttgtataggatggatattatgtagtgtagtatgatgatgttgataagttaagttgataagttggatgattggtgggacaaggaagagttatgtgtttaatttttacgtatgtagtaagagaggagacaaaatagtaagtagtaaaagacttgatttggctactcagcttggttacaatttggaagctttgatggggtatttctagttatctacccctatatttaatttcatctagattattctagttttatatatgacttacaacttttctaattgatttacattcttcttgattggttacttctagttttctaaatattctaggtttttctagtttatttattttgctaggtttctaa

SEQ ID NO: 134925 - DNA, 799 bp, Cannabis sativa
  modified_base (379)..(381): a, c, t, g, unknown or other
atcatgaagactgtcatctcatggctgttttaactttttcttgcccttacctgtaccacagagcacctgtgagtgaatagactcaacaagaaaagtaataaagaaggatacattaaacagctaatgatacatttcattatcatataatgtttaaacctaacattcaacagtatgtaatataaccagttatatgcatagaaatagatatgcttatatatttgaattgtctaatcacacaagtcgatgtcataatgcaacatcatatataatattattggaccacctaatcaggtgagcccgtgccacaacttggcactaatatattacatcatttaatcagacgagcctgtacctatgcccgatacttatcatatgtcannnacgcccgtacctatgcccgatacgttgtcaggaagaaacccaacaatgatttctatcagtgtcataaccatacattttcatatcactaacgtccatacctacgctcgatacgtcgccagaaatatcgcatcacctactcaggtgaactcgtacctacgttcgatactcatcatatgtcactaacgcccgtacctatgcccagtatgttgccaggtaaatgcatcacttaatcaagtgagcccgtatattatgtccatattatcatcacattatcattgcctaatcagataatcaataatttctgaacctgtcatgccatgttgtacattatacttttcttacctcaagtcctagttcaggtatgttggccgacctgcttggagaacgattgataatccctggccctatgtcataacaa

SEQ ID NO: 134926 - DNA, 1101 bp, Cannabis sativa
agttacgtacagagaaatggggtactatatacagaaactgaatagtttaacaacaacaaaaaaatatatatatataaaaataattaaaaaaattataaaaaatagagtacagaattttaattatttttatgattttatttattaaaaataccatcgtatatattacactcttgttattttgttatctatatgtcgtttgaataatattttactattacttttatgtagtttttttattattttcgtgtgtttataaaatatattaaataaaaatataaaaaacaaaaaaaaaattgattgaactaacttaaatttttacaaaaaaaaaaaaaaagtattatatgtaattctttattattattattattattattattaattattattattattattcaaatgtcaagtgtaatttttatcattccatggctaaaaagattggacttactccaataatttagtacacttcaatgttcaatctattatataaacaaggactaaattttgtccacagataaatacagtttgtatttacatttttttttttttttggaacaaaaagcttgcatatttattgaataaggagtgcatgtgtatgtatagttagtttattagagtaaataaaccctcgatcaagtaataatgtaggttcctttttcattaagaaatgaaaagtaaattaactaaagccaaaaaatatcaacataaaatgaaataaaaataacacttgtgagatgaaaaaatttacttacaaaaatatcaatgatatgaaagaaaaaaaaaacgatttgagaattgttattcttaaaatgtgaacaccatacgattctaatataaatgataaatagtttttttatattacttattatgaactaataaaatatatataaattttgacaataaattatcccaatattaatattgacattttatggttccttagcaattaacatatatatgattgtgatttgtgaacttgaaaagaactttgttgttggttgtttatttggtgtaagttgaaaaatatcttttttattaatcaattaattaaatttacctttaattttatatttatttgaaatatacctctttttatatgta

SEQ ID NO: 134927 - DNA, 638 bp, Cannabis sativa
ttcttcccgggccttttcctgtctactggtttgtgagccacgaggttttcctcgtggtcttctcactccaggttcaggttgattttgagcatttgtcccctgtgccgccctggccaaggctgcctctcgctctaactcggcgttttgacgctgtgcctcttctagacggcgtctcaggtggtggctctcagtttcataagtcctttctcccacagatttcgcacctccacggttgagctcttcatccctcgccttaggattttggccattccctcgctgagtcctcctcaagcgtgttgtccgcgtactaggaccaacgtcgagttgagttcttcggggacatgtggtccaagcactgggaccatcctcaggttgggccctcctggtggaacgggtgctccttctagacgacggcggattagttgatcttctagagcccataggctcttttccaaaacgacagttagtttcctcatgtggggtgttgatattctcgggattttcagccataaaggagaaggtttttctttaaaagacgggaaggctttttctgagttttttttactgagactctcaatgaaagcaccaaactattaacacagatttttttaaccaaatttgagcctcacaattatgat

SEQ ID NO: 134928 - DNA, 641 bp, Cannabis sativa
cagtagaacaactaaaaaacactactaaaaacttaacacagtttactgcagtatgaaacttataaaaaaatacagtaaaaaggtaaaaaatgtcgcctgacagtattttttaaaaaaaatggcaaaagttaatatatcatgtaaatttcccaataagatgatggacttctttttctgatagtgtattgggcttatattgtaaggggaatttgcaaaaatattggaaaaattaacatagtttaaaaatagtagtaaaaagtaagatcacaaaagtataataattaattaaaaatagttcttataattatgggttggacacactctaactctatataattcaatttaatgttctaaatttgagacaatattcatatataaaatgtattttacattcacagaatatataaaaatatatatattttacattttaataaataaactatattattacaataactttagaaaatgaattaactaaaacacaccactaacacgtaactcatgctaaaaatatcatgctaaaaatgggatttaatgcgagggtggttgatcttattttgcattgtgtctcaacggtttcgtacactattactcatgggggtcgtgagatggggccaattgttcctggaaggggtattaga

SEQ ID NO: 134929 - DNA, 501 bp, Cannabis sativa
gaatttgccaaaattctagaggacgcggagaaaccaatctatcctggctcaaaattttcaaaactttctacattagtaaagttatataatataaaggcacgttatggatggagtgatattggattttctgaattgattgtctttttcaaagaggtgatgccagaagaaaatgaaattccaatatctttgtatgatgcaaagaaaaccttatcattattgggaatggagtacgaaaaaatacatgcttgtccaaatgattgtattttatatcgtaaagaatttgttgaagcaaataagtgttcggtgtgtacacgttcaagatggaaaatgaaaaagaattcagaagaggagcgaaaaggtattccaacaaaagtgttatggtatattccacctattccattatttaaacgtttgttccgaaattataatcatgcaaaaaatttgatttggcatgaggaggaaaggataaaagatggcaaactacgacatgtggctgattca

SEQ ID NO: 134930 - DNA, 754 bp, Cannabis sativa
ggagtgctcgggaatccctcagagattccgtttttggatctcggagtgtatttcaaccacaactcttaatgtttgtctgaatgggggtcaggtcgggcaagtccaaccctcctgtggactccgccaaggagaccccctttccccttacttgttcatctgggctgctgaagttctctcaagactgatttcaaacaccctcgaccagggggctatcaaaggaataaaactcagtaggggcggtccggttttatcccatatcttcttcgcggatgatttaatactggtgggcagagctaacctatctgaggcagagggttactggggctgcttggaaaaattttgttcttggtctggccaacaggttaacaagctcaagacgacaattttctttagtaataacactccaatggacatacgacgtcatatcaagcaagctctggggattgatcatccagaaggttgcgtcaagtatttgggtctacctcttttcaggtctaggcaaaaggatgctgacttcaattttatccttgacaaccttacggccaagcttcagggctggaaggcgaaaactttgtcaaaggcagggtgagttactcttataaaatctgtgggattgtctttgcctatgtatgccattcaaaccacaaagctctcttctcgcatggttaaccggatcgatgggttggtccgtgacttttggtggggttttgagaaaggtaatcatggtcttcacctaaaggcctgggataagctc

SEQ ID NO: 134931 - DNA, 632 bp, Cannabis sativa
acaatacatctaaatggatattttgtttagaattactccgtatattattttttaatttttttttttaaatttatgatttagatttcttaagtggttttcacggtggtttttatataaattactatgcggattttagttacaatttagattgttcttttagttgcaatagagatttctatgtgaaatttcgtaaaaaaaaaactgttttaaagtataaaaataaaaaagtccctatttttttatactaggttattattttttaaaaaaaaaaataaaatatgcttagataaaaattagacttcacgatcattacataggatattattcggaatagaagaaatacacaaacaaccatactgattgtggataaaaaaagctcacttagccacattaattacaaaatttgctaacaaaataaaaattacaacaagcaaaacactgagagagtctattacaaaaattagcatagttctcaatctcccaacagagctttagatcattgagcgaattgataaccaccctagaatcgctctctataatgataaacttccaactttcatccttagcaacttccagcgccaagcagcaggctgccgcttcaccacaaagagcatcagagaactctaatctag

SEQ ID NO: 134932 - DNA, 1071 bp, Cannabis sativa
ttgattatttaagattcaaaattgcttctccaattttgttatcttttcataatttttgaatctaccatgattcattttgatttgagtataaaattgctcttcctttatgactcattttacaagtttagatcaactttgatctatttactctttggcaagataagcccaaaaaagagtaactctcatagtttattttctcatctcataaaatgagataaaattactaatggaaaattaattctaaaactctttatattattatatatactaataatatatataactctcatgcataaaattctctcccaagttttatgctaagtaatatattatgtatgttactatcatctcatacataacatttactcatcataatagatatcatctccacataatatatattatctatgtattatatacataaatattctcatcataaatatgtattatcttatgctcaacatatataatatataattcatatacatattatatattatgtatatctcacatatatatacatattaacatgtaatatattcaaatatcatattatatatcactatgataatatgacatatacacccatacatatataactcatatatgtatatacatatatctcaatccatatctcaatatagaaaaataagttaatataaattttactatatataaaaaatagtaaatcacaaaatatcacaattcttacccttgtattaccacatgttgatttctcacctttcactgaagaaaggtaggaaaggataagcttttgactgttggaaaattattgtgctccaatagaaatatcaaatcaacaagattacaactcaatgacaaataatacaaaggacaaaatatgtataaataatgttacaacacttaaacaaaatatacacataaaatagagaataaagatggattacaactcaaagcaataaggtacacatgaaacataatatataaattttttatatataaaagagatgtgagagcaatctcaacaccacatacaccataagtgtataataggagaattaccaaacttgaacaaagtcttacaccttt

SEQ ID NO: 134933 - DNA, 840 bp, Cannabis sativa
aatttaataaattaaataaataaaaaataataattatttgaataaaaaattaatttttttaaataggtgactgagttgattgggtcaacccgaccaactaaaacccgccaacctgccaacccatgccttatccgggtttgggttcggtttcatttttttgaacccgaaacccacgaacccaaaattcggtaaacccgaccaatgttcagctctagtaaaaacatttattagaaataataacccataaataacgatgagatcataatcatttctatatagaaaagcaaatagagtttaagaataaaagaatggtgaaatattaccttctaataaaattgcacataaaaaagaaaattattaaaaaaattaaataattaacaaaatgatatttaacctaattatcctgtatcaatactggactgttaatggttcacgttctcttttaaacttatttttagatcgacaaagagaaaggtattataataggaaaatgatattaatttcactatataatgtaacatttattatagtatttatggtaggtattatagtattaatataaaaatacattaaaggaaagttgtaatgtgattatcaataatataggaaaggaaattatattattttataatttaatagatttgttcatataaagttgaaaaatacctatttttttatacattaacaaaatttatctttaaaaaaatttaattcaaatatacatctttttttaagtattgtacccaaattaacctcacacactcacataactaagacataatttcaaacataataaatttgtgttgtttgtagattgatgtataggtttgtgggaaaatt

SEQ ID NO: 134934 - DNA, 550 bp, Cannabis sativa
atttagggcataaaacccagcaccgacaacaaaacatgcagagtacaaaatcctaaagctttaagcaacgactagaaatgataaaatctctgtgaaaactaggatgaactgacatgcgagcattcgaagtgctcatccgaatactcacgtgtattcaaaagataaagttgcgactggtcaaacattcttcctaaagtccacggttatacaaattttaggtcattttttctaagattaccgggttccatactaaaaagcatagtcctatatgtatttcctacaaacatacattcctaaaaaccctcaaaatacccaaaacccagaaaaaagcattttttctccaaaacagaaaacgaaaatgcaataaaactcgaaactaacctttagctttggtaagttgtccatgtgattgctctcgataactccttaggctgaggaaattctagagagaaaggtagaaatctaggcaaggtgtgaaaatctctttgaagtcactgagaaggagggaagagggaagttaagaaagtgagggaaaatgaggaattttgat

SEQ ID NO: 134935 - DNA, 949 bp, Cannabis sativa
atttcatttaatcctctttacttggcttaaatactaaagtttttcctctgtgcaggccattctgaagttggcctacacctactctcgggctaagtctccttcttctaagaacacggctttctccaacaccatgagggcagaggttgacttggctaggaagaatgctgaagacggcagggcaaaactcagagctgttcagatggagttcggtgaagccaacaagaagctttttaccgcccagaagaaaatagctgagctgactaaggatcttgacgcttctgaccgacttgaggagaccatcgagactttatctgctgaaatgaacagtcttcaagatgaaaggacatctcttccagcagtccttcgtgggctggacgaggagaagaagtataaggaggaggagcttacggccgaggtgacgaagctgaaacagaaagttcatgccttggagagagccagtcttgagctcttctacgactgttggaaggctaatccactagaaaacttcgactacttgggggaagccaaggacatgtaccttgagttctgtgcttcccaagtggcttatggtgaaactgaggtggctgcttctacctctggccagaatgctgatgtagctccgttcaaacaacagatcctccagctcctgcttgcccagaggacccgaaccaagagcatgggactccagctgtttaaatacttcttcttttatccttttgtttttatcttatcttattcggccataaggccttttctaagacatcatgaccggccaagcggtctttaaacttagaattatttttcattttacagaaaactggctgaccgggcagcttttaatcccggtattacgtgctcctattctctttaacgaatttcatactctgtttataatcatcgtgcaattgtgattgttttatctttaccaaatgctttgtacaggtatagg

SEQ ID NO: 134936 - DNA, 708 bp, Cannabis sativa
  modified_base (45)..(78): a, c, t, g, unknown or other
gaccttttagtcacaacattggaatcatgatttataattagtcannnnnnnnnnnnnnnnnnnnnnnnnnnnnnnnnngactaaaagtaaatttttttgtagtgtaactaacaagtggtatttatgcattagagatatttagacaataaaaagacattctattgcatgtagatatccgaaaataagaatgtaaaatgtatgtatttcactattctctcaagattaaaagtctcttgtagttatcttaaattataaattaacagtaattaaacatttacactcaatacttttaagattttcttttaaaaaatactcgacgtggaggaagatgagaatattcccatcattttgggaagaccattcttagccacggggagagctttaattgatgtgcaaaagggggagttaaagttgcgcattcaaaatgaagaagagactttcaatatctttgccgcaactgaaattcctacctgttatcgggtggaagttataaaagattgtcgagaagtaacgaccaacaagaagaaagggaagtccaaagaatgatttcgaatttttcgacgacgtacgaaaagactgatgtgtgggaattgtgaaggtgactctcagtctagggatagctttgaaatttgcagcgttggaggacagttctcttcatttggtacaagggcccttataaatgtaacgttctcgcttcaagcctccatt

SEQ ID NO: 134937 - DNA, 1154 bp, Cannabis sativa
ttgttgtttttatgtttttgtgaaataattccatttttttaaccgtaagttttctattttaccattaattatttttatgtataaaaatatatctataattttataaatatttttctaatttttttctaatattgttaaggtctttactatctcaaccactatgggccgaaaccagaaatacaggaccaatacatattttttagtaggtcagttttttcatctctttttttttttttccttacaacttataatattttgttaatgaaatagttatatatgtgattatttttagtgtgaatgtttaaaatatatatggtttggttaagtgtatatatatatgtacgactaaaaaatcttaaaaagctagtatttttctatattatatttatagtatatatgtgtatgcattcatttatatgattatatagatgtaatatatagtagtaatctcaatgctttatgtatttattatttgattataattttgtatttttttttttcagatttgggagaaattattttttttggaatattttgcagcttattggatcagtagtattcacaaatttatatttgtgaaaggtatgtttttaacaatataagattttcttttctcagtctaataaatctgatttaggtatataataataatttcaatgctttatgtatttattatttgattataattttgtattttttcaaatttgggagaatttttttttttttggaatattttgcagcttattggatcagtagtattcacaaatttatatttgtaaaatgtatgtttttaacaatataagattttcttttctcagtctaataaatctgatttaggtatataatttttgaaatttgaaaaataattatttataaatgtaatttattagtaatgaaattattaaaaatttaaaatgtgatgtgtttgtacattgtatttgttcaaataaaatgtaacttgatatgatgtatgtcataatactaatgttatatgctatgatatatttgatatatttaaaattatttatgactattctattaggtttaaatagccatttattatatactcttatttcatttaagtatttaataataatggtgtgtttattggcttgttaacaggagtaacattttttgtaacgccccgatatttt

SEQ ID NO: 134938 - DNA, 1134 bp, Cannabis sativa
  modified_base (1095)..(1102): a, c, t, g, unknown or other
cggtggcatttgggctcacaacggatcacaagtggctttgataccatgttagaatttgggataaggtgaatgaagttccatcttaaaactaattagcaatgggaagactagccaattcatcttatacatgacaatttatatccacacataagtaatgtgggattaactttaatacacccttacgttttggcctgaaaagtgtgggtataacaaacgacatttaagaggccacaaggccgaaaatgacatttgaaataatcccacaaggccaaatatcgagaaatttgtgggtgtacatgttagaaaatttgtggattttgaaacaggtcaaagacctcaacactgaaactggcaacattggccgaaaggtcccaaatggaggttaaaggggagacatcggaagtatctttttggatggcactttgggctcacaatgaatcacaagtggctctgataccatgttagaatttgggataagatgaatgaggtttcatctcaaaatcaatcggtaatggacggagtagcccattgatcttatatatgacaatttatttctacatattagcaatgtgagaccaactctaatagtatttgttgttattgttattaccacaattgaatttgagtttatatgtatttcatagagaggaaatatttagtagatcatcatatatttttaaaacatttggatatgtggttcccagttttgagaataaagcttgaaactataattttagaaactgtttccagtatatagatcaaatagtcgtttaaaataatgaatacaaaacaaagattatatagattaaatgtgtccaccatagtaatattttaatgggttttgccacaagaaatttataattttttttagtaatcaatatagataatagggaaattatagatgagtttatgtgagtacatggattaaaatattttaacatgtggaataacacatcacatgatattgtattgtctattagtaatattttacaaaattttaatcaaaaattccaacaattattctaataaattaattttaattccttttttctttttgaataaaaatcataagatttattaattaataaattcgtnnnnnnnnatagaacgcacttcagaggaacagtcctccaa

SEQ ID NO: 134939 - DNA, 1131 bp, Cannabis sativa
tttttttttttaatttaaaagatttttggtcatcgtttgctttgcaattatggtttcattttttatattatatcttatgttattttggacttacttaatttggttagtatatttttgtcctaaaatgacattttttaatatttatataactaaatgtaatattgaaaacttattctataaaatagtaaaataaataaaaaaaaaatacaaattcaattttggatggaaatgtattacattttatcactataaaagaaattaaaaaacaaaatatttcacacaaattttacaacaaagacttaaaagggttgtttacagtacaagtaaaattaaaaaaaaaaaaaaaaaactataagccaactaacatattagaagaggtgcaccattccaactagtgagacattcaagcattggatcaataatttttccttggcacattgcagtgaataccttgtcaaagtcttctcctggtgatttaacattctctccagtaagcaaaccagtccccaactcttctcttacaaacttgtacaatggataagatctgcactccttgatcttgtttgatatgtctacgttcccactttcgatagcattccttgcattttcaacctctttaggcaaaagggttttcaattcttcctcaaaagctccaatcttttggaagattgaattgtttggattcttctcactttcaccgttaaccaaagcttgttctactagtacttgccttagtttttgcattaaaggataggtagcactgcaaggatcatcaatgtatgtgaagacgtattccctatcgacaactttaagcaactccttgcaaaattttgatgggtggagcttgccacttgcgccagtcgttaaaactctcttagccacttgactcacaacttttttaactgtgtgccttagattctcttccaaatgtctcaagtcgatggcttggcaaagagctaccaagaatgttgtagacatgagtttgagaatatcaacagtctcagcagttttcctcgaagatatcaaccctagagagttcacatcttggttgtgttgttctgcactttggacatggctagtcaccggattagcaagatattggagctcagaacaatatgaggccatggcaat

SEQ ID NO: 134940 - DNA, 802 bp, Cannabis sativa
atgaactgttgtaactctgtttttttgcttaggccgactagtggaaaaacttgtaatatttttgtaaagtacttttgggatcccagaacatgtactctttgtttctaaagttaaatattattacaagtttattttcattctattttttaaaaaaattaatttcccgcgctttttaactagtaatctcgtctaggggattaggatttcttaatcatctacggtagcgtgcctattggttagggcgttacaatttggtatcagtgcgccaaggtttttaaacttcctgttgactggctgaacatgtacaatcatcgtcagagacaagctcgactcatggtccaataagtgttgagagtaaatgctttactgcttatgtgatcatttatttacctctttccatttaggcagtatccgagcatctagagtttttatgtgatatatgatgccatgcttgaatgctatatgttaagtgtttgtttatatggagtaaatagttgattagggttttaaggcaataagtgcataagtgtggtattggtgcttaagtcgttgggttattgattataggggtactggtaaaaatggacccttcgcaatcatctagaccacagggcgagcaagtagagcctggggttgaccaaatattatttattatatgcgaattaatatgagatatgacatgttaagatcccgttggtgagctaggggcattttagtatttttttctgagaggcgtaacattgtgaatttaatttatttacgtgctcatggactatattattatatagtatgcttgtgttgt

SEQ ID NO: 134941 - DNA, 1659 bp, Cannabis sativa
  modified_base (1395)..(1399): a, c, t, g, unknown or other
  modified_base (1589)..(1614): a, c, t, g, unknown or other
ttaaaaggatttcgtcatcgaaatctaacttgaataaatctggatactgagcccttatgtcagactctaactcccaggtgacttcctccaccttgctgtttctccaaagcactttgaccaaagctgtggtcttattccaaagaaccttatcttttctgtctaagatttgaattggttgttcttcgtatgataggtctgattatagctcaagattctcataacttattacatgagcagaatctgaaacgtacttttcataacatggaatcatgaaacacattgtgaattgcagatagagctggaggcaaagctaaacgatatgccactagtccaaccttctcttgaatctcaaaaggtcctttaaacgtagggacataatttgcctcttttcccgaaacatttgatcctcttcattggagacactcgtaggaatacatgatatcctacctgaaattccacacttttgtgttttggatctgcataactcttttgcctactctgagaagcaagcattctggccttaatcttttctatagcttcattagttcgttgcactgcttctggacccagatatttcttttctcctgtctcatcccagtgaatgggagacctacacttcctgccatataacaactcatagggaaccatccctattatactctggtagctgttattgtacgagaactctatcagtggcaggtacttgctccaggatccttcgaaacccataacacaggctcgtaacatgtcttccagtatctaaattgtccttctggactgtccatcagtctgaggatggaaagttgtactgaatttcagtttggtacccctagctcactgaagactctgccaaatttagaagtaaacttcggatctctatccgatataatggactttggaacaccaagtaatctcactatctcgttcacgtacaattctgcatattgatccactataaaggttatttttaccggtagaaaatgtgcagacttcgtgaatcgatctaccataacccaaatcgaatcgtgcaaccccatggttctaggtaatccaaccacaaaatccatggtgatatcctcccacttccactcaggaagtgtcaatgactgcaataaacctaccggtttctgatgttcagccttgatatgttgacaagttaggcacgggatacaaattctaccatattcttcttcatcccgctccaccagaggtagggtttaagatcttggtacatcttggtagtgccaatatgcaatgaacatggagtggtatgggcctcctcaagaatctcatttctaagttccgcactacttggaacacaaaccttggtcttaaataatagcatcccactatctgacaccgtaaaatctttggcttgactagctgaaacctctnnnnngatcttcactaattctggatcagctaattgagcagctttaacttgtgctgacaaatcagattgtagtgtcaagttacgaagtctgccaacaacaaactcaatgcccgatctgaccatgtcttctgctaactgaagtgaaatcttaatcatactagttacctgcttgggacccttctgttgggttttatgnnnnnnnnnnnnnnnnnnnnnnnnnnatcagatttacttattaatataggtcagaaataacatttaatgtt

SEQ ID NO: 134942 - DNA, 925 bp, Cannabis sativa
atgttacttcgaatagcttggacaattgagagacaattggactcgagtttagcattatgtcattcttgatccttgatccaacttaacgtctctttaatggctaaagcttcagccatgtctggtgccatggtaccactgccaaagaaccaaaagaagaaaaaaaaatagagcactcaaaacgaatacgatctttgcatgtcagaagacaagacaccataacttacaatttatactttaggtcatttaatcactttttggtgggtttttaattggggaagaaaggttcagattttatgactgaatttttaaaactataatctaatatctctaatcccaactatgatctgaagatgagtagaaagattagaagcttgaacacattagaacctaaccctacccgtgatttgaaaaagaagaagagaagaagttaaaagcccattagaaccgtaaccgtagaagagaggtgcggttgtagcaagaagaagatttgaaaaacctaaaaacccttcaaatttctagatctaatctaatctatatgacataaaaacctaattatactaaatatgacattttttaaaaaaaaatatataaaaatatgagaaaaatcatattatataaagaggaatgccataaaaaaaactttaaaattgtgttttttttttccttttttcctttttagaaaatgaaacattgaaataaaaaaaaataataatctcaaaagctgttttaaaaaaaaaaaaacaaaacaaaaaaaaacaaaaattgaaacttgattttttttaactacagaagttgtttttttttttagaaaactgatgcagtactaaaatacttttattaagataataaattaataaaccaattaataattttatatatttaaaaatgagtttcttaacagttagaaatacaaaacctgcacttt

SEQ ID NO: 134943 - DNA, 1378 bp, Cannabis sativa
ctctctctctctctaagtttctctttcaattttgtagttcaaaagtaccaaaatttgtactttagaagtcctatttataatccttaaaaatatctcacttgaaaaaagataaaaaaaatcgtttttttctcagaaattacctcctcgccgcggccacgacttcctggcgaaaaatttctgtcacgtgattagtattttggtcataacttattcaatacaactcagaattggacgattcaagatgttccggaaagttgagaacgagatttacaactttaatgttgagctccaagtcttgttctgcttttaaggttatcaaaatttgaaattaagttctgccttgtaaaactgagctcgccggtatccactattttccaccaaaatgtgctaatctctctccaaatgactctaaatacatcattagtctttaaaataccctaacaaattataatcacactaatcaataatttaaaggatcaatttaagaatattaatataaaaattggtcatatttagaacacaaatattgacttatcaaattcccccacacttgactcttgctcgtcctcgagtaagttaatgataaaatgaatgatgcttaaacaaattggtctttacgaaaaataattttagtttcaaaaattgtacatccacttataattctaagaaaatctaaactctttaatcattagaatttcaactcaaaattattatttttcaaactcaatttttgtgtgtgtgtgtgttcaatcaactcatcatgcttgaaaaaaaggctttttgatcgcatctgaaactaacattcaaattaattcatgcatgctaacagtcaatgtttatctcaaaataaatgtatacttcaatgaaaatctaccccataagcttaattatcgaactattttccactaatataattacacataatctaaaataccataagactttggcctcgtttgggggagcttttttaaaaactaaaatcacttttggaaaaagttatgagttaatatgtgtttggtaaaatttaaaaaatagctttttttaaaaatttaagtaaaatttatagcttttaagaaaagttggcccaccctagctttgagattttagcttttaagagaagctacaattttagtttaatgattttttcacttgacccaattgccctcatctaatttataaatcccccatttaccaattaattttagggcttcttacattctttcaatctcatccttattcaaaaaaaaaaaaaaacccttctcagatcaaaaacttcatcttattattattataattattattagtagtagtagtaaaaatctaatttattattttattgtataaatatttaaaagaattaaatattataagaaaaaaa

SEQ ID NO: 134944 - DNA, 1334 bp, Cannabis sativa
ctggtcctggtcctaaacctagtcgggttccagttctagttgtgattccaagtttgagtttgggttagggttcgagtcttggtccgagtttgggtttgggttcagatctcgatctaggtctagatatggctttaagtgtggttagggtcctgggtctgggtcaaggttcgggtctgagtcccaggtttcgatctcgatctgagtctgggtttagttttcgggtgtaagtcctggattctgatcccagtctgagttcgaggttgggtccaggtgcaggtctaggtttgggtttgattttgggtctggttgtgagtttgagtcctgggcttgagtccaatttcgggttcgggtctgggttcgtgttttgtcctattatgggttcgtgtccgagttcttatcctggtttgggtccatggtcgtgttcgggtcccgagtcttggttttagtccagtttctagtctgggttcgggtccaggtctcggtcccattctttgtctgggttcaagttttggtccttatcagggtctggatccttgtctcggtcgttggtctcaggtctcggcgagggtttaggattaggtcaggtctaggtcccggtctaggttcaggtcccaagtctcatgtcccaatcctagtcaagatctcagtccaagtcctggtcttagtgggttatggtttgggttcggttctcgtctcaagtcttggtccttgtcacagttccaattccaattcggggttcgggttctgttctcggtccaggttggggtcggggtccgagtcttagtccgagtcttggtacgggtgttttggaacctggtcttggtccaggtctgagtctgggtctaggtcccatgtttcgattctggtttgggtctgggtcggtattcgggtctgggtctgggttcgtgtccatgtccaggtccgaatcatagtttaggttaggggcttggtctgagtttaggatcaagttccaagttcgggttggggttcaagttcgaatctcagtcctagtctgtgtccaggaccgggttcgcgactaggttcgagcccgagttccggggctcggttttggtcgagttccagtactcggtccaggtccagctccttgtcacggtcccagtcctgttctagggtccttgtcacgttctgcttcaagtgtcggttttgagtcccaggtctcggtctgggtctaggccctcgtccagcttcgggtccctgtccgaccaaatcaagacatctgctatgggtcttgtccaagccccggttctttgattttgggacaagatctggatcccaaccacgggtccgagtctggtttcgattcatgtcctagg

SEQ ID NO: 134945 - DNA, 668 bp, Cannabis sativa
  modified_base (614)..(616): a, c, t, g, unknown or other
aatgtaaatattttacaaaaaattgtgtcttatgtaattattccttaatagtatctctcaaaatataacttttatagtaacgtggttcttccatcatattttattcaattttatcgtaaaatgagtgacacaatagatgataattgataaatagatgcaaattaaatacctttcactatttttactttgataattaaaaacaaaaaatgtaaatataaattattatatataaaaaatattttattttattattcattaatataaaaaaaaataaagaattcgcatttatttatcaattactatttaccacttcatttattttacaataaaattgaataaaatgtaatagaaatacatgagtttttttaacgaatcttgtactataggggtacagcttaatagtttaaaaatttttaaaaacataaatattaattattcaaaaataaaaataaaaaacatttcattactacccaacctgctatggcactatcaaagtactaatcaatatgcaatgtccaaaaatgagcatggtaagaaaggaataagttgaaaaatatatttttttatatttataaattaaagaaatttttacatgaaaaattcattttacacannntattacaaaattactcacacacgcctatgactacatttttacttacaaagtt

SEQ ID NO: 134946 - DNA, 705 bp, Cannabis sativa
tctttatatatcatacgacataatttatgtacacatatattattatgtttttttttaaatttgtacgcccctgccagcggatatacataagagtaagttattatatttttgttgacatatacataagaatgcatatatatatatatatatatatatactttttttactgactataggtatatataaaacttttctttttttttttttgtttcactgactatgcacatgggctctatatccttttttttatcagtcataattatttatacatatatgtatatagttatattatagtatacatatatatatatactttatctagtatacgcccccgttttaaagatagtgagaaagaatatatatgtatgtatgaggtgttgctacaattgcaccttgagcccaaagtaatttgctatatatataaatcgtactctagagtcttgcgccaatagtatatatatatatgcataaacatatccgactcaatttcatctctttttttttttgtcttttgtcaagaattataaattgaagcccacaactcaattgcttttgaacctacgactcaggaggcttaatttaattgcaaagaaaacaaatctagagcaccagtgcagtataaacaaggtcaatttactttttctcttttgctttttttaattaaaatatacttttaccatcataaatttgacaataactttatgg

SEQ ID NO: 134947 - DNA, 502 bp, Cannabis sativa
ttgttcctcgtcaatacccagcaagaaaatccttgacatagccggattccatgaaatggatttcacttgcacagaatcacactgtatttgaggaaggagactaggaaaagggcttcttcgaatttgcaatttagggcttagggatttttgaactgaaatttaattttgtttttagttaataatgaattgccgaatcgggtcagccccgacccgaaaaaatctgaccggggcggggcggggcggggcgaaaatccgattagcgatccgattgtaccggggcggggctgccccatcggatcggggccccgattcgaaccgcgaaaaacccccaatttgccattcctagttgtgattgaaaagttgtaatatgcagattaagatagtatttaattttttttttcttgggatatttatagtgtgatgataattatctcatttatttgtgttgttagtgagtagagattattgcttagagtagttgtaccaattttataaagaaagt

SEQ ID NO: 134948 - DNA, 641 bp, Cannabis sativa
catctcaggcccatcatatttcttaccactcctcagggtgattgccttgcagttttctttaggattcacttcggttgtactaggaaagtttccctgaggccgagttgttatctgagttgccagttgccccatctgagtttgtaagtctttaatggaagatcttgtctctgtcatgaacttcaataataaatctatttgaagaccagaatttccactagagttttgttgctgagtctgttgttggttctgtgactggttctgatttctctgttgatagaacccactgttccttcagtttcctccttgattaaaccgatagttgttgttgttttgagagtaatggcttttgcttcatccattagcaaattattcacatcttcctgacattcagaataaggatgaggacctccacatagctcacagaccacttgagcttgcttcacttgaacagacatcagttttgttagggcctctacctgggctgtcaatttggtgatagcatccacctcaagcatcccaactaccttctttgtcgactcctctcagttggccattgctgattattcagggccatctcttccaacaaatcataggcctcatttgcacttttcctcataaatgctccaccagctgctgcatct

SEQ ID NO: 134949 - DNA, 1336 bp, Cannabis sativa
  modified_base (1249)..(1294): a, c, t, g, unknown or other
gcataggcaataatgtcagcttcagcatacttagacggatgcctgatctctctcctagttcgatctcgagccaattggtaatcgtctaaggtctcaagtccatcatcaggatctgcttcagattcttctgagtttcctactgttatttcttggtcaggaactgctctttccaactggatttgagtactgatttgatcattaccttgcttgcctgaaaaatcagaaaacacaccttcctcgtttcttttaaatggaaaatcattttcattaaaaatcacatctctactagttacaattttgttggtttcaagagaatagagtctatagccttttactccattaggatagcccagaaatatatatttaattgatcttttctcaagtttgtcttgcacattgtgcttaagctgcacaaccaaatatccttaagtgtgacagagatggtggcttaccagtccacaattcttcaggagttttcaactctattttcctatttggacttctgttaattaaataacaggcagcatgcaatgcttctccccaaaaatgtttctttaaccctgattctaataataaacatctaactttattaagcaatgttctattcattcgtttagctatgccattttgttgtggtgttttaattacagttttatgtctttggattccaaattttaaacacaactcagtgaactcatcattaacaaattctaaacattgtcagttctcaatactttgatcttagaattagtttggatttctacaagagttttccaatttttaaattcttcaagacaatcattcttatgtcttaataaaaacacccaaactttcctactaaaattatctacaacagataggaaatattgtttacctccttgagtttttaccctgctggctccccatagatcagcatgaatgtattctagaactgattttgctctgtaattgctatttgagaactcgatcctatgttgctttccctacacacatatttcacgaaacggtaagttagcttgagtatagttctgtagtagaccctgttttgataactcaactaaaccttgttcatcaatgtggcctaatctagcatgccaaagtttcgattctgagttgcacttgtcaacagcagcagcttgtgctggtgtgacagtttttccatcaaggtaataaagaccatgtcttttaattccttttagcactagcaatgaccctttagtaatcttgattatgtaacaccctaactagnnnnnnnnnnnnnnnnnnnnnnnnnnnnnnnnnnnnnnnnnnnnnntaatcaacgaggtttatggaaattgtgattaattaaaatttt

SEQ ID NO: 134950 - DNA, 1024 bp, Cannabis sativa
gcgggagattatccaaatctatccacagatcaggttggtagacagaacaattaaaggaaaaatctaatttagagattgaaaggactcttaaatttaaatataaagagaaatcatggttagattcaccctggagcaagatcaaacctgtaaattgctcataaatgtcgctccacgcttgccccaaatgtcttcattagcaaggtaaatctgacctcagtgccttgagtgtaggtcgttgagtgttaatcaccataaaggtggcgccaccacgacattgggtggaagatgtgtttggggaattgtaaagattagaagtggtcatgatgaccgctgctattcaaagaagaggaagaagatacttgtgaggagggcatgatcgctggagaagacgaagggtgtctcgaaggttcgtcctcccactagtagctattcaatcctggccttagagcatctctaatggagatgcaaatgagtgatgtaaatgcaaaatatagctcactttattaaaactctactccaatggtgtgttaaattatgatgtaaatatgtcacataacaaaaagtgattcaaatttaaatcagaacataatatgatgcaaaatttgtatcacaataaatgttatgtttttatatttatcattatactaattttaatattttattattaattttagttaacaaactcttttacattacttgcatcattattagtaaattttatatttatattcgcattattagtattattttatatattttttaataaattatcaagtgggcattaaatgacattaaattttacattaagatttacaattatgtattagaacacaatagtaaaagttgatataaaaatattacaaaactattttttgtgtcaaatatagctcaacttatacattttttattagagatggtgttagtgttgtatgcaatgatatatattttgaattatatatcttttagagtaatttgcggtataaaaatctaagtttaactaccagttgtaaataaatacctaact

SEQ ID NO: 134951 - DNA, 1043 bp, Cannabis sativa
ttttaaaactttgaacattaataactttttcggttgtccgtttgaggtgatttttttttgaacttgggtattatttttcgcgttctacgcaacctaaagtaccgcctggccaaccaatttatcaaaaaaatgctgttttgtatactaaattcatgttatgcacccctttcacctaattttttatgatttatttttctattttacttaaaataaactaatagaattattatgttaagtattagaatcaatgtttataatgtatttgttaattctactacaataaaaattgcaatactaatttccttttatatcttttctaatatttatataaaatgatagtagcaaatttatacaaatattgtattatggtatattggtaaagatttattaatttatccttttggtcacaagttcaaatcccaatagacccttttttgtattttttttttaaagtttactatatctatccttagcactaacaatatctatcctatgtattacatcactattattctaaaattactctaagtatttaaggattatctaaatatatatataaaaatattcttataagagtaggttaaagaaaacatactttataccaaaaatgatgtacttcacttccgataaaatactaacaaccaagtttaagagaaactaaaataaaatattatcctgattctaccgaaattttggcaacaacggctataattgaacatttccaaaaaattcaaacctattaataacaacaaaatacaattcaaaacaatataaaataattacaacaacatttagcaatcttaaaatttaccacccatttgactgcagtacatgtgttcaaagaacctacttcactacagatgaatatttaagatattcaaactctactaagcattcatacttaatttataataaaagttagtaaatgtatacctcgagctagctagaaaccgatcaacaccaaataagtcggatccctgcaaattgatctcacagccaacaacacaaaaaaaaaaaaaactataaaattacaaatttcttta

SEQ ID NO: 134952 - DNA, 693 bp, Cannabis sativa
  modified_base (50)..(52): a, c, t, g, unknown or other
  modified_base (368)..(371): a, c, t, g, unknown or other
tcccactaagaggtgcgagtaccacaacgacattgggcacagcaccaatnnntgcaaaaatctcaaagacgagattgaaaacttaatccgactgggacacctgtacgagtggatcaaaaaccgtttaccccatcttaacccaggtcaggcggctggagctttgccacaagtagcaccagggggtgcaacaggagtattggctccggttgttccccccagagatgcttagcatattcccggcctgccacctagacctaacgggagagtggccatgatcttgggaggaccccacatcggaggaactactcgcaaggagctaaaacggtacgcaggggccgtgaaacacgatgaggtgtgggaagttactnnnntcccagctcaaaggcctcggctaagggatcaacccattacattcacagaagaagacactaaaatagtgtgttttctccaccatgactcgttggtcatagagacccccattgccagtaagatcgtggccaggatcctaatcgacaatgggagttacgtgaatctgctgttcaaagaggccttcactgcaataggcgtaacggaccgagatctttcgccaagtggttgccaactcacagggttcaatggaacaacacttatcccaatgggaaaagtgaggcttccagttaccttgtgccagaacacaccccagagcaccttcaa

SEQ ID NO: 134953 - DNA, 546 bp, Cannabis sativa
aagaataatattttgcatatattatttccctaataaaaaataataataataatatatataaataaattaaaaaaaatatttcaaaacaaaaaaatatcccgaaggtagataattttttcgcctataccgatgacgaacattcattatcctgcaatcacatcgcctgcctcctgtcgtttttattttttttatacctacaataagataaaaaaaaataattagtgatgaaatagacttagtaatccactcattttcagtaaatatgtaaatgtacgtattagaattatttcacacaagaattgcttgggagtcgaaacaatgtaataccatcattcaacctaaatattttgttctgttgtgaaatttatttgtacatttgatttaagaaaataattatgtaatcttaaaataaatttatccttctatcagaaaattctgatgagaccagggaatagatatagttattagaccttagagagttagttgtttagtcggttagtctgttaggaattctgttataagtctgttgtattggttgctctcttg

SEQ ID NO: 134954 - DNA, 1260 bp, Cannabis sativa
taaaagattatatccacctaactcttaagatacctacggtataggtcatgtatttcttattttgtatatgctgggaatatgtgcccctatggagctaacacaaaaagacaagtgatccatccctatggatcaccccagaaaaacactacaaaataccccacaaatagactgaaaaagggtgggaacatgctgggtttaaaggaatcaaagagagaaaataagagagaaatttgccaagaacattctctgtaataaatactctcattaataaaaaagactcgtggactaaggctcattaatggcccaaccacgtaaaaatcacatgcattaaactttctacagctcttcctacatattatttaagtggttgccgaaaacctcgatcaacattttggttatttcattgagagttgaaggaagtgtctttaaacaaacaacaatcttagaagttgaagcaataatggtggaaactcgcaacaatacacgtcagccccgtcctcctcaagatgctcaaaatccagaggacgaggaagtggcctcaagagtcaacgaggactctgaggaacgagaggaggccaacgatgacgagtacgagggaaattttgacgagtatgatgcctacgacgaaggcagttacacagagttgctgctcttaaggtaaaaggctgctgatcatgaagttgatatcgcggcccaaaaagagcaaaatagaaagatgcaagaggtgttggtcgccatacaaaaagccatggagacatcagtgattcatatacaccctaaggccattcaagcaggactcgagaaaatgtcggaagagtcctcaccgagcactcagaaacccaagaccacgggaccaagtcctatacggtatccctctaaagaaaactagaggaaaaaccccacttccatcccagggagaaagaaaaaggtgcaggatccgcgaaaggttcgctctgatttcccgaaagggaaaggtccgcagagcggcaagctcccaacagggagtcttggccctcaggatcgagaggaccgaaagagcgtgtccgtgcaacaagaacccggggaaagaggaaggggaaaccggagatatcctcccgttgacttaagacagaaaataaacgaaaagcacggcgatctacgggatcacctggacaagaagaaacagataccagcggtctccggggggacactgaatgaaggaattttagcagagttggcaatactgcgcaaagacattgctcgggtctcccggaggcaaaa

SEQ ID NO: 134955 - DNA, 757 bp, Cannabis sativa
ttgctctcacatctcttttatatatatactatttatatattatgtttcatgtgtagcttattgctttaagttgtaatccatctctattctctattttatgtgtatattttgtttaagtgttgtaacattatttatacatgttttgtcctttgtattatttgtcattgaattgtaatcttgttgatttgatatttctattggagcacaacaattttccaacagatacaaacacataatcacatatatataactcatatatatcatgtatattactatcatataaaatagtaaatcacataatatataccaccatgcacacccatgaattgttttcacacaaattaaatctcttatccttgtattctcacaatcttgatttatctcctcttccatattgaaaagggataagcttttgatttttagagattttattacaatggaagaaaaatcaagataaattacaactctattaaaaaataacacaaagattagaataagagattgattaaatatattttacaatacgtatatatacactatatatattacatatatatactatatatattacatatatatatgaaaggtagaagagaagataaattacacaatattatataacagatatataatatgaagaagaaaaagatcactcactcactaccttaagtgtagaatagtgcggatcaccatgacttgaacaaggtattacacctttgtccaaaagcttatttccccctatctctaagcactaagg

SEQ ID NO: 134956 - DNA, 636 bp, Cannabis sativa
ataagtatatgaggtcttcccataacgagacatgcacctcgcttacttagtcttgagtcgatatgtttgtaacacttagtttgtacactaaggactttcgcaattgatatatgtcgctttcgttttccaatgtgtactgtcattgatgccttgcaattggcattcatcgtcatatggtttctcactaatatgttaagtaccaatttatatattagttccacgcctaagaccttacagtctacgagttacaaatatactttgatactcacgtaattaatgagttattccatataaagtgaatgcatcgatctatactccccttatcatgacacgtgtcatccattgagatgacagccaaattttgggtataacagatctattgacaattggactatgattaaaatcagatcactggatctgtcaacaagttaatcatagcattagatcaaataaataatagatttgtaaaaaaaatgaataaataaacaaacattgcaaatatgtaacagataactggaaagtaggttaagatatttctgttaaaaaaatttaaaatatatcttaactagagtttaaaatttaggttgttagagaatattaaaaaaaatatttaaaatctaaccaatctcctaaata

SEQ ID NO: 134957 - DNA, 722 bp, Cannabis sativa
  modified_base (214)..(215): a, c, t, g, unknown or other
attgtaactagaagggaaatacttcattcccaagcttaaagccctataaatagtgattcatattcactgggcaaaaggtcgaaacatttttttaagaattcatatttagagatactattgtaagagctctaagaaaaggaaccattctccttgttcttaagttaatacaaataacgaggattaggctaaaaccgaactgctcggggctgaaccnntataaaattcttgtgtctttattcgctttattatattacacttgtattaaactacttgtcgcttacaaattagactcattgttgttggctaaaagcaagctcaatattaattaaaatcaacttaattattaattctaatttaatatctaagaaaaatattctaatttaagttcttctaaaattaattaattgataaatttttaacttaaatataatttactatttaattaaatttcttaaaataaaaataaattattaagtatcttgaataaaatcaacgtaattattaattcttaaaaagaaaaatatctatttaagttgctttaaaattaattaaaaattgattttcaacttaaatatatttttctacttaattaaatgtttaaaatatataaattagttaccaaagatcattatctagaatcttttctttaaactaaatatgtttttcgaaattaattttaaaataatctaatgaaaattaatttcatttgttttaaaattaat

SEQ ID NO: 134958 - DNA, 949 bp, Cannabis sativa
  modified_base (882)..(904): a, c, t, g, unknown or other
tcggaagggtgacacatggtgcttctgacttaagatcggtctgttatggcccgacccaaaagccctaccgaaagggcaggtccagcccatacggaaggatgggcccaagcccgtctgaagcccagtgggcgcacctccatgacggggactaatccaaatctggaaggacctctagccttcacaggaggaagtaattgaaaccccttcgaatgcgcattagggaaacatatcaagagagggcattccaaaaagtaccttggaaacctggtacaggatgacgtggtagccctctaacacccgatcccacagaatcaggatgacatcccatatctagtttgacctttagttatttagagtacctataaattttttaaaatttttttgaataatttacagtgtcgaaaataagtgttatacccatatttcgatcagtaaatatggttgtgactaatgtgttaaattctgaagataagttggctcgcacattgatgaatgcgtattttatatattcattaactcttatttattcttgttttgggtagtttttcttgagtttttagttggatttgatgtgttttcttcaagtgtgtaggtttgtgcttaaaagacaattttgtgatgtgctaagatctttaagctaatttttgaccatgtttccttcattgtttcggagaggttgtgatatacaaaatgatagattgtaagatttattactcgagaggaaaacttttaaacaattgggcatcaggtagatcaacttaggtggtgtgagatcacttaggtaaccaaaatagttctaaattgtgaaatcgagaggtagaatatttaagattgtttctaaagtgagacttgtgttagaatttattttaccagtatcttagnnnnnnnnnnnnnnnnnnnnnnnaacaccctaaatatgaacttcctaaaatgataaataaacacatat

SEQ ID NO: 134959 - DNA, 801 bp, Cannabis sativa
cttactacaggtgagacccctgaggagggagccagtggtgagaccagtaccagtggctcgactggcataggtgcttggactcctgaacacatcagtgcaggggccatacttctcctccaggactatttcaaggattacataaaccaccttggggttgccccattttagctaaatcctgtttcctacagaattcttgccagttttaaggtcttgtataaaattctgaagtgggagggccctatgccagtggaaatcaagtatctctactctgttaaggctgttccagcaaggaataatgccgtagggggcttctattatctcggtgctcactctagcgagcctaaaattattgtggacctgccaaacaaagtgtctttcaaagatgactccttttggacaattggcctctccctaatcggcataaccacctttcgcaaaattcgtaagtgattattttcctcatgctcggttggattaatccttctctttccattttaagttttctgactaatgttttgtttttttacagccctctcgaaaagactcgtccctactcccgagatggtcaatcgacatagcctcatcctgactcttccccacagccttaggtcgtgcaacttccttctaaacgaggccaatttgagatctgtggatttccttactgacaaggagtatacttatgattataagtttcccaagtattcttcaggttcctgttctagaggtggataaggcctagaatcgtgtggcttgggcataataccttcaaaacacagtccctcgggaagccgatgaaggagc

SEQ ID NO: 134960 - DNA, 514 bp, Cannabis sativa
acaaacaaactttatggttattataaattattttatgattttatatttaaaagttattcaataatatactaaaagtttaaatacacttttttagttataattttaaagtagcttaaatgttttttttttcttggtcaatcaaaatactaataacaattcatatataaatactattaagtgactgaaaatatgtattgattgaaaaaaaaatgttactttatagtatacaaaatagaatatggtaaattatcttattatatggcaactaataaatttttaaaataaatttcaagcttatccaaatgtattttttttatttttctaataatataaaaaaaagttattattgtaaataataattaactgacaataaaaatattaaataaaaaaaaagaaaagagatatatatggatggttttatatttgaaaaaaaaaaaaagaaatcaattcaaacgttatctcgatcagtttcttttcttattttgttttttctaatattagtgggctttatgtt

SEQ ID NO: 134961 - DNA, 888 bp, Cannabis sativa
  modified_base (735)..(747): a, c, t, g, unknown or other
tagatcatggtaaaatattcctaacagtttcatatgattaacaaatgttagtttcaaattacacaggttaaatcaaccactgaatagttatttcaggtaaccacattgaaagaatcatgtacattaaacctcaaagagagaacatgcacttgtaacatgttactacaccaagaaaaattggctagcagcttatgaaggaacaatgtacacaatgagacaccaaagtgagtgggatgtaccacaaaatatgaaagatgtaatagtcttgcctcccattgaaagggtgaaatctagaatataaaaaaagagagcatggaacaaggaaaagaaacaacataacaaatgcagcaaatgtggggagctatgacacaacaagagaacatataggagaatgcataaaaaatgaaaagaaccagaacaactaaaaaataacagtggaacagcagaggaaaactgaacatatattggagcataggtgtaacaccctaactattataggcgtgttagcgtgatttttaacgtactatgcagctcgttgctaatcaacgagattattggaaatcgtgaataattaaaattttgcttatttaattaaaacataataaattacatttataaaattccgggatcctgtttacaaaatacagttacaaaattttactattcatataaaaaatatttgtcgcctagcgactaaacagcaaaagccatgatgtctcgaggatcgtacgctcnnnnnnnnnnnnncccgacatgtacaatcttcacctactcgctctcatggctcctcgctttagccttgcccttacctacacatgaaaatagcaactgtgagtcgacaagctcagtataaaaagcataacataaaacatactaatatcccggatt

SEQ ID NO: 134962 - DNA, 857 bp, Cannabis sativa
  modified_base (210)..(210): a, c, t, g, unknown or other
attatcattaaaataataataattattaaacaaagtcaaaaattaattaaaaatcgccaaaaaatcagaaattaaattctaataatactggaaaaaagaatcgtcgaaaacgaagtcacgaaactacctcactctctctcactcttcggcatctgcgagtgggcttcgtcctagcaggttgtcttcaacctccagcagcctccatggctnaaaaaatgggttttgtgcgacccggttcagacccggttgggttgggatgaaatttcagccaaaaaagtaaggaaacggatgggaaaaataggggttttgatcggtttacaatttctaatagatctacgatattaatttcatgtaaaaacacataaacttaggtatatctaatctaaaacaaatccgaaaactaaagaagaaagtaacccgaatatgtgatccaattcggaaattaaaggtgtacaaacattttaaatcaattattgataagatatgcacaattaattttcaaattataatcaatagaattgaaaaacacaaaattaatttcataaagaaatatatgaaccctaaaagtttaatattaaaattctcctaatttactcaataattttatgctagtaatatatcaaaagaaaaaaaaattaatgaggaataaaaccctaaacttttaagattgaaaaacaaaaaattcaacataaagtaataacgaaattaatatgtaattgaagaaaattaacatattcatattaattgctatacaaattgtaggttctaaatcatatacaataggcaatctgataccacatgttagaaaaattaataataaatccaagatcaatttatatataacatagaacacaata

SEQ ID NO: 134963 - DNA, 934 bp, Cannabis sativa
tgggtctgggtcctcgtcagattccagttccaagaccgagaccgagtccttgtcccctgatcttgttcttgggtgtcggttcacaaggtacgggtccaggtcttggtccgggtttaggttcgagtcccagttaggggttaagtccaggtatgggtcccagatcaaaacatcgactatgggtcaggtccaagacacaggtccagatcaagatcccggtctctggtcccaatctagttccacttcgggtcccaggtgctggtccgggtccttgttcagggtccgggtctagggtcacgtctttggtctcgatgccagttctgaagtccaggtcctaggtccaagtccccatctaggtccgagtcctaggtcccggttggggttcaagtcctagtccgagtttgggtttgagttttcgatccggtccgggtctagatctgggttcgagtacagagtttgagtccacatccaagttcgagtcctagtcttgggtttcgatccgggtctgggttctgaggcccaggtttaggtcccccatccaagtttgggtcctaggtcttagtccgggtccatgtttgggtttgggtcctagtctagttgttatttcgattccgtgtctgggttcgggtttgggtcctggtctgggtcggggtcaaagtcctgctccaagtccagggtcaggtctcggtccaagtccggatctcggtctgggtctgggtttgggtataggtttcggtctgaatccaggtcccaagtttcaatcccggtctaggcatgggtttgggttcgagtctaggtcagtatcaaaatccatgtctgggtcagagtctgggtctaagatcgtctcccatgttaaagtccgacctaatcccggacccggaactagaatcagacccggacatggactagaacccagacatgggaccataacaggacc

SEQ ID NO: 134964 - DNA, 622 bp, Cannabis sativa
gttagaatccttgactaataccggcggaacctgcctctaataatctgccgatattagtcatttcaaattttgtccagtcaaaatcccgcccaaagtattagaggcgaattttccgccggtaatactctaaatccaccggtaataatattatttattagatatttattttttttaatttttaaaaagtaataccggcggattattttttccgccggtaataaccccataaataccggcggtttggctccgccagtattgaagctttttcttgtagtgaaagttttatcgttgtaatgctcatttcatgaacctcggattcaattactcacctcccctattcaatacccagtgctacatgcatagaagagctaaggaggggtgagtaaccttacaaagctacaaacatgttctagtcaacagtacttgagggtaccttccaggtaaatcacaatgtataaggtctattatcaaccaagtactatcttaagtacacttactaagacacatagtaagtcctaagttatgttattaactataatggactcactaccgagccttatacagagttcccaagaggaatcatgcataagactatagttgtatatgttggaaatattttacc

SEQ ID NO: 134965 - DNA, 633 bp, Cannabis sativa
  modified_base (602)..(608): a, c, t, g, unknown or other
aaaccctacaaaactcacaatggggattagtttattgagtaatttgcggcataaatacttaagtttaattctcagttgcacataaatacttaagtttaattttggccgtaataatacctaagttatatttctggaactctgtaggtaccaaaccgttaaatgttaagtcattatatccacatgtcattttcttattggtatatttgaactattttttttaaataataaaaatttaatagtcttggaccaatcaaggattgccacgtggcaatttatttaacgaggtatctacagaagttccaaaattataacttatgtattattaccgccaaaaattaaacttaagtatttatttaaaattgggagttaaacttaagtatttatgccgcaaattactcttagtttattccatacttattttgtttaattttttgaggaaaatagtattttcttttctaacttataatttgtctttaaaccaactcacaaccatttttttacataaaaaaggatggagaaatgctaaagggcaccagtggtgcctaacaccttcctatgtgtcaatatcgctattggtacaactaagtatcgggtcccatatnnnnnnntataatagtttttagggagtatcgc

SEQ ID NO: 134966 - DNA, 547 bp, Cannabis sativa
ccttatgttgtgttaattgtttttttttgagaagggggcaaaaaggtctttttacaagtcttctcttgtcttttctagttgattctttggctgaatataaggttatttttttaaaaaaaaataataaagaaagaaaaagaaaaggagaggaaaattcctcatgtgtgagttgaacctttgaccactctttttcacctatcttcttctctctctctcgaatccattagaggagcttcaaaaattggatttcattgttgctgtaggaatctcagtaggttttgagcaattttaattggaggtaatactaatatttattcttctttgcttatctttcttactttgaagttaggtttttgttgaattttaggttttaaggtggttgttgatgttggggtgttatgctgtgttattcttaagttaattatgtttattttattgatttcaagctgtttttagagatgtttgtgttgttaaagcaaggttggagtttaagaactacaactttgagcttcaatggtaaaagtggattttgaggcttttgttgagt

SEQ ID NO: 134967 - DNA, 575 bp, Cannabis sativa
gaccataaccgaccgattttcaccgctacttagttgtgcatttatttatattagtggagaatagtaagtattgcaagcatatggaattttaggttagtggattgatgtttgtaattaacatgcataaagtggtttaattgtaagctaatttcattctatggtttcatgagctgaaggaaaataagttgaagtttgtcaagggtgtaattgaattgaatttctggattatatgcataagtgaaattgttcataatcatgttattgaaactacttgaaaattactcatattttggagattgacttgttaacttttatttttttcgttttagtgttttactcgaggacgagtaaaagcttatttgggggaattttgttaggttatttttagtataaaatttagattaagtttagtatattttcaatttagttttaatcatgtttggtgcatattttacgctttttatcctttatttttgcagatttaaaatagaagaagattagaaaaatatcagagaaaaaagatgggaaaaaagataaaaatatcatgatatttaaattagagaaaattgtgcaag

SEQ ID NO: 134968 - DNA, 892 bp, Cannabis sativa
gtgaaggagttgttgggtacttataaggtggcttcgagacaaagaattaatttcactaagtcttctttattttatagcaagaatattggtagtgaggtgcatgattctatctgtgctatgttggaaatttatgaggcagatgaaaatggctattacctgggccttccttgtttggttaggaggaataagaatgctatccttggctttcttaaggataagctttggaagagaattcaaggttgggaatggcgtattttgtctcgtgtgggaaaggaggtatttctgaaatctattgctcaagcattgccgaattatgctatgaatgtttttctcttgccattaaacacttctaaggagttagagcggcttatggctaagttttggtggcattcggatttgcgcggtggtaaaggtcttaactggatgagttgggatcggttgtgtcgtcataaacatgcaggaggactgggtttccgaagcttgagagactttaattctgggaaacaacattggtgattgttggttaatgatgactctttggttagtaggctctataaggcaaaatattatgctcatggcaacttgttttctactgaattgggagataatcctagtttcatctggtgaagtattcttgaaggtaaacatctagtacattcctgtgcttaaagaacaatcgctaatggggaaaatgtatccattcttgcagatccttggcttccacgtagttctaacagctatgtcgttataaggcaccttgctcttgtgaataaatcagtcagccgcctctttcaagttgacacctgcgcttgggatgaggatgttgtgagagacttgtttgtttcacgtgatcaggaccttattttgtccattcagcttagtgattcagccg

SEQ ID NO: 134969 - DNA, 892 bp, Cannabis sativa
aaggatctatcttcataccccggtccctaagcaccatgtttaccgccattatagagacgccaagcaaaatttcgaaccttgggagggacttctaacttccaaattttagtccaccatttcttagtatgctcctccgatgaaaaccctgcatttaattcgttggtggtggccactttatagccactactcaccgtatacataccattcggtgtgtagtgccaaactaaatcatcaatagcattattataacaaggatccatacctagcacaattgggacatcatccgggtgaaaagtttgagttatcatgtcttgcttccgctctccttttccatcctttaagtgatccatggttgtcccattgttaacttttgcaggggtgcgaagagtgaaggtggatgggcggggcagccatttgtcttcgttaatgcgcacttctctacctgattggaccctccatcttactcccctttcaactattttccttccccataaaatacttctccacatgaaggagcaaaatcctccaagtttagcttccatgaaagtagagttggtgaaatagcaagctttaagaaccccgagccagcatcgaactaggattattgatgatcttccacccttgcttagctaataaatattgattgaacttctctacatctttgaaccccattccacctttattctttggcttgcaaagcttttcccatcttccccaatgaattttgtttttggactccgaagatccccaccaaaatctagccatcatcgcatggatgtccttgattagttcctttgggaggcggaagcaactcatgacataagttggaattgcttgaattactgctttgagaagaacttcccttcccgcttgggaaaataagctagctttc

SEQ ID NO: 134970 - DNA, 790 bp, Cannabis sativa
atattcagcataaataaattaaagtggaataaagaaagaaactgttggtggatgaattctagatcttcactttgaattactctgctcttcccgtcgctttcttcagtgttttaggtctccaaatcgcttccccagatttccaattgcagttttctatttatatgtgatttttaaggttcgtcggacaattttaccgctgggccgtacgggatctcgccgcggccagatagatgtctaaaatcatgcttctgtagtttctatacggtcgcggcgagggtatatctcgccgcggcgactggagcttcaacttcatgggtttctgccttcatgatctagccgcggccacactaatctagccgcgaccagaagtgcatcacgcctcaaattggtgtttttgttggctcagctcgtcttttactggacttttgcatcccgagacctctattattactaagaacctgaaaacatagaaaacaagcgtaattccgtcctaaaacagtgataagcgaacataaaatcgatccaaaatataggctaaatatagcctaacaaattcccccaaactgaatctttactcgcccccgagtaaagctaggactcaaactaacaaaaacaatgtagtagataactaaactttccaacgattgaaatcctaccaccacctgcacaacttcaagcacataataacaagaatttcaactcgataactctaagaactaacttggatgcacaattcagaagtaagcaattcatacaaacacaaaacatcgcatttgacattcatatcaca

SEQ ID NO: 134971 - DNA, 1088 bp, Cannabis sativa
  modified_base (894)..(903): a, c, t, g, unknown or other
  modified_base (1057)..(1062): a, c, t, g, unknown or other
tctctagaatataccttatgcaaatgaatttgaaattttgagaaatttcatgaatttctagcaatggtgaaaactattaaggtaagtggttaaaaatcttgtgagctgaaagggataaaaaaatatttagttatgcagctcaaagatcattaaattgaacattgaattgtatctaaacttacctatccataacttcggagtcccatattgatgaaaataaaaaggtctatgattagttactggcaactgcttgagtccttcttgggaaattccttagaaatagcaaataatattctatgtcatcccatctaagtttaatcccaagaaaacctcagaatgatgaaatcgtcatatacttagtgtacaccattactagattcatggatgccctgatcataaacttaagaaaggctagaattattaactaagttttgcatgtttgatatttattctaaaatgattatgggtggaccatcctaaggtcattaagataagaaagtatttgtttcaacaaatactacttttctaagaacatgattaaatctgaacaaatactacttttctaagaacatgactaaatctgaaaattaaagtagcaaagtagaagagatacttttgattcaactccaaggtgttctatcatcttattctatataagatggtcccactaccgctgttgtattgacacaacggatgaggtgaataccacaaatgttcctaggcagaaagtcacagtaccttgttgtagtgggagggtttaaaggaacccacccttttatgacttggaagacacttgtgataaaaaccaattgttagtttaaacaagcaatgagtagtcataataagaaactgagaagcaaagccaagagaactatggttaaaaccgttcatatnnnnnnnnnnaaagttttctattacaaggacaagaaggtaaattctaataataagtctattcaatggacttaaaaaaacttcccaatccaagtatcattggtttgagattattgaaacctgtggcttgtggtatacctagtaatttacttactctagtgcaagnnnnnnactttagtaagatgctagagcatttt

SEQ ID NO: 134972 - DNA, 666 bp, Cannabis sativa
tttatggatgcctattcggggtataatcaaattaaaatgcatccaccaaactaagaaaatacaagtttctgaacagatatgggtttgtattgctataaggtcatgtggtttggtctcaaaaacactggagctacataccaaagattggtaaataagatgtttaaagaccagattggacgaatcatggaagtgtacgtggatgacatgcttgtaaaatccaagaaggctagggggcatatagatgacctggacgaatgcttcaaagtcttcaaaaagtacaacatgaaactcaatcccttaaagtgctcctttggagtcagctcgggtaagtttctaggctttatcgtcattgcccaaggaattgaagtcaatccagagaagattcaagctctcctagatatgaaatcaccaacaagaaccaaggaagttcaaagtttgactagtcggattgccgcactcaacagatttgcttcaaaatcaacagacaagtgtgttccgttcttcaacatcatgtgaggaaataaacaatttgagtggacagagctaaaaacgtaactcgcaaaacctcctgtactcccaaaacctttggatggagaagaacttgggatgtacctagctatcactgtaatgaccgctctagtaatttggattagtaagggcaattag

SEQ ID NO: 134973 - DNA, 1203 bp, Cannabis sativa
  modified_base (1149)..(1160): a, c, t, g, unknown or other
attgacccaccaactccaaggaatgatataaatttggttaaaaggctagagatgattgagaagaatgtaatggcactgcaaaatcatgttgaaaaatctgatgaagaaattagaagattgaagaaatatttcaaatttgccatatatgttgttcttgcaattttgttgtgttcttatttttattagatttgttaaatattttttttaatattgtactcttgacaaactagaatgaaggtgtaattttttttttgtttgatacattgttgttgttgagattaattctagtttttgggtgagatttttaatctttaaaatttatgaaagactaacctatatatgtacgtgtatatcaaagatgagttgtgaactttgcaataaatttactaagaataacaccaattaaaatctgatgttatttagaaacccaatttttttttaataaagaattacttattttcatatgaaacgagagagtgagaaataaagaggaaataaaatgaagacttttcactattctgttagtgtatttgacatgaaatttcattaatttttgcaatataaataccaattacatctcaaaatatcaaaacaaactgaatcctccatgataaacctctatgataaaattgtacttagaaatagatgttcatgttaccacatgacaatttttaacgaattcccattactaaaataacctgtctagcagaacaacattacaagtccagttacatttcataaaagatgtaacttttggctttacaaagaaagttatttgacatgaaatttcgttaatttctgtcatataaacaccaattacatctcaaaatattgtaggttgatgcttttatatgacatccataatactcaaaatactacataaaatacttctcaaaatactattcaaaatactacataaaatacttctcaaaatactattcaaaatactactcaaaatacttctccactagtctttgatgttgtttgcatagtccataacccctcagtaagttggtgcaatttgttggggtgtcctttgctgcaatgaacgacaaaatgtgatttttaatgcacaaacagttagaaaagtttaaaatgaatgattatttgagaggactttgatattgtactgtaacaccctaactatcnnnnnnnnnnnncgtgatttttaaacgtactgtgcacctcgttgctaatcaacga

SEQ ID NO: 134974 - DNA, 515 bp, Cannabis sativa
attgcatatttgttttgacattgaggacactgtctgattttcggttgggggtggtaagctccggtgagctttcatttggagaattacattgttgtgttgaatatttaagtctatttttctcaaaattttctaagcaactcaaaattttctaagcatgattgaaatattttatttgagttggtttttcctatgtttagttattaaggagtgatttccagagttctttaatgcactttctaaacatgtggtaagatggttattaacacaaatagttgagaaaattttcaagcttaaagtttctcattttttttgtgagttgtgagatttcagaaaacgactttttgaacttttattgatcatttgagttggttgatttagatttttcaaatttaaacgtatgacatatactggagggataatttcagttgttagaagagcctttgttgtaatgttatttatcatatttctctttattcatgtatttttatgttgcctcttgttaaaaaaaatcaaaa

SEQ ID NO: 134975 - DNA, 567 bp, Cannabis sativa
aaatctaatctataaggttttatcttctcagaagaatgtggcccaatcacatgaaacacttgagcctcctatcattggacctacattccaaccctcaaattactttgatggtgtgtttcaaaaacggcccaaggctggagctgctgctgctgcaagttcaagttctgctgcagtagaactcctggaagtcaagacagaagttcagaacgtgaacaatcatcttgcagcaatggaagaatttcagcatgagatgtcccagtaattgacttctttggttaaactctaccgagactaagttgttgttttctctttgctttcgattgaacttatttctatttttctttctttgtttactttgtcactctgataaacaaaaagggggagaaatatttgatttttaatctgtttttattctgtttgttttgccccactttggaccctttttccagtgggagttgtggttagtactggtgaacatcttttgttaaaagttagcttgcttattgtgttatttgtgatattcgattgtgttactcatggggagtagttatttgctcttgctaactt

SEQ ID NO: 134976 - DNA, 516 bp, Cannabis sativa
ggaacatttgttgtaggtaggtatggtcaacaaggccacccacagaaatagcagaaattcggaaggctctcatatttgaagctgagaaaaccaggtaaaacaaaccgagattgaaccagagcaaagcctgtaggaagcttcaagaagaagatccattttgttccagttggaaagctgaaatgttggttgtgatcttgaccattaatatatatatatatgtctttttaatatatgtgtgtgaatataaatgtgaatgtatcaatagatatgtggatatatatttgtgtgaatatatatgtgtgtgaatatgaatataaatgtgaatatatatgtatgtatatatgatggtgagtttatgaatgtgaatgtatgacatattataaaattaacctaatataaaattaacctaactcttttcagatcttttaggccctaaattacatgttatctaatcatctctgaattagactaacatttgatcagcattacgcaataatctaattgtcactaaggcta

SEQ ID NO: 134977 - DNA, 2154 bp, Cannabis sativa
  modified_base (1652)..(1653): a, c, t, g, unknown or other
  modified_base (2026)..(2035): a, c, t, g, unknown or other
tcaaagataaatcaacaaaaaaaactcccaataataaacacatatgaaatcaaataaaaaaaataccacagtaatacatatacattcacacacacacatatatatatatatatgttaaagatgatagtacaaaatcaacaaaaaactcatatcacacaatcacacctgaaatgaaatgaaaaatacaataaatacatattcaaaaaaaaaaatgaaagggaagagagatgagagactacctaagagtgaggaatggtggctgcgactggtggttggaggcgaggccgagattattataataggcgcttacagtggctgcgcccggaatcggaaggagtgcgaaggcgctgctgtgttttgggttagggatggtggagagagagagagagagagaggggggttggctgctgctgcctttaggtgtgtgtactgtgtagtgtaaatgagtgtaattttttgttgacaaaattagattggaaaattataccctttaaaggaaatacatttttattagttttagtaaaataattttttagtcaaattttttctcataatcatgtaaattatacttatttaagatattttataaaattttaaaaaatttgaaaaagtttaacacgccaaaaattacgttcaaatagtatgttcatgttgcatgtgtgactatattattttatactcgtgcgaaataaattatttgaacattatttcaatattgtaaattattctaaatttctcaaaattttgtaagatatcttaaatagttatattgtacatgaatataaaaaaaaattaaactaaaaaattcttctaaatgccgaaacaagtatatggtacatcagtacatcctagaattactcaattacatttattgaccaaaactttaaattttttaggggttgtttggaataggcgagaatttaagattgtaatgttatttttctaggaaaaagaaattttatttacactttaaaaatttttaaagccacctcattttaataatttttattttatatgaaatttatatatttaattgtactgagttttttttttcaatccattttctcaaaaaatatacttatcacacaaagataaattatattttaaatattataacaaaaaattaaaataaaaaattatataaatttttttaaaaaaaatatatatatatgaattagaaaaaattatgaaaataaaattaaaatacgtattaaaattaacataaaataatgtgaggaaaaaattcaaaaaaatatatattaagagtaattttatatttttttaataatgggtatatttattattttatggggtataaatagaaaaagagtaatattgataccttaaaaaagagtgagattgaattatttccctctattatattaatttgaataaaaattttgaattaataaataaatttacaaaccactaatattttgatttattataaaaaaaaaaatattatgataaatatttagtctgtgaaattgattttttttttaatttttaaatgagttatttctatgttattagcaataatatatagcattatacataaattttatatgaatggtgtacataaatgacatagcgaataaaaataaataacacagtgataaaatatataaaaatattcattttaattaataaannatacaataaaatttaatatttactgattaataaatatattgttttaatgactaattattttatttttatgtataattaacattaacatatacaatataaaaaatattttcattttaattttttaaaataatatataaaattcatgtactcaaccaaacagtataattcaattaacgggaatataaatacatattaccctatactagggttgttcatccgatccaatccgtacttttttggtcaaacaacattcaatctgcactaagtgcggatttcattttttggatgcaatccaatccgcacaatagctcaaatccaatccaatctgcaaaagcgcggatttagtcggttttggattggttactttttaatnnnnnnnnnnttaatatttatgaaaaaaaaatttcacatacgtagcaacaaataaaacaaattatagttattttatgtctccaaccacacattaaataaataaaataacaaattcaaaggaagaaaaaa

SEQ ID NO: 134978 - DNA, 644 bp, Cannabis sativa
tgttgatatttcaatcacttgccccgtttgtaatctacaacctaaaaccatcagccatgccctcatctcttgcccgtttgcatttgattgctggagccaatgtgcaactctatatagtagtttttgatcctggcgattctttcggaaattggttggagaccatctttaagcaagctgaagctgatatgatttgtcttattgccatgtataactgggcaatctggaaggctaggaacaaggttgtttggaaaaagaaacactcatctgttaatgacgtgcttacttctacacaagtagctcttgatcactggaataaagctcaggataaaatttcgttgtcatcaatctgtttggaaagcatcggtgatggcgctgtcatggactcaacctgcagaaaacacaatcaagattaatgtagatgcagcagtactctttgatagcgacaataagtatggtttcgaaattgttgtccgaaaccaccttggtcaccttgttgcagcacgggccgattgccatggcggaagatatgcatgttcaaattgaagccatggggattaaagaagctcttagtttggtaaagaccaataattggcaacatgttcaaattgagacggacagtcttgtttcagtacaagctattcgaa

SEQ ID NO: 134979 - DNA, 1220 bp, Cannabis sativa
  modified_base (1048)..(1049): a, c, t, g, unknown or other
tttctattggacacattgagagcacattgagagaataagtagttgagagaataagtagttttcagaataagtagttttcaagcaagttttcaagcactaacaatcattttaatcgaaatagtaaaaatttcacatttttttatctttgtgaaatgtggcccagacccatctcgtaatatttttttttcactagtcacaatgaattcgttctactaggacttaaatatgaagatttctttcgcgttaaatttggttaaagtgaccccctattaaaaaaattaaaaatattattcttttcagggaaaaatttaacaagttttttccttaatcttacactggttagtgttctcttaaaatttcaccatacatatctcaaaaaatcatgaaattttatagggccgaagccaagactattatgcatcacttttctattaaacaggttgagagaaaaattagttttcaagcactaacaatcattttaattgaaatagtgaaaatctcacaattttgatagtcgtacccctttgtaaaatatggctcggactcatctcagaatatttttctccactagtgacaatgaattcgtactactaagaggtgaatattaagattactttcgcattaaatatggttaaaatgccccctaattcaaaaattaaaaatatttttcttttcagggtaagttttaataagttttttctttactcttacgctcgttagtgttctcttaataaatcaccctacacatctcaaaaaattgtaaaatttcacagggacgaatccaagaccattttgcatcacttttatactggacacgttgagagaaatagtagttttcaagcactaacaatcattttaatagaaatagtgaaaatttcacattttttacagtggtaaccctttgtgaaatgtggcccagacccatcttgtaattgtttttccactagtcacaatgaattcgttctactaggactcaaatatgaagatttatttcgcgttaaatttggttaaagtggccccctattaaaaaattgaaaatattcttctnntcagggaaaattttaacaagttttctctaaaaatttcacagtacaaacctaaaaaaatcatgaaatttcataagaacaaagccaagacaattgtgcataacttttctattaaactcgttgagagaaaaagtagttttcaaacactaataattattttaatcgaaatagtga

SEQ ID NO: 134980 - DNA, 1657 bp, Cannabis sativa
ttaacttgtgtatcgatgagaaaccatgaaaatgcaagtatgcatgatgaggcattaacctcatcgcgtggaggagatttaataacaataaaaatatttggcgtatctagggaagtatacaaactaaggataaacagtttggtaggtcaagatgacagacagtgaggcatttatctcgctgcaagatggcctgcatgcgagaaagatcatctcaacaccagaaactatagttaagaattaaagtagtatgaatctcgagaagtcatatgacgagcaagcttcatcaaagttaactcagctccatttctagcgaggcatccccatgagataaggcttaccgtatatctttaatatgcattcatctcggtccaataaaagtaggatactcacagctgtgtgaattctaaatgaaaaccacatttatttagcgtgatttgtatcaaatcccatgattcgaggaaataattgttgtaaagatctcagtcaacttttgtagttaactgcccattatgtaattataaataggggaagacaagatcacaaaaggggagggggggacaaaaaaactcatacaagagtggccctgaaaaataatcagaaatctgaataagatggactcgtggactatgcagaattttaactgcaaaaccacgtaaaaaaacccctgtgttcatgcttttattttttacagcttttctttttctgtgtgaaattattactgtgaggttcaaatttagttaacgaaaatctgcgttaacaataggtatatcaaaataatcttgtccattgattatactaacataggatcaaagcggctttcgtaacatttaacgtagctaaacccatcaatggtcatgtatatcaatataattaaatgacatagatcaatcacgggtgtatagcatggaaattacacgaaaatgtgatcttcgcatgcctatttcgaactggtatagtatctttcaagctaatttttttaatactttattgatatatctcttttgtgaaaattcaagaatatcccaagaacaatctcaacatatcttgaattcctaatacaaaataggtatatcattagtggcaagcaatttttcaccaatatataataccaggatcatattcttactcccactgaacctgtgatatatacacaattatcaaaagctgttatctcaaaaaccaaatgagaatacttaataaaaattgtgtaatcattgagaagaagcttacttgagtttatacatggattttcctaatttgcaaaccatattctttggatctttggatacaaagttttctagttgcaccttatgtcatcaatattactattgataaatgacactttaataatccatttgataaaactcaaaaccataataagagtcagtgttatgattgtcctgaaatagtatttcaattaaactaaaagaaattctatttaaaatgaatatatgctttatgagtaattctttacatacaagacataatgtgcatctcttcacattgcaatttgcatccctcttgattataaatattcatttataatcaattagttttacaccatgtagcaataggaaaaataccaaaactttattgtctcacatcaatttgtactccttatttatgatatcaatccagtttcgagagttggaacctt

SEQ ID NO: 134981 - DNA, 561 bp, Cannabis sativa
gcaacctcgaaaaatccattaagtgcacagacttggtggagcttataaccaactctgaagaagctgatgttttgttcgttgcacgttttatgttggtagcattgggatccttcttggttcccacatctggaacgtacgtaagaaaggagtacataaatgcactcttagatgttgggcgaataaagaagttgaactgggcttcgttcatctttaagtttttacacgagaatctgaaagcacatcaaaaacgactcaataattcgaaagataagggcaaggttcattatctcccgggttgtactatttaccttcaagtaaggattaaaccatcttttaattaattatgcatccctttcactgtagttttaattgcaaataattttttttttgcagatatattattggagccatataaaaaggaagttgtacacttctcctcgcctcggccttcccatggcttactggaatgaggaccgagtgaaaggaatatcctcgttcatctccaagagtgggggatttgtgaatgggaaggtacattttttggtttacaactcttcaaag

SEQ ID NO: 134982 - DNA, 969 bp, Cannabis sativa
agttgatgagctaagttgttcttcaaaggaatttgcaaggtgaaaaccagattgcacagtatatgacccattggaagtgtaatgccatatcaatcgatccatttcagcaaaataactcagtggtatagttaaaatgcgatctcaatctataggttggaagtatcgattcaacattggtacattccaaactctttcctcagtgatgaagcttgaaaccggcagtgagatggatcctgaaaaacttgctggtttgaattcattaaaaccagggatccatgaatcatttttgctgtcaatatgagtaccatttccaaccttatatctcagccctttaaccaacaattccttaccccaacaaatgctttgccaagtcaatgatggtgagtgaccaatgctggaatcaagaaaagaactattagagaaatacctatgcttgagaagtcggctcaagagagaattgggcatatcaaaaatcctccaagcttgtttagctaagagtgcttgattaaaatgaacaaatgatcgaaaacccatgcctccttcaaattttgatttacataaggatttccatctcttccaacgaattttggtaccattttgattgctaccccaccaaaaattggccatcatactctccaattggttgcaaaatttcttggtaagcttgaaacaactcattgcatatgtagggatggattgcaccacagctttcaacaagacttcctttcccccaattgaaaaaattttctcattccaagaactaagaagtttccaaaccttatctttgatgttgctgaaaagttcattcttgtcacggcccgagtaggaaggcaaacccaaatatcgctcatggcactcggttataggcatttgtaatgtttgggagaaaaaattctgagctgcttgtgaagtatttggcgagaaagacatgacagatttgtcattgtttaaaacttgtccagatgcttt

SEQ ID NO: 134983 - DNA, 629 bp, Cannabis sativa
taaaaagtcttaaatgtgaaaaaatgtcatagaggagtagcaaacctataaatgccatatttttgtaactctttttacaaaatcccatatttcatgtaattttcactttttgttgtgctaaatgatcttatttgggaatgtcatttaatttattatggctttgaaatttagtgcacttttaaattttttaggtaaaattactattttaagatttttgtgaggttaaagacctctatggacttttgaaataatatttcatcatgtcaatttattttagtgagctcatttggaaatttgtgtcattttatatgactttagaattttaccactttttgtgataaaattgagctttgaaatctatttattatttttttttataaataaaaagattatttggctgacattttaactacttattccaaaatttagaaataataatttgtactatcttaaatttcaatttaaatacattaattaaaatttaagataatatcaaagatatttatatattcttatttgaattttatatacagaatacaatatataatataagacactaatatagtgtatatatataacatatattatatatttatcgttgagagtcatatgtatatttagcaattaat

SEQ ID NO: 134984 - DNA, 2989 bp, Cannabis sativa
  modified_base (988)..(990): a, c, t, g, unknown or other
caagacctagacccgaatcgagacccaaacctagatcccaactcatacctagactcagtgccgaacctagacccaaactcagacccaaacatggaacaagaatcgggacacgaaattggggccgggacctagaaccgcaccccagtcttggtcccgaacccaaactcggacttgggacccgggacctgaactggaactagaccaggacaggtgaccgggaccagatcagggactcaaagcaggacccgaacccgaacctgaaccaggacccaaacgcaaaccctgacccagacccgagagacggaactagaacctgaacaagaactgcaaaaccaggacctttgaacaagactaggactgtgaccaggacctagaccaaaacctagaaccgaactcggacctagccccaaacccaaagcgagactaaaccttgagcccaaacacgatcatgtacccagattgggagcgagagccagacctggacctagacctgggacccaatccaagacccagactcggacctagatagggattcagatacgaacctagactcaaaccaaaacccaaacccaggtcgggatcgaaactcgggacctagatccatactgagaccctgaccaagacctagacctagacctgcagctaagaccaaaactcggacctggacccgaacctagacccacacctagacccaaactcggacctagactcaaaccaagactcagaccccaaccaggcccgaaaccaaactcgaactcagacactgaatcgaaatcaaaactgggactaggacccaaacccgaacatggacaaaggatcaggacctaggacccagaccatgacctgcgcctcgaaacccagacccagatctaaacacaggactcagactcaaacttggaccaggactcaaacccagatcctgacctagaccgagattggaaatcgaaccgggactcaaactctaacctaggacatggaccgggacacnnncatcagaattgggaccgagacccaagacccgaccctagacctagaccctaacctaggacatgaactgggacctgggacccgaagtggaactaaactgggacccgagattgtgatccagatctggacttggggcttgaacttgacccgtagtcagtgtttggatttgggacccatacctagactcggaccgagacccagacctagacctagacccggaccccagacctgggtcccagtctgagtctgggtttgacttcgggaactagaatcagactaggaccttagaccaagacccagatcgagacgcggacccaaatcaaaactcggatcgggattcaggacgcgaacctgaacccagacacggacatggaccaagacccagacctaggactcggactgagattggagactcacacctagacctaggaccaaacctagattcgggacccaaactcaaaattataaccaaaatagggacccaggaatgggatcaagacccaagacccgaccccggtctcggtcccagacccagacccgaacacggactgggacccaggatctgaatcgaaacgagaccgagacccaagattgggatgcggatcttgacccacgacctagggttggacccaacccgttgtcggtgtctatatcttggaatcataccaagaccctaacctagaaccatttctagaccaagacccaaacccacactcggacccgagacccgaaatcggaacaagaatcggaataaggaccttggaacaggaattggacctggacccaaaactagctctagacgcgaacccagacccagacttgcgccaggaccaccgacacaggacccgtgactcgggacctggaccagatgtcagacccgtacaagaaccaaaacccaaacccagacccagactcaaaccaagacccgaacccaaacactgattgaaacctggacccagacccagacccggactaataccagaactctgacttgaaaccgggacttagacccgaaccaagattaggactgggacccagacttggacaaaaaccgagacctaaactttgactaggactagaaaccagacaggaaccgcgattcggaactgggaacgggaccaggacccgatacttggacctgggacctaagaaccaaaccgtgacccagaccaagacaaggccatgactcgagagaaggaccaccgaacaagtaccgggacctgcactcgggtgggacgctaacccagatcgagacctagcaccctcacttgaattggggatccaaacccatgacacagaacccaagacccaaacctaaacccaaacgaggacccaagacatgagctagaactagactaggatctagatttggactctggacaggagccaaactcaaactcacaattgcaactagaactggaaccgaactaggactaggacctaaacccaaacccaacccagataaaatcaagacaaagacccaaactcgaatcgagactaggactcaaacctgaacctagactgggacccaatcccagaccagaattgggacctggacccagaatcacgatagggaccttgggcaacggaactaggtctgaaacctagtacccgactcatgacatggcacccaaaatggaaccagaccaggacccaacatcgagatctggatctagtgctagggcttggatcgaacccatagtcggtgtatggatctgggacaaagccccggacccgaacccagaccagcacctgaaccaaaactcaaacctgaacccaatcctagacccaaacctggacccgaaaccataccttgtgacccaaaattggaaccgaaatcggaagttgaccttgacccagaatgggaccagaacccggacttggacctagaaccataaccgaacctggacctagacccaaaactataaccggacaaagacccagactcaaacttagaactagacccaaaccaggactcggacccggattcccacccagacct

SEQ ID NO: 134985 - DNA, 503 bp, Cannabis sativa
  modified_base (149)..(149): a, c, t, g, unknown or other
gcataaaatttcctcttcttctctaccacggacttaggagtaaagtcctcaggataaagcccgtacctcacaagattatcatcggaggtcaactggataatattttggccttccctcggtaactgagcaagtttttgagctctatcccnaagagcaagagtgaggggaggacgatgatatgtcgaaatatgttgaaaatgagtccgggtaatgctcgcatccttcaccatgaagtacttatcaacaaaacgccctattttgctgatggccttgtcatccttgccggtcaaccacttgaagcatggctgatagaaatagaagtatcccaacctgccttgtttgggggtgcacttcaaatcgaagaaccaggcaacctcgtgaggagaaggagtaccccacccttgggaagcgtagaggacgaagagggaagacaaatacttagtgcccttaggagttaattgggcctggcagagaccgaagaagtccgccacatccttgaagta

SEQ ID NO: 134986 - DNA, 1113 bp, Cannabis sativa
  modified_base (27)..(27): a, c, t, g, unknown or other
actaatcagattgtaaagagttttatntagggcataaaacctaacactatggtcgcgactagccctttatttagtcccgaccaggggcgaaacacgggatttttgaccagtttcgaaatttttccattcagaggtaggaacccaaattcctatataagggactcaacttttatgatgaaaattatcagaaatcagccccgaaaagtgaatgaaggaggagaggaagctattgtgacgatctggagcgaaatcaccaactagttgtttcttaactcttgaatttccttatgttaatttatgttgtagatttaattatggatgttaatatggtttttatgaactaaatttccaatttggggaagacgatgaatgttgattgaagttttgcttagttcatggtaattgccattccttttatcttgtttgtgaaattatctatatttgtgtataattccatgtttaagattgattaccttctacatgctctatgatctcaatttaaaatctgaaaagtgagaatttagaacgctaaaattggataatttaggttttatgtgaaacgaaagtatttgcgtaacctgtctgacatttagattattgcgtaaagctgattacatgttattctaattcagagattgattagagaacatgcaatttaggacctaaaagatctaaaaagacttaggttaatttgtttaatctgtcattcacttgaagaaaaaggatagcaattagcattaccaattgggtaaataaatcaacaggattttcttccatattttatcatcttgattgaatcttttgttgttaattttagtttcttgatactcttattttgtgttttaatcataaaaactattggtttgccaaatagaatcataagtttaatatagtggtattcagtccaattccctgtggttcgacctcatctgtgtgagtttactacttgattacgtgcacttgcgtattgtttataattttcataacagtggggatcatgcaggttggcaaagtctatctaaaaagatcattagacaaggatattattggccaacaatcaataaggacacccatgagtttttcaagaactgtgataagtgtcagaggttttca

SEQ ID NO: 134987 - DNA, 792 bp, Cannabis sativa
  modified_base (754)..(764): a, c, t, g, unknown or other
aaaagtcattatttttgtaagtttccatatgtgtgcacccttaatgtatattatccatgaataggtaatattaaaaaaagttgcgtttttatgattaatttttttatttaattaaaaaaaattctcatttttacattatatggactgtgattgttccattagctgaaaaaaaaataggcaaaaaaatgataaaaaaaagttgagtttgacttaaatattttttatataaatatatttttgatatagtataaaaatagttgttttttgacattttctttaattaagtagttaaattaagtataaaaattcaaatttttcgtttattattcgctatcaaatcaaaatctaatggtttaatatttttaaaattaaaatatatagttaaatttatgggattgttacattaatatacatagtttttaaattatttacattaataaccttacataaacaatcagcactaaaataacgtaccagagaaatttttgcctttttttattttttttttaaaatcaaacttttgcctattatcacttattagtagttgaaagtcaaactttaaaaaaacaaaagtgttaccaaacggcacctaaacaaattaaaatagagtaatttgtagtataaatacgtaaatttaatttgcagttgtaaataaatacctaaatttataattttgaaacttttgtatgtatatgtctattaaatattaagtaaattgcctcgtggcaattcctgattggtccaagtcattaannnnnnnnnnnttttaaaaaaaattagtttaaatacacc

SEQ ID NO: 134988 - DNA, 943 bp, Cannabis sativa
accttttctgtctaaataccttggtgtgccccaatgctttggtaggtctaagaaaaacagtttcaacttcatcttggatcgtgttagctctaaccttagagtttggaatcgcaagtttttctctagagcagggaaagaagtactcttaaaagctgttattcaggcaattccctcctatgccatgtcttgttacaaactcccagtttccatctgtcgtaaaattgagagtcttatggctcagttttggtggggatcttttgggaatcaagctaaggctcattggaaatcctgggtttcactgtgtcaatcaaaattctttggggggttgggttttagatccttaatacatcacaaccaagctttgttagctaaacaagcttggagagtccttaccaccccggattctattgctgctcaaattcttaaagccaggtattttagacactcttcttttttagatgccagtaagggtcattcaccttcttactcctggactagtcttctctggggtagagatcttcttaaaaatgggctcatttggaaagttggtaatggtcagaatattcgtaccctgcaggacacttggattcctaatctcaggatccttagatgtaaagatagtgcatctcttccttctgaaagagttagcttctttattaaggataatggcacttgggatttaaatcaattatcaaattattttgaccatgacactgttgaaagcattcttcatgttcctattggcggtcatgacaaagcagattgtctcatttggaaaggagattcctcgggtctccttacagtgaaatctgcctatcatctagccaatacctcctccttacctccttcctcttctaatactagtttttataatcgatggtggaaatttttctggaatcaaaaactccctcctaaaatcaaaaattttggatggcgtaccttt

SEQ ID NO: 134989 - DNA, 1082 bp, Cannabis sativa
  modified_base (393)..(395): a, c, t, g, unknown or other
cattaaactttctacagctcttctcattatattatttgattggttgtcgaaaacctcggtcaacattttggtgttttcattgagagcttaggaaagtgtctttaaacagacaacaatttgagaagttagatcaacaatggtggaaactcgcaataatacacgtcagccctatcctcctcaggatgctcaaaacccagaggacgaagaagtagcctcaagagtgaacgtgggctctgaggagcgagatgaggccaacaacaaagaatacgaagataagtttgacaagtatgacatctacaacgaaggtagctatacagagttactggtcttgaggcaaaaggctacttatcatgaagccgagatcgcagcccaaaaagagcagaatagaaaaannnaagaggtgatggtcgccatgcaaaaagccatggagactgcagggattcacatacaccctaaggccattccagcaggactcaaagaaacaccggaagagtcctcacaaagcactcagaaacctaagatgagggaaccaaggcctatacggtacccttctgaggaaaaccatgggaaaaatccaacttcaatccccgggagaaagaaaaaggtgtaggattcaaagaaattctctcagatttcccaaaagggaaaggtccgcagaggggaaagctccctaaagcgagtcttggccctcaggatcgagaggaccgataaagcgtatccgtgcaccagaagcccagagagagaggaaggaaaaagcagagataccctccagttgacccaagacaaaaaatcaacgaaaaatacggtgatctacgagatcatctagacaaaaagaaacacgcatcagcagtctctgcgggaacactaaatgaagaaattctagctgagttggcaacgctacgcaaacacattgctagggtctgctggaggcagaaaggggacgactcagattgcgattgcgaggattgggagccatgcgcccgacatattgtaacgccctgtccaacagggacgccacgtgtgtgcaatttaataaaatactgatatttatataatatgtaattatactaaaagtgtgggta

SEQ ID NO: 134990 - DNA, 690 bp, Cannabis sativa
ataaagatctaataataataaaatagactgaaaactaaaattaatataaagcttattgatccaaccaattatcacagtggaatcactattaataatggagatattgaaaccaaactgatgcgcaagaaccaagcccagacgaatggcaagcagctccgccacattagtagagaaatcacctagcacacctgatgaccaccccaaccgaaccacaccttctgcatcccgtatcactcccccggtccaacaaagccccaccttagaattaccgaagcatccatcgctagagcaaaggattcaggaggaggtggcatccatcgagtagctcagtttacaactaggttcacatggcccagtcccaatgaaggcctctttgatcatactccttaaactcttccaaatggttaattggttaaaggtctggaataataatctaatcttgattgcttgttgccaaataatattgagttcatatcataccacagccaccaaaaggttgtcatcatcaattcaaaagcctcacgggatagcctatcatagagtaataggagaatttcctacattggcccatatgcacatcgacagagcatcgaccacccctaaccgatgccacactggaatcaaaccagaatagaaaaatagagcatgctcgggagtttcagcttcttctccacaccgagaacagtaaag

SEQ ID NO: 134991 - DNA, 781 bp, Cannabis sativa
ccagtcaataccatatacttgctaacagcaactatagtatatgttgtatctggtatggtactcagcatgaaatacatcttcgaactaatcccattagagttgaggatcttactcatatcctccaactctttatttgtcttactgaatttttctttatgtctaaagggccacatatgtttcacaacactctttcccttgggttttggaacacaaacccaagtcttctctttactcaaagagtttgtctcttcatccatagcacaattccacttcttagcattcttgcacttcataccttctccccaactttctggtttgttcttctgtccttgcaaagcactcaacagtgcataggcaatgtctttattccaaatgtttaagctatacttaggattctgtctaggtactctttcaactttgtctttagtcaactggtagtcctccaagtcctctgcctgactttctctcaggtttccttgttccatatgaacgatgtgctctccctgttccacctgaaaagtgttttctccctgttccacctgaacaatgtcttctcccttttccacctgaacagtgttttctccctgttacacctgaacagtgtcttctccctgttccaccttttaacagtgttctcttcctgttacacctgaacagtgttctctccttgttcatcacttggattagtatgtcttagatcaaagtggattgagttacctgcatcattagtactagggcaagaacctaaaacatttgggttagtagcaatgcatggaaaaat

SEQ ID NO: 134992 - DNA, 597 bp, Cannabis sativa
tttaagcctattaacttgttgtcccgaccaagcacaaaattgttcaaggcaatgctaaacgcctttagcctccctcacattggctctacccacaaggattaagtcatccccaaaaaatatgtgggataggaccgagccccctgctaagtcgtataccaagaatctcacctgtatctagagcattcattagcagccttgaaagaacctcagctgcccaaataaagagatagggggagagaaggtctccctggcggagaccacaggtcggcttaattgacccaaccttgcctccatccagacaaatattgagagtggtgatggataaacactgtgatatccaccaccgaaactgctaaggaatcccatagcaagagaggacatggtcaataaatctccagctcagccgatcgtacgcgtttaccagatcaatttttatagcaaaaaatccctccttgcccttctttctattgaacgagtggattatctcttgcacaaacgcggcttgggtacgacaaatgattgtcgatagaagaggtttaattctatttgcaatgatcttggatatgaccttataaagtgttggaaatttattttacc

SEQ ID NO: 134993 - DNA, 777 bp, Cannabis sativa
  modified_base (468)..(470): a, c, t, g, unknown or other
tgtgggaagggcattttggtctttttctccactttttaatttgtcctttagtgtgatttttaatttattttaaatcaggtttgattattaatgagctcagttaatttttaaaacaaaaatcattatttcttttatttcaaaatttggaaaggaagctcatctctctctcgttcaagctctctctgatttgaacccctagaccagctagggtttgagttttcttcagcaattccaagtgggttctagctagtttctagtgtatccaagccaaggtaaagtctcttgtagctttctctttgatttcttatttttgaagaaatgaattatgcatgtttttgggattttagttgctgttcttgttgctagtgtttgattgtgttctctgtagttaaattatgtttagttatgttggtttgagctggtttcggtggttatttattagtttaaccaagctttgagttttagaannnaaacttggagctttaatggcatttcttgtttctgagtttaggaattggttttgttgcttggaaaatgatctttaggatgcttagaacaggtctggaaggtttcatgtgaattggggttgttttggttgaaatatggaatttttggtcattcctgtactgaactggaattcgggttcagagggacctgtaggaaccgaaattccggatggtccccaggaaacctcgcagaaccggaattccggttggggcagttttgggaaccttagtttttcccatttttgagatttttagggtattgccatgttat

SEQ ID NO: 134994 - DNA, 692 bp, Cannabis sativa
  modified_base (629)..(635): a, c, t, g, unknown or other
ttcagcccattcggtaatagcctaatcctcgtatttgtattgtcttaagaacaagtaaaaatgttctttttcttatagctcttacaacagtatctctgaatacgaattcttagataatatctctagggtaaaatctcgaccctttccccagtgagtatgcatcactatttataggactgtgaacttggagaggaagtgtttcccttctcgttacaatggatataagtagaaagatcgcatgataaatgcagaatacactgatcgtgggatttgggcagcttgtcatatctttgtaatctgatccctaagttatagggatttctttgatgactcacaatgcgaaagctgaatttgctaagtgttggttgctctgcgcggattgctgatcgctctgcttcgggcatgcctacgaggcatcctgttcggactgtaccctccgggcagataatgaaagttgatgccacgtgtcaccatcatgcgatgccacgtcagagcgtaaaaattgggataacatttgcccccaaagtctgtacgggacttccgaagtggcgtgtagacttcatccgagctgcttctgccttaagatggggacacgtgtcaagcacgactgtccgagactcgatgtgagnnnnnnngggcgtcccttcggttttcggctaataaatgctctgacaatcaatatttcaaaatcc

SEQ ID NO: 134995 - DNA, 798 bp, Cannabis sativa
atagctcattgtctagccgaaggacatgatttgtcaaatcataaactgttaaaactagcgagcaatatgagacaaaactgttctcgaaaatttagataataaagttataacattctcaaataacgcacccaacgagttagagctttagcttgtgtcactgaatacacaccaactcattaacatatcaagaatggtcccccaaaaaatatctacaaaataaaataagataaaaaaatgaattaatcccctaacacatatataatatgcatgaataaaaaaacaactaaaaaaataattgttcaacaaaaaaattctgaaaaccatttaaaaaaaaataaaagacaacataaaaataacaaaacaaatgcacatatatacaataaaaaaaacggtctaaaattaactaacaaaatgtataccataaaaaatgcatataaactaaacaactgtacaataaaataacacagaaaaataactataaatcaatatacaacacctaaataataacataaaataactataaaataacaaaatgatagctataaatcaacagaaaaataataagacgttaacctcgttaaaatatacaaattaatcataaatcaactctgaataaactataaaatatctaaaaaaaaatacggtttttattaattatgtaaaagagagaaagatatatgagaaatgctcttattttatttgtaagagaaagaaagagtatttagaaaaatataaaaaaatatgtgaaagtaaaacaatcttattttagtaaaggttaaaagaaaattaattaagatt

SEQ ID NO: 134996 - DNA, 1224 bp, Cannabis sativa
  modified_base (834)..(839): a, c, t, g, unknown or other
attatacatatgtgcccacaataggattttaattcaacattttattctcataagtaatggtcttgcaattaattggaggcgtttaatgaatgattccgccagaccattttgtgtatgtacatgagcaacaagatattttacttttatccatattgacatacaataatcattaaaagcccgtgatatagatttaccaacattatcaagacatattttcttgattgcatagtttggaaattgtgctcataatcgaattatttgagcaagaaatcttgcaaatattacactacgagtaggtaataagcaaatatatgactatctagttgatgcatctaataatactataaaatatctgaacggttcacatggtgggtaaataggcccacatatgtcgccctatattcattcaagaagtctaagggattcaattctaacttttattagtgatggcttaatggttaactttctttgagaacaagcaacacatactcattggataatagaatcttctagttttttaatggataatcatgtgagttctcttattctacgcatcatgattgaacctagatagcctaatcgttcatgttaaacaataaatgattttttttagtttatgaacttctcattcataataatatgagttgttattgtacttatacgtgtaacatataaacttgaagacaaactaagtaatttttttaatatgcacttttttcttgaaacaatagatgtaatgcaaacatactcaatattattttgatcatatattttctcaatatgatatccattacgacgtatatctttgaaacttaacagattcctttttgattnnnnnnataataaggcatcatctataataatttttgttcctctaggcatcaatataatgctctttcggagccttcaattaaacttgtagtgcctgatattgtattaatatttgccttcatttttgataaatttaaaaatttatcacttctaagtattgtatgaatagttgtgctatccgtcaaacatatatcctcaccattatttgtagaatcatgtataagatgacaaatgtccattacttaattaaccaacaaaaaaaacataataagtttaaaatataaatacttaaacaatacaatttcattacataaacatcgcaaataaaataaataccttaaagtaaataaataataatataaaaataagaaaaacataacaaagaaaagtgat

SEQ ID NO: 134997 - DNA, 1198 bp, Cannabis sativa
tcttgatacaacttcaaaacatcttgagcaacagtcattcaagaagggatctcaaatctaggttggagagtttcacaaatcttttgaaaccttcaccctcaacatgtcgaaatagttactcatctaacacaatatattgtgtgagggtggtcctacaagattctttgttataggccacaactattaaatttgtttccccctccttgccacccttaagaggcttaaaacttaaaatcttctatttttcatctttatttttgagtagactaagctcacacacttttttcaaatgactccatagatgactagtcccatgtttcttagggtcataatgaaaatcactcccacaattattgctcatacacttagaaacacgaggttgaggttcttcatcatcatcctctgtagctcggggaggattgtcttctttagggaaatgaggccaaacatcaaactttcccttcttcttaggaataggcacagtaggaggtctaccccttttttttagtacccttacccttatcagtagcattatcattattcataggattttcatcgagaggaggtgtttgagattattttaccaagatctagatttacttacacgtatgttatttaacacactaaatatgaattctctaaattaatataattaaacacatataaagtttagaaaaacttacattggtagcagtggaataatatgtctccttttgctcagatctctaacccttgttcttttctgtcgtagagtattattaagatctgagcccaattctccttcaggtgttggatatagtcttccacactatgattaagtacttgacttgctatgagttggcatgtactatttcactataagggacgaaatttatgaagagaaagagagaaggagattcgaattctatagaaggaggctctcaagtttctagttgtctgacaaagttagaaaactaggttattaggtttgatgagaatgagaaccatcttattccttatataggatttctcctagggttagatttaaattatatgtaattaaaaaggataaaattggctaaaaaaaactccttaagtggccgaccatacaatgggcctaagtagttagagttttgtcattttatttaacaatttatcttttctttcactaatgccatattttccaatttcaatactttaaatgtcaaaactatttatt

SEQ ID NO: 134998 - DNA, 772 bp, Cannabis sativa
  modified_base (308)..(320): a, c, t, g, unknown or other
atattatattatattattagatatttaattaatttaaattatttaaataaactgaaaatttaaaaattagttagatatttgaatttcaattagagtttgggatttttaggagatttgttagattttaaatattttctaacaacctaaattttaaattgtagttaagatatattttaaatattttaattttaaaatagaaatatcttagcctactttccattatttgttacatgtttgtaatgtttatttaattattcaaaaaaaaatttacaaacctattatttatttgatctaaattgctataattnnnnnnnnnnnnnatccaatgatctgattttaatcattgttatcctaatttctgcactctgacatggcatcacacgatggtgacacgtggaatcaactttgtgtacctgctcgcaagagatatcccgaacagggcaccacatatattcgctcggacgaagccttcttaaccgggcagtgagcaatccaaacaacacgccaacacttagcaatttcagcttttgtatcgtgagtcactgaagaaatccctataattttgggatcagatcacagagatagggcaagctctctgaatcccatgattagtgtattctgtatttgatatgcaatctttccaattatatcaattgtactcaaaagggaaattcttctctctcaagcttatagccctataaatagtgattcatactcactgggcaaagggtcgaaaaacttgtctaagaatttatattcagagatactattg

SEQ ID NO: 134999 - DNA, 1592 bp, Cannabis sativa
  modified_base (1534)..(1549): a, c, t, g, unknown or other
gtatctgcgtcacattaattgtcagaatattttgacaattaatttaggaaatcaaatcgggtaatgaatatagaaatctaactatatatagaatattacatgatttattttgtctagattcaatgaatataaaatatttatttatcagaaaatcaattatttattttatttccttaaatagaaaatttatttctatatataaaatattcttatatgctagtgttgggaaaactaagtgtaattaatcacaatttttcttttctatatgtcaaaaataagatacttatctgacccagtgtatcgccttgggaagctccgattgtgtttgtgaaaaaaaggatggttctcttagaatgtgtattgattatcgggaattgagcaagctgacgattaagaacaagtacccgttgcccagaattgatgatttgtttgatcagcttcagggaaagattttgtttttgaagattgatatgtgatccggttatcatcagctcagaattcgggaagaagacataccaaagaatgcatttcgaaccagatatggacactatgagtttttggtaatgtcattcgaattgacaaatgctccagtaacctttatggatctcatgaatagactattcaaggatttcctcgataattgcattatagtgtttatcgttgacatcctcgtatactctccatcagaagaggagcatgagcatcatctacgaatggtattacagcaactcaaggagcataaattgtatgcaaaattcaaaaagtgtgaattctggttgtcagaggtatcttttcttgggcattttgtcgaaaaagattgaattatggttgacccgagaaagattgaatcagtgaaaaattggccgaggccaaagtctgtgatagaagtgcgaagttttctcggtttcgcagggtattgtcaacgttttgtcgaaggattctttaagatttctatgccattaaccgagttaaccaagaagaatcaacagttcatatggtcagacaagtgtgaggtaagttttcaggaattaaaacaacgatagataacagcactggtgttagctttgccattagatcgagaaaagtttgttttttattgtgacgcatccaaacaggatctgggatgtgttctgatgcaagctgacaaagttatagcctatgcctcacgtcaactgaaggattatgagcagctctatccaacgcatgatttagagtttgctgttgtagtatttgttctaaaaatatggcaacactacctttatggtgaaaaatgcgagatttacactgatcataagagtctcaagtactttttcatccagaaagatttaaatatgaggcagagatggtggctagaattggttaaagagtacgactgtgagattctgtatcacccaatgttgtggcagatgcactgagtagaagaggtctcgggcaggttttcaccactgtaatgatagctcctcaactagcctcagagatagttaatactgggatcgagtttgtagttggaaagtgttagaattattttaccagnnnnnnnnnnnnnnnnacaagtatgttgattaacatcttaaatatgaacttctaaaacg

SEQ ID NO: 135000 - DNA, 961 bp, Cannabis sativa
  modified_base (72)..(78): a, c, t, g, unknown or other
  modified_base (127)..(143): a, c, t, g, unknown or other
  modified_base (789)..(790): a, c, t, g, unknown or other
tcttagtggaaggagacattatgttcccctgtaagcactgtaaggtttatgatactttatatgtgtttattnnnnnnngttttagaagttcatgtttaggaagttaataacatacttgttagtaaannnnnnnnnnnnnnnnntaattccaacaactggcctcaaagacatggtaattgatttactttcaagaaatttggacttaaaaggatatatgtttgatttggatgtgattcatgttgatctatgtgtttttgatgattgtttgatgtttgcaaatttgttacgaaaaacaatttgaattcttttctggaattatttttgttggatagcttggaaaaaattaagcaatttacttttttacagaacacaattttgatttaatttgaattagttatgattttttgagattttgaaaaaggataggggtggtgtcaccccatacgcgcgcggatttgagtgatcactcggccacgcgcgcctcagacatgaggttggccgagttttctcaatctgaagcctcaattttttctgaatgctgggcctccgcgcggggtcgaggctgctggcagcgtctctggccgaggtttctcggccatgctcaccttcctgcacgcggactgcataccatctgcatcaaatcaattttttttttttcaattttcttcatattttcatgctttttcatggaatggatttcgaattttttgtgtaattatattttaatttttcatatttcaaatctaattatcagaatgatattaattagtattttttaaattaatttannatattagtgaaatttgaagcttgaaaataggtaaaaattaatctttttgcttaattaatcatctaattttttataaaatttgattatattatcttatttttaaatttaaagtcagatatttaatattttaaattatttaattttttttaaaatgaccttatttgaaattta

SEQ ID NO: 135001 - DNA, 1085 bp, Cannabis sativa
atatatatatgatatgacacaaatactaattattattattattcacaaaaaaataagtaaagtttaaaaatactaattattatttatttatttatttattttttgtggggagctataccaattattatacaacacagagactttttttaatcttctttaactcagcaaaaaaataataaaaaaaaacatttcttttatctttattaacacgttagaacatacaatctctttctatcaagatacatatgtattagatgcaaatacaactaactaataagattaatttacatttctacccctaaaagatgacttaatttcaaataaataaaaataaaaataaaatattatttttctgacaacaaattgccatcaagttattaaaccgactctagcaagttatattacctactgctacaatttaattttatttgtctcatatgaggaatgtgaaacctcaaactcaagtgaggttttacattaagcccctattattatttatttattacagaatatgtgtaaccaggacttaataattgtattatacttattaattaataccttgtagatgacgtggcttgtaatcactcgagtaattctatttctcatcaatttatttatatgtatttaccactttttctgtatttaccattgtattttgtacaactttttttattattatattattattatttattacaaaatatagaataatacattgtagatgacgtgaactgtaattactcaaactaattttacagtgattgattctattcctcatcaatttatttctatatttataataagtaatcctcatcacaacaattttttttaccgttgtattttattattatattattatttattacagaataaggaaacaaggtataaccaggacttaattgtattgtacttattaattaatacgttgtagatgacgtggcttgtaatcactcaagctcatttaacaatgattccatttctcatcagtaagtatttctattaaaacatagcgtattccttatgtgagagtatcacttttgctcttacaagtaaaagcattttttttatagcctttaatttttaat

SEQ ID NO: 135002 - DNA, 874 bp, Cannabis sativa
  modified_base (736)..(738): a, c, t, g, unknown or other
tcgatttcctttatgtttactttggacatttgctttctgaatgcactttcgatttttctgtagaagatatgtaggaaaccctaagtttagaaactctgcgattttccttttttacggttcatgcaatttcatcgtccgtaatgcttgatttttgaactgcattatgcctgtctttcatcttgcttattctaagcatcatgaaattttttgccctaactcgcaaaaatttcaaacttcctgagttttgacttttcgttgaatattcttattctttaatctgttgcgtactcctggtcgacatatttgcccattttaacgttcaatatcccgaccaaacactcatcttgtgcgttgtcttttgtagatgaacccaggtgagttttgggaaagcgaacaccaaatcgaccaggatttgcttcaactcttgcacgaggatcatcaccgtcttcattctagtccaacttctttgagtgacagacattcttcgttaaatcttttgtcgagccataggtgatggctcgtaccaaaaagacaatgcgtagggttgacgcatccgacccacaagtggctcggcacgccaccttacccatcgccgaacaagatccaaccgtccaggaggaggaggatcataaaggggacgctgaggtccaggagatcgagaagcaggacgatgtccgtcctagcagtccctctgaggcgaaggaagaggaggaggttgcaccccaaaactatgggnnntacaatgaggctggggagccagttgatgctcatggcaacgtcctggttgagggcgttgactacgccagtgaggaacttgttggaattaattttaccaagatcttagatctactcacaaatatgttgatttaacaac

SEQ ID NO: 135003 - DNA, 633 bp, Cannabis sativa
tatgtcacgtcttcaaccctctttcccaaaatggaagaataacttgaagtctgtcttattccctgtgatgctttaaccctttgatcttttcaagcaaagtcatcgcttgaatttttaagcaactttagccttccttcgtggaagccgaaattcaacatgactcttgcatgcacgttgttttttgtgcaagaaagatcactgggggtatggcacgtcttcaaccctctttcctgaaatggaaggactgcctaaagtctgttttattccccatgatgctttgatcctttgatcttttcaagcaaagtcattgcttgaatttttaagcaactttagccttcctttgcggatgccaaagcttgcttcataaaaattcaacatgactctcgcaggcacgttgtctttcgtccaagaaagatcaatgtggtatggcatgtcttcaaccctctttcctgaaatggaaggactggttgaagtctgtcttattgcctgtgatgctttcaccctttgatcttttcaatgaagtcatcgcttgaatttttattaaactacagccttctttcgcaaaagttgaagctcgcttcataaaaattcgacatgactcttgctgtaacaccctaactaacataggcgcat

SEQ ID NO: 135004 - DNA, 711 bp, Cannabis sativa
  modified_base (50)..(58): a, c, t, g, unknown or other
atgcaaacataaatcacttcaaatctcttatattgataactaatcagatnnnnnnnnnttttatttagggcactaaacccaataaatgtgacagcctttaagtcatacaaggctagtcggcctagccttacattaaaggctgaaggaacatctaataccaggaattgtaccatgatagtcatgcttgtcggagcttgtccaacagtgattggtagacagatttgtcctagaggtgcgactccttggccaaagaaaccatagacaagaaagagacatggggttagatccttgagctggagtcccatattttcataagcagttttgaacaagatattggaagaggctctgttatcaatcatggttctggccaccattttattagctatttggacctccaggaccaacgggtctttgtgtggattcctgatttttacagcatcttcatcgttaaggttatggtaggccctcctgcccgtgggattttgggcttcctttcttctacggccaggatcacttcctcttacttgtgctgcgccgttcgagcatacctctccagagctttgtccaaatctccatctatgtgcggacctccaacaatgacttgcagatgtccgtctaccagtgttggtagtaagtcttgattattgtcgttcctctgactctgatcggtcttgacatacttctgtaagtgtgggttatttttccttatca

SEQ ID NO: 135005 - DNA, 837 bp, Cannabis sativa
gctaaagggagttcactacttggtgtgtttcagagatcagattagcaaggtggattacaaagggttgtggcaaatcactagagggagtctaaatttgtttaagtcaattgctttcgtaaactttgatgctttactaattgatttcattctctgggcgtggccccgtggactagtagtgtttgaaagaacactgataccacgtacaaatttcttgcgtcaaatgatttaattttctgtagttattttaatattttgcttgttctgttttgtctctgcaaaattggtctttgcagtaacagaattacattctgctgctgcagacgtatacaattttatatttcgtatatttctgtaataattattggcatttgcaaaaactcggtttttcaaatggtataaatatttaattttaccttaattttgttactaggttagctaataataaaacagttcttccaataattaaactggtgatctttttattgtgttgtagctacaaaataatagtggtaattatgtttggggagctttatttgcaccccataaagttataagtacaccccattttaattatttttattttatataaaatatatatttttaatttgtactaattttcgttaaatttttttcttccttcttatatatttgaaaaatatacctataaaataaacataaaatatattttaaatattaagataaaaaattaaaataaaaaattatatgaaattttattagaattttttttttaaaaaaaaatcatacatgatttttaaaaaaaatgtgaaaaaaaccaaattaactattgttgctccagaattcgcccaaaatacgtgg

SEQ ID NO: 135006 - DNA, 546 bp, Cannabis sativa
  modified_base (94)..(99): a, c, t, g, unknown or other
attccattggaatgccatttcaatactttaaaatgcaactaaacaaaggaatggaatgaaaattattttctttccattccattccatttcattnnnnnnaaccaaacgccacctaagttcatgctttattcacttgtattgagatttgttctttttgtaactaccgaaataattatttaaataccacgttgtgcatgttttttcatgtgtaaataatatggcacctttctatgcttgctttcgtgatgagaaagaatagtttgcctaattctcgtgaggacaaaaaaaagtgggaattgagcattattttttgtgaatttttattttttaagttataagtttgtaaaaatatatttattttttctgatttttttaggaaaaaagttaaaaaaaatggaaaaaatagtataaggtaactagttaccctaaaggtacatggttacctttgtgatttttccacacatttcaatttttttttttttgaatttttctaataaaatagtattttttttttttaaaaaaaaaaaacatatttttgcaaaaata

SEQ ID NO: 135007 - DNA, 595 bp, Cannabis sativa
cagccataactcactcaatattgaactaattgacatgattcaatttgtgcttcgaagcaatttcaatgctatatcaagtcatgtctcacacttcaattgcaattctaaagctatcgaccccaaatttcatccaaagtgagttatgtaaataagctccaacttacccggagcgggtcccagcgttgcgacccagactctgaaaatcgacgatcaactctagaagttaatttttatcgttagacatcatctacggtcaaaaatattcaaattttattttttactatttttgtgggcctccttcacctataaaagtagagctcccttagttcatttttcagattcagttcagaaaacaaaactaccaaactacccacaaacccacaaggttacaaggttagaaggttagagtttctctctctagaaattagagctttgacacttagactttttctataataccatctcgttagaaataaaaactcaaagtagacatagctccaatactatcatgatacagggagtgaactattataaatctgttgggtctctcttataattacttaacaactatttcattcttgccaatctagctagc

SEQ ID NO: 135008 - DNA, 1079 bp, Cannabis sativa
  modified_base (223)..(225): a, c, t, g, unknown or other
tatatatatatttatatatatctctctctcacgttttctcttctttttttttttctttgtttttttaatgaagattgttttatatacatctcttttacacactatttcttcttcttcttcttcttttttttgaatgaagattctccatctatctctaatcctatttatttttttctctttttttcttttatttgctttaagtttaagtaactattaatttttnnngtatgcatgacacctcaacagtaatcaataaatagcatcaagacctcaattttcaatatttctctataatttagaaacatacagattttttttatatcaacaacttcactgtcatcgatgtcttcgaattattcatgatttactcattagtatgaattatttgatgtaaaaaaataattttttaatgataaattcataaaaagtgatatttagtacttttttttcataaaaaagatattttaaatcaaattatatatataaatgtacatatagatatgtttttttctaaaaaagataattttagtttatgatttataaccctaggttgatattatgttttaattatataattataattatgatttatttcacatgtatatataattatgatttgttttaattatatatataatttttgtttttcgtttcttaattatagaccatgtttcaataccttcatctatttttttcttaattctctaattttttacttttttattaccttttttttaaaaaaaaaaaaactccaattaagctaataataataataataaaaataaaaatatctaactaaaagaaattatatcaacataagacacaatattttttctttcagatttacatacatatataccttctaagttttacttttttcaatatatatatttaataccttaataataaatataagaattaacccatatactattttttttaattttttttttcaaattaacggtttgggttgctgcggtggtttcaatgtgggttgctatatagattttggttgcgatttagattgctccgttagttattataagagtttctgtgtgaaatttcgtaaaaaaaaaaaa

SEQ ID NO: 135009 - DNA, 1030 bp, Cannabis sativa
aaactaagcggtctttacacttatcgattgagcagcaggataagagtaggtggcatgatccaaatctgattactgaggctttcttggacttctataaagggctattaggttcaaaaatggagaatagaagatctgttgaggatagaatttggctagaggacctgttgtgacaccagaataggctagcatgcttctgcagggatttaccagagaagaagtgaaaaaaggctatttatagtatcctttggaacaaatctcctggacctgatggatttttcagtagctattttcaagataattgggagattatagaagatgacatatgtgaagttgttttatcctttttggagttaggtaaaattcttaaagaaattaattccctaattattactctggttcccaagattaaatgccctaattctattaaggattttaggccaattgcttgttgcaatgctatttataaggttgcaaccaagcttttgagttttagaatcagaaacatcctacctgagataatatcccactcccaatgtggttttatcaaaggtagatttatagggcacaatataatgatatgccaagatttggtgaggcattatagtaggaaatctaacaagccaagttgtatgatcaagttagatctccaaaaagcgtatgacacaattcagtggggtttcctagaggagatgctggcaggtttaaaatttcccagaccttttatacagttaattatgaattgtatcaaaacccctaagttctctcttatgtttaatggaaccttacatggtttttttgaatctaagaaaggacttaggcaaggggatcccatgtcccccctgctatttattttgggtatggaatatctttctaggctaatgaggaagattggagagaaagaagatttccaataccatgacaggtgctctgatcttaaattgaaccatttagcatttgctgacgatgtgctactgttttgtaatcatgttgcaggctttaaagctattttcacttacatctgggctgcaac

SEQ ID NO: 135010 - DNA, 506 bp, Cannabis sativa
gagtaatggtttcagtttccacccggcaaagaggacagagagagcttacctccacatgtttagtccgaagttatatcattgtcggaaggcatcccaccgccgcacgccacatcaagtttttgatctcgggtggtaactttaagctccaaagtttactccaaaagttattatcattagtctcgtaccaaccacctttaagtttttggagtaaattataagcacttttgaccgtataaaaacccgaggtctctttagaccaaacaaagtgatcttccaagttgttgtcgttcaaaggaatggacatgatcaaatgtttgtctctatcaacaaagagatcatcaagaacctcttcatcccacctcgagccatcaagagttaggaggttacgtaccttagcaactgaaagagcaggatgatccgaaatgacaaaaggattaacttcatctggcaaccaaggagagtgaagtattggaatgttattacccgatccaatacaccaacgaact

SEQ ID NO: 135011 - DNA, 962 bp, Cannabis sativa
atgattatgattatgattatgaattatgaagccaatgatcagtagttgagaaaggaattcataaacttaaaacaaatacagatattgatcaacagagaacaaactcagtagatgttggagagtgataccgccgctgtgtcgccgagaacaatggagattgaggccggagctggagtcaacggtgataatttttgagaaagaataaagtgatgtagacagtctagggtttcgtgaaaagtaaataatgcaattagaaaatcttaaggagattatattcacaccccctaaaaattataaatacacttcattactaaatttatcctattaaaaattattttttataattacacctcattttatttaccaaaagagtattatttaatacactccaatatttattttttttttcaaattattaaaataagaaaatccctctcaaagaacggaaagattccgtcctcttaattccccaaataattattaaaagttatcccattcaaaaaaaaaaattattgaaagttattttgctactggggtgagcttgactgtagaaagaaattgtactagacaacaagaattttctgcattttgattaggtttgcatcccttaaaaacaattttttttttgtctatatcgtgaagtgggaatcatatggattctaatagaaatcaattttaaatttttgattatgattttgccacatacttcgaactagtgttgatcataggttagcattttatacatgaaaaattgtaattggttgggtagtagccggtgctattcatcttagaattatgcctattgttataatttagtctctaaaattctcatttatttttttgtgtgttgtcatttatatctattctatataaaatgtgcctatataacaaaatttttggtttataagaaatttatgggtaacttttttatttatattaaaaaaaatagttttcacgggtca

SEQ ID NO: 135012 - DNA, 922 bp, Cannabis sativa
aaacaactgtatacaaactaaaatacaggaaaaactctttgaacatcaacatccatgataaatctcattgttacccattgatgatataaaccccaaatacatatgcaaagctcatcatgaccagtttattcataacacttaactaagcaaaactaaaccccaaatacatacaagtaactataggatagataactatgttagcttttcgttgtagttatacaaatctaagttaactctgtttagttatatgtcaaatgttgaatagtccaacacatcacaatagaatcaccctcttgagaatcatctgacactctcacatggttactacattcccattcgtattccatattcctgagccacgtggtatacttctcaaagttgatccacatagttacataattgtataaatatctatacatgaaatacttctactatagctactctaacaaattaaattaacttagaaaacatataaacaaataaacatgagttattattagtaccattaaagttttattgtttcctaaagtaatagaattaacaaacgctcgatcaatagagcttgccgccacggtcaaaatccaaggagcagtgttctgtacagtctgagctgaaggcccgtcgttcccagctccacaaacgacagtaatccctctggccatagcgtgaaacgaccccgttgcgatgccatctcgttcatccacatcggaaaacatgggaatcttaaacccaatcgacagcgacagcacatccactccgtcgtgtatggcctcgtcgaaggctttgagtatatccgccgaagaacactgcccgcccaggaagttccagcacaccttgtatacggccacgcgcgcgtaaggaacagtgtccaacaaagttcatacaaaatatgattattaaaaaactgaaaataaaattaaaa

SEQ ID NO: 135013 - DNA, 663 bp, Cannabis sativa
acatatcacgtagtgtaaatgcagtttgtgatttaaaaatcatatagctgtgattttcccgctttcactagatcaaaacaatcgtgtattaaacacgtctattgctgttgtatccagtgacggagccagaatttcggtttagtgagagcttgaatattttttttaagagtttgaatgaaaattgaatcaaatgatttatttttatttttaaaaaaattgaaatgaaataaaaaaacatgttaaatagagtgttatatatgtacttaggaaaaaaaaatgttgattgttttttgaattttggtgttaaatttgagtggtattaacgaaattagattgaaacagagtgagggcttagtatttacatttatactaaacaaaatcttaaataaagctaactaacatgtatctaatataaaagtttttttatatattataaatttgagtgagggcttaagcctacataatggcttaagtccctccgttcctagttgtatctggagatgtctcgacagaaacttggttccagtgatctcaatagcgagctaggatcattcttccttccgaggttgataatgtatgtttagtgtcgatcgcggttcttatcctcaaagaattcttcgaggctcacttgaatgctatcttctggctcgccaggattgtaag

SEQ ID NO: 135014 - DNA, 594 bp, Cannabis sativa
agaatatgcaggcccaggttatgttgcattgggagaaatgtgcaagccaaaaaaagaagggggctcggctttaggaagattataacttggaacacaagtactactattggaaaatatgtttgggcaatctcatccaaacaagacaacctatgggtgagatggatacatactgtgttcttaaaaggtagagattgatgggattacaaaatcccaccctcagggagttagtatctgaagtgtattggggcttgtcaaagaatcatctcaaagacaccaactttcagacacttataacaggcacttacagcattaataaagtttatcaaatgttggttggaaaccaaccaaaggtccattgggtggatgttttttagaatagactcaatgtaccgaagcatagttttatcctatggctttcggtgctaaaccgtctctaaacaaagactagactgaaaaagttcaatgttgtgatggatgcaaaatgtgtagtatgtgggatgtttgaggaatcaactgaacacttattttttgagtgtacttttagcttgaaatgtctaacagaaatcaaacattggctagcatggagtacaagag

SEQ ID NO: 135015 - DNA, 1069 bp, Cannabis sativa
  modified_base (64)..(68): a, c, t, g, unknown or other
agagagagagagagaagaagagaaagagggagggaattagggtttttttttaatttttattttnnnnnaattgtttttttaatttttaaagacaaagaaaattgtttttttttatttttaaaataattattttttattttttaaaatatttatttacgtggaccaataaaattgtgccacgtggacattccaccatggcagttaacagccaaaaatggatggaaagggctaagtgctaacataacttgggtttagaaggttttaccacaaaaattttagaatttggggttagttgcaaaaacttgaccatttaagaaggttatgccgcaaattactctattaaaaatgactatatgccaagtggttgtggctatggccacaatcacttggcaaggaatccattcacctatcataatgacagctcactctctccagcatgcacttcaatggtgtcaccaccactctctcaagcctcactgtattgaatgtgattgtaaggcacttattgactaaatctgtaataattttgctcacaaccttcacttggagggctttaactttgctattcatagcttctttttttctctttctcgaactactattagttatattcttcgaggggcaaacatagtcgctcactatctagctaagtactctttaggcctagatcaagaaactatatggatagagaatgataaattaccatctaaattgtatactgtactcatgataattttaaatgataccattttcttgagaaatgtaaaagggtacccaaggtgtctagtttctagtgctctaattaggtgtaatattgttattagtacaatttactattaggtctcacttattttactttgataaaaattatagaaaatcactataaaaaacagttacctttagtaacaacttattagtcataacataaatttttttgtgaataaatgtgacttttagacataacaaaacgttacttacgactaaaacataatatttagatacaagttgtcactaatttagttttttgtcataacaaattgtaatttttgtaactaatatttttaaccac

SEQ ID NO: 135016 - DNA, 1166 bp, Cannabis sativa
ttagtcacaacaggaataatgattcataattaggcacaatttttttacttttagtcacaaattttattgtgacaaaaaataaatttttttatagtggtttgaggattatgttgttatttattagtgttcttcaactcttagatcaatctgattcataacagtgaaaagttagtttgatgagttgttaagagtgttcgttagtttttcagtacttacttgttactactctgtatagaagctctattgagctattgatttttttgtaagttcaatccatattctacaaagttcattttttttcaatctctctctacttttctctatctaaagctaataaacctatccaaattatatattaaaactttgaatttaatgtaatataattaaaattatattcaattcttatattttgtgcttatatattcgtttggtagtaaatttacatacttttcacaaagaaaaagctaaaaacctcaatttattattttaaaattaaacatgtggaacaaaaagggaaaaaaagattaataaagcacttgtttatttgtttttctaaaatacaaaatatgtttttactttgagctttgtgtagaataatagataaaaattgacatgtgatccctgaaactcgttatatataatcgatacttgcagatatagacattaatgtttgcactaattaatgaaaagcaaataatagcttatatgattcaaacatgtccaaaaaaacactccttaaatccgtggtacttatgtttccttccctattttattgtaatttctttgtactttgctattttattaattcaaattaactataaattcactttttaaatctataaatataacttgactgcaatttactaattatagctgtttttattcactataaataagaactttttgtgttagtactaatcaataataataaaaacttttaaatcaattatcatcatcatctccaataattattttaaattaataaaatctctaaaaatgtctctaaatcacaaagcttcaataaaaattttgttggtgggacaaattttgatggtgatgatgatgataatgattgctagcacaacttccaaaccattcccaggcaaaaagtcatctcatcataaacattctcacaataaacattctcactttgacttcctcgatac

SEQ ID NO: 135017 - DNA, 774 bp, Cannabis sativa
gttgcaaaatgatatgttattcacattttggtatttgttatgtgaagtagcgcaatgagaatgttctgtattcgatatgttttgtctttaatatgttatgaagacgcaaatttacgaaatttactaagggggctatattatctatttacatttggttaaagtaatgggagttgatatgttttcaacgttgtgtacaaataattgtgaagtatgggttcaatctgaaatttaatatgttgtcaaaactcagtttaaacttcaatgagtacaaagatttggtaagtttggtaagatttggtaactaacatgatcttcttcaaataattaagaagtcacatttgtcgtgatttctaatggtatagtacaaatcataaagttttggggttaaataatttcagtgaagtacaatcatgtaaaaattatatcattaccataacttaaaattgctttgcatcaaattagaatcgatgggtaaaagaaatgagaaatgatgtgttttaaacagtaatgacaaatatttctcaagtatgggttcattgtcaaacttaatatggtgtgagaagtaagtttaaactttaatgtgtacaaagatttgctaagtatggtgcaatttcaaagttaatctgttctgaaaactaaaataaacacaagtctgttaacataataaccaattccaaacgtaaactaataaaaacaaatgtctaaatccaaatgttcccaaatccaaactaaacaacataataataacacaacctactaataacacaacctaat

SEQ ID NO: 135018 - DNA, 986 bp, Cannabis sativa
  modified_base (355)..(359): a, c, t, g, unknown or other
cgaaatctagctacgtgatgcttgagtgacggggtgaaacgtgtagttacgtcaggtcgagccgagcttgcgaggatacgaccgatagggagaggagcgttaacgaccttacggttgtttagcgcacttcgcttattgatgtagttatgtcaggtgaatatctcttctctcccttgccacgatttacttgaatcaggtttttcttcttcattttccctctttatttaaatgtagatactttaaaattttcaattttaaaaattagattaaaattgaaaattaatttattaattaattttaaatcaagtaatttttcattaatgataataaattaaatagactaaaatatattatnnnnnaattagaaaatcaataattagtttatgaaatatctagatagttatttttgagtagacttttggtatttttctagatatatttaattaagaaaattaatatttaagttgatttatttaagatacttaaatattagaaaattttcatgaaatttaattaaatagaaaaaatatattcatgttgaaaattaatttattaattaattttagaccaacataaattaaaataatttttcaagatttattttattttatttttcaggtaaaattcgaaaaatgtattttattaaatacattagattttgaatttaatcatggagcaatggtggtctagaaatcaaacttctttatgcaaaaaatgacatattgcacaaaaacacacaaaaatgttaaaggactacactaagagtttagtgtcccgctctgatatcaattgaaaaactgagtttttgctaatgtcataaatattacaaaaaaaaaaaacagtaaaaatataactgtaacagtctccagcaacagaatgtaagtctgttactgcagaacacaattttgtagaaacaaaccagaaccagaataataaataaaaacatcagaaaattaaatcacttgacacaaaagatttgtacgtgg

SEQ ID NO: 135019 - DNA, 714 bp, Cannabis sativa
ttattttctataatttattttttttaacgtcgatttcactgttcttgcttcatcttgctgaaattaatgattgttttttgggtgttctcgtggtactgtgttggtttatctgtaggtgtggaagatggatgctgtaaaatacattatttcttcttcattctttatggttattttgtgcttattttctgatttaatttagttatcctaaaaatatatttgacgagctcactacaaatttttttttgaggtgtgtggttcttttacatattaagtggttatatgtgcttatcgttttacatttgttgttgtgttgttttagtagtttttttgttctgattttttataagattgggcttgcaaatataactcctattagattgggtattgaggctatgcagaacattttttagtttttttaagcatgttttcctttcttttgtttgaattattttagtgttattttacagttgttttgtcatgattatttatttgacgtcgatttcactttttttttttctcaatctcaccgaaattaatggttgttttttgatgttttggtgttcctgtggtggttctgtccgtggtgtggaagatggaggccttaatttttttttttttgtgtttacagtataaaagaaaaaaaattggccaagacagtataaaagtaatttctgccgtatggcagtatttttgtaaagattgggccaaaagtta

SEQ ID NO: 135020 - DNA, 674 bp, Cannabis sativa
aggcttacccatatgtgtatttttggagcatgttgctcggatggaattgttatgagcctagcttgttgagctcagtgggagttttactattatgtatcagacatgctaatattttgtatgaaatgcttatgacttttattttgaacatgcataatgatgttgtagtcacttctagttattattgttatatgtatgcatgtatgtgttgtttactgaagtgacaggtgcaataggagatgaatgcgcatagtctcaattttgttgtacctcatgcatgtttgatttgattattaatgattgttattggattaaatatcttcaaggtcaattcatacataatatatgtatcctgtcaatatgatattatgtacgttttaattggttaccttatttgtggtagacaatgttatggtggcttgattgtattgtccaagtgggagaatattgaaattattataattgactaatacattcataagtttaattccataatactcaatcattaattatgtgcctaatattttactaataaccataatggaatggttaataaattaattatgtgctagaggcacattagagcacccttaatattataatcggcccattaaattatagtataccataaaagaccacttaagccctattagtgaataaccccttagggttataag

SEQ ID NO: 135021 - DNA, 1039 bp, Cannabis sativa
aattcaaaattcttgtaataaccgtcagccactgcttggctttcatcacattgggacctcccaaaaagactggaggtgcctgcttgcggaacctttcatacaatggctccacccgattcactacaaaaatcggccctgcttgcacagtaggggcaggagccacctgcatttctggagtaggcattgcaggagcaccctgctgccttaagcgtctaatttcttcttcttgttcgtcgattctggcttgcattgctgcaaacatttttttcccattcctgggccgcctgcggtgggttaacatctccccgactgcgtgccctgcctctagggcctctacctcagccatgaacattttggggaatctaagctccctgaccgccactagatccgaccgagttaccctaactcctagtgtttcgcctggcgtctattctattagaacatcctgcaaaactaagagctagcctggtcagattgcaatcaagaataacttactaattaccgcttattttggaaatttaaaacatgcgcctattcagctatcaggctactaacatgcttcttataaggcttttcttaaaacataccattaaaataaactactaaaataattaaggcttactgaaccgtgagttgagttgatcgctgatgatgattgtacatgtcatgacgatcttcggaagacaacctagctgctctgataccaaattgtaacaccatactagtttaggcgtgataacgtaatttttaacttaattgtacaactcattactaatcaacgaatttattgaaaattatgaataattaaaattttatttaactatttttaaatatcaaataacatacttatataaaatcgggatcccgtttacaaaaaatttataaaagttacacagtgcattgtacaaaagttgtcgcctagcgactatacaaaatatgttcagttgtcccaaagaccgtacgctccaggcctaactgccccgacatgtacaatgtgttgggaatattttaccatgatctaggtttactaacaagtatg

SEQ ID NO: 135022 - DNA, 1881 bp, Cannabis sativa
  modified_base (300)..(303): a, c, t, g, unknown or other
  modified_base (983)..(983): a, c, t, g, unknown or other
aatttattaatagactattcaacagtctaattatcatgacttgtcactttcatgacttgatgaaaactatatatctaggtacatacaaatatatttaaccacttcaagtaataattgtatgtaagacttctttaggaagcttttcaaatgatctttttatgattctttatcactttgattatattagattgtattggatcactaacaaatattatatattcacttttaggaatatgcaaactaaattaaatagtaaatgtatatatatacatatcttgtaccaacaatagtttgaaactnnnnatttcaagaaataataaaatatgtttatattaaattacttctaacattaccaatatatgtaaaatatatattctttgaaatagaatttcatgtctattcctcttcagagaatgatatttaaatattctaaatgtacaataaatttgtgataaactaaaatatatgtacaattcatattttattcaataatcaaatagaattttatcttgattataagtgtgttcgtactacaggtacgtgaccattattattcaatttcatacatgatacatagatttcatgcatcttgattttgtgtggtatgtcatcttatggttgtttccaatttcttttggaaatatttgagtagtaaataatgtcattgattatttaaaattattgcattcactttagggaatgacgttgaacaagtgtaacattattataaatttcttaaaaatttattaattgttcatccataaaaatataagaaattattcagcaatttcttttataatatatgaatataatttttgcataatctttaagatgtatgcaaaattgatctttaatatatgtcacatgcaataatttctaatataaacattataagtaataacaatgtataataacatgacaaattatagaatacgaacactctttaaaagtaattgaattcaattcgtatcattctctgcagngaatgatgaacaataaatacatatctcgtgtatttaaataacatgagtcatgtttattattattcttatactttgatgttacaatgcaattttctgaaattctttttgggtattcaaaactcactataaaattgcattaacaacaatcagcttttaataattctttagttgtattcacataaatacaagatttttgacaaatagaaaataattatttcaggaaatatttgctaaaatctctatcgatattagattatttttcattgtccttaaagaatacaagaacatatatatgaatatatttcatctcctttattatatttcagccaattatatgataaatattatgtttgcataatcttcaggatatatacaatattttattgaggacacatatcataaataaacaataagagatacaatatatatatatgaattcaataataaacatataaaaacatatacatacatatataatatatagatatgtagataaaagaaaaagaaaaaaaagtttttgaaattgtttcagtcagatatgtatctatatataaatatatatttagtgtatcgtgaccttaaaacaatattcaagaactttaacaaaatatttaccttgagacttgggtagagacttgtgctgataacatgttataaaataatataaaatagataagacgaaaaaaagaagatgaagagagaaagagaaactgaatgagaatttcttatttgtttattccaacgggatgaactcatatttatacaaaagtattgagtaaatgaatgtgaaactaaattaatataatcaaggaaaatagaattaagcattaatggtgataattaatatagcaatttaaatatccataaataatatttcataatatgagcaatattattt

SEQ ID NO: 135023 - DNA, 775 bp, Cannabis sativa
ggaaatggagaacttgattaagtaagagataaaagaaaagaaatatttttcccaccaattttttaagggatgtcattaagggtaatgatttatttattttttttttattttttttttatattaaagttttattgtctagctttttgggcatttcttttttatgttagtcataagtcataacgttaatgttgcggcctatagattggtttagcatgcttaggatagacaataagtttttgtagatggaaggaatctcaatttggcctttgagcacttttttctccaacttataacggttacccttacaaaaatatatataatgacaattttgttctttgttctttaaaatataaatatatataatatataatgacaattttgttctttaaaatatgttttacaaaactaggcggaaactacgtgcaaagcacgttgtgtttcattataagttctattttttttacataagatgtttaaatattttaaagtattacattaaatatctaattcataaaatattagttttatgttatttataatttaagatgaagaattagcaacttcttcttgttttgcttcttcaattgagtatacattgaaatttttgtatttttgagtcttcatcttctcttggtcagcataaatttgtagtatccaatttttagttgtcaattcatttataacattttcaatatatttattcttttcttaagaaataaattataaaagttggtattagtttttatttattattttttttagtatataaagaaat

SEQ ID NO: 135024 - DNA, 597 bp, Cannabis sativa
  modified_base (540)..(548): a, c, t, g, unknown or other
tgtaggagtatgtgttttagcttggtagtaagttttataaaacctattattgcttgatctaaatttccatggttaacttgttgacaaatccaatgatctcattttaacctatggtttaattatcaataggtcaagacaataatttgtaacaggtaaattttaccttcttctttcatctatgtatgacctagtaacatgataggatccatcgaaatttttgtgcctgtgtgagcctatatgtttactttagatgcatataggtagttcatttaattttttttttaattaagatgaactaggttgctaaataaaatgtcacaccatgatacattttatttaggcccttttaatttttgcgcatattcaattaatagcagttgttcattttaaggttaaattcctttcttttgggccttctgtgagagttagggggccaatagaagtgggtgcgacatactgaacgcagctctccctcacatgaacaaacccaactatgaaggcccatttgcctgatttgaaaaactgtactaggttaattannnnnnnnnaacctaataaaatttattagcaacgtaattaatttcaaagtaaatggaa

SEQ ID NO: 135025 - DNA, 579 bp, Cannabis sativa
aacacgagtacagggttggtactttagtgcatttggtacagtggtcgtacttccctttaagaacgtttttaatcgtttggtgagctctttgttgagctcagggcggcgtaagcaataagctggcctagcgttgcttatatatatgtcttgcatatcttactgagtctgttgactcatcagttcgctaccttgtgtaggtaaaggaaaagcgaagctggaggaagagtgagatggagctcggcagtgattgtatatatcgtggcagtgcaacctggagggtttcgatctttcaatattttgagttatatcttagttgcctgttgtttgtaaagaaaaaaaatatatatcactagtagactttgtattagtaaaatacttttaaggatgttttgaacttcgggatcccaacccatataattataaagttattatattaataaatttaacttttgagtttagtaaattttaaatacgggcgttacattgttggtgctttatgtaagcgcaatgaccaactaaatgctgctcaagctacaaattgctcatttacttgagattgatgaactagaaagtgggaaa

SEQ ID NO: 135026 - DNA, 906 bp, Cannabis sativa
  modified_base (846)..(849): a, c, t, g, unknown or other
taaatttgagcaatgataaaatcagattttatatgtttgatgaaaagagttttgtctacactaactctttgataattatgagaaattaaaaattgagtttatctttcataccaggcatagggagcctgttccagaccatacaaagctttttctaatttatatacatggtctggaaaatgaggatcttcaaattcatttggttgctcaacataaacttcctcacttaaaatactattcaaaaaggctgatttaacatccatttgatacaatttaatatcaagaatacaagtaatacacaatagcaaacgaatagattctaatcttgctactggagcaaaagtttcatcaaagtcaataccttctacctgtgtatagccttgtgccaccaatcgggccttgttcctcacaattgtatcgaattcatcacttttatttttaaagatccactttgttccaatcacattgataccttttggtctttgaaccaaaatccaaaccttgttgtggacaaattgaagaagttcttcttgcattgcatttagccattcttcataagccatggcttccttcacattttttggttcaaattgtgagacaaaacaaagaaaactaatcaacttaacataccttcttcttgttaccatgctttcttcaagatttccaagaaagagatctttaggatgattcagttttactctggtgattggttccttctggataaaatcagtaatgatgtttgaatgaatcgagataggttgttcttgttcacctgcttcagttacagcggcagattcatcatttatgtcttcaaaattcaattctgctgcatcagaatctacatttgcnnnntctagtggagtatccagaaaactatctatctcagtttctgtgaaaaattctgaaaaa

SEQ ID NO: 135027 - DNA, 920 bp, Cannabis sativa
agcatgcatatgaggtatcctgttcggactatatcttgcgggcagatactcggagtggattccacgtgtcaccatcatgtgttgccacaccatagtgtgaaaattgggattatattttcccccaagtttgtacgggacttccacgttgcatgtagacttcatccgagctgcttctgcatttggatgggtgacacgtggcaagcgcgtctgttcgcgactcgatgtgaggctgattgggcgtcttttcggtttttggctaataaatgctctgacaattaatatttcaaaatttgattttctctcaccacggttgacggctacacttgattacttttcatttcccatattcgcttttaggcgagaaccgaggcgtctgaggttcttttgaaatgattaccccttttcgttatttgcctataaataccagtgagcatttgtctacaaactcattttcaccaaccttccttgctaagtaagttcaaagcgaaaagagagatttagttggcttcaagcttgctgaagtgctttcatcaaaactgctcgtttggcttgacgcaacttgaacccaaatgcttgatttcttgagtaagttctcgatttcttttatgttttctatgcacatttacttttggaatgcacttttgatttcgctgtagaagatatgtaggaaaccctaagtttagaaactctgcgattttctttatcacgattcatgcgatttcatcgttcgtaatgcttactttttgaactgcataatgcctgtctttcatcctgcttattctaagcttcatgagatcttttgccctaactagtaaaaatttcaaacttcctgagttttgacttttcgttgaatattctcattctttaatttgttgagtactcctggtcggcatattttcccattttaacgttcgatatcc

SEQ ID NO: 135028 - DNA, 563 bp, Cannabis sativa
  modified_base (128)..(132): a, c, t, g, unknown or other
  modified_base (195)..(197): a, c, t, g, unknown or other
catacttagttcatctaattgtaacaaaataattaattatttaaaatttattataagagagagttttaatttgtgtaagaagaagtttaatttttgtaaaaatataaattttattgtaaatattatannnnnatagcttaattgttaaaataattagagtaatgatttaaatataaataaaaaaaattatttatnnntattaattgctaaaagaggtcttataaaatatttaattaattattttaaaaaaatagttaattataattaattaattttaaaaatgaaatgtttacttattggtaacctgctattacaggtcgaacaaaaatgtaaccatgatggttacaataaaaatgtaatcatggaataataacctgagatttgttttattattactcttattggactaaaagttacaatatatagaagacggaaacaaactatagaaaatcaaataactaattttcatagttctttattggtttcaataataacaataaggaaaattatatatacagcttgtttggtacgccgtataagagtcgtattgtattaaataataa

SEQ ID NO: 135029 - DNA, 990 bp, Cannabis sativa
gagttcggatcacaaagttatgaaattttgaaaattcaacacaaactgcccaaaaaacacgagggcgggccgtggcatgctccagaccatgccgcgacacctgggaaaaattccctggtccactcaaaggagcgggctaagcatgtcgcggcatctgggtgcagaacccagaaaaccagcagcccctcttcgaattttcagcttccaaaccaaacttttcactccaatttctcaatcaaacatccaaattaacaattaggatcactagcaaattactagatgcataactaatatatttcaagcatcaaaatcccatactaaaccgagaattcagattgcatgctacacaaacacatgcttcaaacgcatcaaaatctgaaattcaagagcatgaactcatcccaactcaaacctattacaattcaggagcatagcaccatttaaaacatgaaattccaacctagaaataccatgtaatcactgcccaagctcaatcacaaaacacacaataaatagaagctcaattccacaagattaacatataacctaacaaaattaagcatccttttcacaacacatgcaagacccaaaatcaaaataacctaagcatgtttctaccacaatatctagcaaggaaagcataaattaaaaccaagaaaactacctcaaacaattgcacaattaagcctcaagcctccaacacctttctttcaaccaacaagcttcaaatcaactagttcttcacaaatttaagctttgaaaatcaaaaggggtaaaagagagggagagggttcggttgagagcgagaagcaaccagaaaatacaattcattttctctcaaaatccattaaattcaatataactcaattatggtcaaatgaccattttgcccttagggttatataacatgcataagtataagtatcacatggcttatgtaaacttggctatcaggtctcccgaggataatagggttccaaaccccgaagc

SEQ ID NO: 135030 - DNA, 924 bp, Cannabis sativa
  modified_base (59)..(63): a, c, t, g, unknown or other
  modified_base (255)..(258): a, c, t, g, unknown or other
caaattttggtagaattttgtatagaatctgaattttcaattaaaaatctaattatgannnnnaaattaattttattaatttttaattaactaaaattaattttagattttagtagcctttgaatttgaaattttgatttttccacaaaaatagtcttatggttaattttgaaacttttgatattttatttattttaattataagattagacattagttattttattatgaaaatttgaaatgatcttattttgnnnntaaaatattaataaaatttagaaagaatcttgttaaaatttaaaaattttctaaccacattagtttttcaaaatttgttattttgtgaaatatattttattaaattaaataataagatttgaaaaatgttatttttgacattttaccttcttagatatttttttttaattaaaattaatttttggcaaaataacatgaaattttgaaaagattgttcatttttgtttgaatagaaattttagggtttctaaccataaaatttttaaacttaagatattttgtttgatttaattattaaataaaatttaacaatatcctaaccatcaaatattttattattcaaattatttatttttgttatatttaattcattaaattataagattagacctataatattagaaatatctaaattttaaattcaagatattatattatgttatcttattagatatttaattaattagaattgtttaaataaactgataatttgaaaatttgttaaatatttgaatttatgttagaatttaggatatttaggtatttgttagattttcaaatatttttcagatattctctagcaacctaaattttaaattctagttaagatatattttaaatattttaattttaaaatagatatatcttaacctactttccagttat

SEQ ID NO: 135031 - DNA, 668 bp, Cannabis sativa
  modified_base (627)..(634): a, c, t, g, unknown or other
tatgtgacataccaattaagcatgtatgcataatcaaaagcaagtcaattagcaaaacacttcaaatttcattttctttttatctaggcatcttagtttttatcaaaataagtagaatgaataagaataatattactgattccccaatttgttcatttgggttgtgttcaagaattgacacactctttttctatgcttttcaagacttattggtaatgtaggaacttagcattcttctttaagcatcaacacccaagagccaactttgattcctctttattgatacctacaaaacaaacttatatctttctttttggtacccacataactttgggttcttttatgttagtatttaaaacctttggtatccaaatagccttaccaaaataggcattctttttcacatggcaataggatttagtgtgatcattttggttacaataagtgcaagttaagttcaaattactacatgatttgagaaagaaattcctaagaaatttttatattacactagtgttatatcctataccactttttgaaaaaacacatttttgactcccaagcatcatttgaaaattctcttttctttttgtaaaattgtaaaccaccttgtttaaatcatcaatnnnnnnnntcaagtttacaacatctttttcaaataaggaaca

SEQ ID NO: 135032 - DNA, 1095 bp, Cannabis sativa
ttgattacgactggcattgggattagcatcaattattgctacctctccttgattagtgggattggcagcaatcatctttgatctagcatgatcttcaaccccattattttcgttctgaccattaactacacttaagctgcctggttgttgttcacacttgccagacctgtatcgggctctctaaacagcttcacaccggttcacaaactctgaatcttcgattccattacgcagccatttagcaccgataagctttgtttgtcctctgaggggggctttcataaacataccataaggcttgacaattttatcagtcaaagtattgaacaatctcatacaaaaccggtccgagtgacccaatagaccacagataaaacaaaacgtgggaacattctcgtcttaaacgtgatccaaatgaactccgttttggttttccaaaatttaattttatgcttcagaggtttattaagatccattgtcacacgaacacgcctgtaatcccgccataatcccataaaattcttcgggtccgtttcagcaagtttcccaatgtgattccccacattcttcaaattccgttccgtcatataactcgtctgtaaattatggacctgaacccacaagtctatagtatctaacgagaccattcgtggattttccccttccttcagcctcttcataatcaacatgctttacgattcaacgtccatggtctgccttccaatacgcgactaatatctatttcatggtaaaactgaaataagtaatgaaccccaccatcgagttccatgatatacacccccttgcctagtttccaaagtgcagccaaagtttgttgcatagatgggaaatcgactaccccattagtgagaaaacgtctgaccaagcaccaacgagcatcaaacacaacagtctccaaatcctccctatcgttactggtagacgccatatgaccaaaacacagactagacaataacaaccttatacttacagatctgagaaagaccttagcagactaaccatgtcaaaagacaagacaaccacattgttagaggattttgttcttgtaaaataattttttaatcacaaaataaa

SEQ ID NO: 135033 - DNA, 574 bp, Cannabis sativa
taactaattgataaatataacatggttctttatcttatattttgagttactgtgtattatttatttttacttattttgttatggaaccgcatatgtttagatttatgcttttgtatttttgaaattgattcccaccttttttttttccaattataaccgatttcttatgtattatgtgctatattcgcttttactcaatttgttgttaaactagtttggtttttaatttatgtaatagtgttttaggaactgattttctctctatttttttaattataatcagtgtgagttattttgtgttatttgtttgtattcattatgttatagaactggttctattttaattataatcggtctgagttatttcgtgttatttatttttattcattattacactgttatagaaccagttctattttaattataacttgtttaagttattttgtgttatttgtggttctactgtaattataactgtttgagttattatatattatttgtttttatttattttgggtaaataccattttggaccctatgttttgcaaaaattataaattggaccctctgtttt

SEQ ID NO: 135034 - DNA, 687 bp, Cannabis sativa
  modified_base (582)..(588): a, c, t, g, unknown or other
  modified_base (637)..(662): a, c, t, g, unknown or other
gaaaaataattccaagtttaaagacctcttggtcggtcatgatgtcttaaaaaaaggccttatggccgaataagatatataaaaaaaggagaaggataaaagagtagttaaacagctggagtcccaggctctcggttcggatcttctgggccggtaggagctgggggatctgttgtttgaacgggaggtacatcaacattctgggcagaggaagaagcagtcgcatcgggctcaccataagctacttgagaagcacagtactcgagatacatgtctttggcctcgcccaggtaatcgaaatttgcctgagggttagccttccaaaagtcatataaaatctcgagaacagctgtctctaaggcacgcactttttcttcttgcttcgccatccccgacttgtacttctcaatctcaactgtaagttcctcctcctgggtcttcttctcctcttcgagccgacagattacagtctgaagaactcacctttcttcttgaaggctattcacttgtgccgatagggagccaatggtagcctcaagctggtgggaagcctcaaggtccttatgttggaaattattttannnnnnnctagatttactaccaagtatgttcgattaacatcctaatatgaattctnnnnnnnnnnnnnnnnnnnnnnnnnnagtttagaaaaccttacagtgggtg

SEQ ID NO: 135035 - DNA, 543 bp, Cannabis sativa
  modified_base (359)..(360): a, c, t, g, unknown or other
aagaacttctcttttcgctctgaagcttaattagcaaagaagggtgatggaaatgagtttatgtgccaatgttgtttgatatttatagggaagtcacgaaaataggcaatcatctcaaaggaacctcagacgcctcagtttccctccttaagcgaatatgggaaatcaaagataatcaagtgcagccgtcagccgtggagagagaaaatcggatttcgaaatattaattttcagagcatttattagtcgaaaactgaagggacacccagtcagcctcacatcgagtctcggacggtcgcgcttgacacatgtcctatccaaaggtagaagcagctcggatgaagtctacacgcgacttnngaagtcccgtacagacttggggacgaatgttatcccaatttttgcactctgatgtggcatcgcatgaatggtgacacgtggaatctacccagagcatttgctcaggaagcatagtcggagcaggatgcctcgctggcatgcccagagtaaagcaatcagcaatccgcgcagagcaaccaacac

SEQ ID NO: 135036 - DNA, 1926 bp, Cannabis sativa
  modified_base (1875)..(1885): a, c, t, g, unknown or other
tcctaaactttcatccacgcccgatttctattagtaaaattgaacaaaagtccttgactccaacaatctcaatagttcaaaagaaatttttaacgacttaaaaagttcaagtgatataatttggtacacatcaaagtttgggaggcaaaaatcataaatagtctattattatttatgtgctaattgaaaaattattaagaatatagttatatattttgttgataagatagaaaacttatattaagtattaatcattaattttatatttatttattttttacttatattttgttatagagcattgttattgggaaatagtggtgcttatcactatctataggtgtagccttatgattggttagtgatactcttaataagttattaatcaaattatatgagacctgatacttaattgcaatatcaatatgacacctaagaaggtactagacactaatagcgccttttggtattactctattttttttaatcaaaatgtatattatattaatacaaaattattactatgtttaagtttttttaaataaataataattaatagaatttataatatatataatttttattttatattactctatttttttttttatcaaaatgtatattatattaatacaaaattattactaatatgtttaagtttttttaaaataaataataattaataaaatttataatatatataattttaattttaaaaatcaaaagataaaataaattatacactatttgtctagaaaaaagattaatgatttaatatataaatttgattagtatataaataattttctataatatttttttttcattataaattcattaatgtgttttaaaaaaatatatattactagaaaaaataatataaaaaataaattattttaaaaaataataatgtatttttttttataaaaaaaattatttatagaaagatatacattaagaagttgcattactagagtatcttatttattattttttttttaaaaataactatttaatttttatttattaatgaggtgctagttgagtgccttatgctcaatatgtgcttcccaatgagtccaatatctcttctatttttttttttaaaaagacaaaattaataaaatacttttctaatttatatgttgtacatgctattccataataaatagtttaaaccttcaaaactcaacataatcaatggctaataaaatatcactatcttatggggacaaatgaagtgtttctattgtagaattttcccaaaatattaatacctacatgatttctttcgcatattaaagtaccattgttgttgagtattcttttttaaaattaacattttataatatcaaataaaatatatatatatttttttttttacatttttacaaaatatatatatattttttcaatttatggtttcaaaattttttaattaaaatttaatggtgtcctaaaaaaaattaagaaaccacataaaagtaataggaaaacatcattataacaacaaaaaacaaaacaaaacaaaacaacaaaaaaataacaagggtacaacacaaaaataatatgaaaacatcaacgatctgtattttgtacttaatcttgttttattgagattgattatgtgttatttttatgtctttttaatgttgtcgatacaatttattgaggtccaattaatttgttaatttatgtaatgttgtcttcgagttgtttggtagttgcgattaagttgtttaaccaaaataaaaattagtttatttttatttttaataggtacatatttttgagttgatatatgaatattttgtagttgtgtgtgtatttttagactatttgggctcgtttggtacgccgtataagggtcgtatnnnnnnnnnnnataaataacactatgtttggataaagcaatgtattgtatta

SEQ ID NO: 135037 - DNA, 879 bp, Cannabis sativa
atggtcattttgccccattagtctcttgtcctttagtggactttattttagttaaaaatcagattttttattaatgttaagctgagattcattttagtaaaacaaattatttttcccattttctcaaaatatcaaaaattagacataaacacatttttctctcaagttctctctctccttcgaacccacctagaatgagctagggtttgggttgttcttcaacaattcaagctttttccagcaagtgttaggtgatctcaagctttaggtaagctcttagaaactcctctcttagttttctttagtttcgagtttggattttgcatgaattttgagtagttgagttctgtagttcttgtgattgtttggcatagttttctaaagttaagttatgtttgaatatgttgtttttggttggttttagtggatgtagtgttgaatcagaaagctttgagttttagaactcaagcttggctcattaacggcaaattttgattctggttatattgggatgttttattgccttgattatgttctttagggtatatttatcaggtctggaaggtttaaagagatttggagttgatttgaggttttggtgaaattttgaaagtgtcctgcaatgaactggaattttggttcagggggacctataggaaccggaattctggttggtccccgagaaacccaacagaaccggaattctggttgggaactggtctaccagtttgggaaattttgggaaccctagtttttcccattttggtgatgtttagggtatctccatgttgtttatcgatagggaaaccttttagtttcatgtttaagtccctagaaagtgatttggcgtgtcacttacctatgttatgattgatgtga

SEQ ID NO: 135038 - DNA, 759 bp, Cannabis sativa
cttcttgctgctgagaataaggtggccgaactgaccaaagatctacaagctgcagatcagcttgaagccgccattgcctccttatccaaggaagtgaccaaccttcaagaagaatgggaggttctccgggttgttttccgcaggttggaagaagagaagaagaccaaggaggaagagcttagagatgtggttgagaagtataatcagaggccgggcagcagagatccaaagtggagtggctcggagggaaagtgaatgccttagagacagctggtcttgagattttttatgactcttggaaggccaatccccaggaaaattttgaatatttgggcgattccaaggacatgtttcttgagtactgcaatgctcaggtggtctatggggaatccgacgcgaccacttccacctctccagctgaccaaaatgttgaagtgcccccgctgagacaaacaatcctcctgctccagctgactcggttgagatgtacaaagagcctgggactcaagccgtttgaatgctttcttttttatctctctttttttttttatttatttggtcataaggcctttttttaaagacaaagtgactgaccaagcagtgtttaaacttggaatttatttttcacttttcagacaactagctgactgggcagcctttaaacctgggtttgcatgcttttgtttaatgaatttcattatctatttataatcatcgtgcaattttttttttaccaaatgctttgtacaggtataggtg

SEQ ID NO: 135039 - DNA, 1328 bp, Cannabis sativa
  modified_base (320)..(322): a, c, t, g, unknown or other
tactctacccatattgatgtgatagcatcgatcagtatttaagtcaaacatacattcatcagtatccagtacaactctatgtatactgatactgctatcattgtactctaatagacataaacaacatgtacgccaaacacgtaaagacatatgtataacattacactaatcttaccttattttcgaattcaggtgtgtcggccaacttgagtggaacaactgctcgccgaattataggcctctaaatcacatcgttcataacacgggtaagcgacacgctaaatcacatccggggacttaggttttaaaccaaaagtttnnntactgaaagttaacatggcaataccctaaactaacagggaattaaccaactaaagctcggaaactaacacgaatcgacaacacgaaaagttcagaaaaccagtttctataccggttaactggttttacaccaggtaacctaaaaattttgaaacctcaaccaattcgaatccaaaccttaccaaaccttccagacttgcttaatataccccaacaaacataacccaaacaatagaacaatataacatgctcaaaatcaaatttcaccattaaagagccaagcttgagttctaaaactcaaagcttggtcaaaccttacagcagccaccaaaaccagctcaaatcaacatattataccataatttaactccagaaaactacaacaaacatcaacaacaactacattacccaaacttacaatttcatgcataaatctcaactttaaagcttttaaaaccaaaaaaagagatgctaggaaccttaccttgacttttgatacaattaaagcttgctaaaatctccttgatttgttgaagaacaatctcaaaccctagctgttctagggagctcaagagagagagggttttggagagagaaaggtgtctttttgtctaatttcttattttgtaacataatgaataaaataggttttattaaaacaatatcagcctaataaaaatcagattagtaattaaattaaatccccactaaaggacaaaaatccaaaaggcaaaaagaccataatgcccttgcccacaccaaaaagtcataaaatcacctaagggtaatctggtcatttccaaaatctcgactattctcaacattcccaatgtctaactatattgccctgctatatcaaaaatactaagatgtgattctaatagccaaacaccgtgtttcaatattttcaggcacaaaatatgcaaaaatatgaaattccacatatgacatattctaaattcaaataaatctatgtaaactgataattcataactaatatgcaagtt

SEQ ID NO: 135040 - DNA, 562 bp, Cannabis sativa
  modified_base (517)..(527): a, c, t, g, unknown or other
gtgtcaccttctgaagtgtagccgaatttcaggtataacaataagtatgaaaaggtaaaataatgtgtacacaataattcttaactaaattacttgtaatagcaacgaaatttcagcaacgagtaaaaaaaaagttcactttagaaatttataatataaatatctgtttattgagattttgaaaaccaattaagaaatagattgagcttaaaaaaaacgttttacaacaaaagaagataattttttttttacgtgtttaggacattaatgagcttaattgccattagatagaaatattgattttattttgctaagtttctaagcacttttgttgggataatgtattactattataaacaattttaatagttttaagatttatgtttggactttggaccatggtaatgactgctgaaactttgagaatgggggcatttttaaacctctataaagatctattttttgttcaaaatattttaaatttatgcaactagaaggacggcgtgtgaaagggaannnnnnnnnnncagttgtgatcttggggtagtctaactcgaacgga

SEQ ID NO: 135041 - DNA, 500 bp, Cannabis sativa
atatatataaaaatatttatatagacggttgaaagatgtatttactgcaagctcttctctttgatttatcattaatatgaagtctctttcaatcttttaagtgtaacatgttttaatcagaatcataaatacagtttataagtacttttaatattatcaattttttagtattattaataacaatatacaattatgacattcttaacaagtctatttttataaaataaatactaaaaaataatttacaattaattattaattttttttaaaaatatcactaaaatttaaataaaactaatatgcgtaactttcatcttatatatatattattgtaaatactgaatttgaggcacgtatactaaattttatgctaagtttttttctatattatttgaaagtgagattattattgaatactgaatgcaatatattattgtttaagaaaatttaatgatttagatatgcttttaagttaatccaaaaataaactaaaaattgat

SEQ ID NO: 135042 - DNA, 575 bp, Cannabis sativa
  modified_base (548)..(550): a, c, t, g, unknown or other
accaaaatgtataaggatctaaaaccctacttttggtggcatgggatgaaaagagatgtggtagattatgtgtccaagtgcttatcctgccaacaaatcaaagctgagcatcaaaggccggcagggttattgcaacctttagcccttcctgagtggaagtgggaggacattgcaatgaatttcgtggttggtttacctagaactacaggaatgtatgattcagtatgggtcatagtggatagattcacaaaattagctcattttctacaagtgaaagttacgtatacagtggatcaggatgctgaactgtatgtaaaggagatagttcgtctccatggagctcctaaatccatcgttttagacagacaaccaaagtttacatcaaagttttgtgtgagtctttaaagggctatgggtacaaagctgaagtatagcacaactttccaccctcagcctgatgggcaatcagaaagaaccatttaggtactggaagatttactgcgagcctgtgtcatggacattgatggttcatggagtaagtacttgcnnntaattgaattctcctacaacaatag

SEQ ID NO: 135043 - DNA, 1757 bp, Cannabis sativa
  modified_base (26)..(31): a, c, t, g, unknown or other
aagttcttatttaggatgttaataannnnnnttgtgagtagatctatgatcctggtaaaataatttccaacatgcacgtcttccaccctctttcccagaatagaaggactgcttgaagtgtgttttactccccgtgatgctttcaccctttgatcttttcaagcaaagtcatcgcttgaaattttttgcaacttcagccttccttcgttgaagccaaagcttgcttcataaaaattgaacatgactctcgcatgtacgttgtttcttgtgcaagaaagatcactagtatggcacgtctttaacccttcttcccaaaattgaaggactgcttgaagtctattttactcctcgttatgctttcaccctatgatcttttcaagtgaagtcatcgcttaaatttttatgcaacttcagccttctttcgtccaggctaacgcttgcttcataatcattcaacatgactctggcatgcacgttgttttttgtgcaagaaagatcactgggggtatggcacatcttaaaccctcatttccattcctcttgaagtctgtcttacaccctgctttcaccctttgatctttttaagcaaattcatcgcttgaatttttatgcaactttagccatcctttgtggaagccaaagcttggttcataaaaattcaacatgactctcgcatgcacgttattttttatgcaagaaagatcactgggggtatggcacgtcttcaaccctccttgcggatatggaagggctgtttgaagtgtgtttcactccccatgatgctttcaccctttgatcttttcaagcaaagtcatcgtttgaatttttatgcaacttcagccttcctttgtggaagccgaagcttgcttcacaaaaattcaatatgaccctcgcatgcacgttgtttcttgtgcaagaaagatcactgggggtatggcacatcttcaacccttcttcccagaatggaaggacttcttgaagtttattttactccctgtgattctttcaccctttgatcttttcaagcaacatcctcgcttgaatttttatacaacttcaaccttccttcctggaagccgaagcttgcttcataaaaattcaacatgactcttgcatgcacgttttttttttttgtgcaagaaagatcactggaggtatggcatgtcttcaaccctccttcccggaatggaaggattgcttgaagtctattttactcctcgagatgctttcaccctttgatcgtttcaagcgacatcctcgcttgaatttttatccaactttagccttccttcccaaaagccaaagcttgcttcataaaaattcaacatgactctcgatgtcacgttgtttttcgtgcaagaaagatcactggggctatggcacatcttcaacactccttcccagaatggaaggactgcctaaagtctgtcacacgcacaacgatgtttcaccctccaacttttgcaggaagagtcagtgtctgaatttttcatgcacctttagcttttcctattgaaagccaaaagttttccattacaaaatcctgcatgactctaacttattcgaatgaacctcaggatatgtaaaattgtttgtgcaagggcgcaggcccaggtttcccttcacaaaacaaaagcatgtcgtgccacgaaaacctatactctcctttataaggcccatatcatggaggaatcatttggggccagccatgcaactaggttttggttgggttttgtgccctaaataaaacccattac

SEQ ID NO: 135044 - DNA, 591 bp, Cannabis sativa
catctgaccgtagtacacaatatatcacagaacatacttcattactacttcattacggatgaatatttaagatattcaaactccattaaccatacattgataattaattataataacaaaaagttagtgaatgaatatacctataacaacttaaaatccgatcaacaccaaattcttccaaacttcaaaaattagctcacaacctacaatataatgaaatacaacaaaattagaattttaattatttaattacttactagttattaaaaaaaagtaacaagttactggttaataaattatatagattaatttttttttaaaaaaatcacatatacgtacatatataataaattatatctcatactaacacaattttaaaaactttatttcttaactaattaaatctctcctatctcatttttattcacattaaatatatatacatacatatatattacatagaatatatacgatataattaatttatataaataatatatacataatatatatacacgcaatacatatatataaacacatatattcaataaaatacaaaatatatacatatatatatatatattactaggt

SEQ ID NO: 135045 - DNA, 581 bp, Cannabis sativa
ttgatcgcagaatatgacaaggaaattgagcagaaaatagtaagtatgtcaattatggtaagaaaaaacaataacatttatttttgttactaactttgtcattggtttgtttcatagaatgaattaaaagagaaagttagtactggtgaaatcgaagctaagggtcggaatgatatcttaacgcaagctttaggcacacctgagcacccaggtcgtgttagagctgctgggtatgatgtttctttaattgagtcatattacttctttttttttttatatatatattttagagtctaactaagttggtacattatgttgcaggtcatttgccaagatttctaccgtgtttggtagaactcaaagaaagaaaagagttgaggtcaatgtcgatagtgaacatgtcgctgaaatcaaaagattaaaagctgaaattgaaaggctaaaagcagaaaaaaaatgcacaaacagaagagcttcaagccttagacaatgaatatagaaatgaacagcgacatgaagaccaagaaccgaccgacatctatgaagaacaagaacaacccttggcaaatgaagaccaagaa

SEQ ID NO: 135046 - DNA, 1022 bp, Cannabis sativa
atgagttcttggtgcggaagcaagtgatctttgaatttcccttgatgatcaaagaaccaagctctaatttgtaggaaatttagctctgatacataggaatttactctgtaatttcagtatcaggataacacttaaataaaaaaaaaaagttaaatcaaaacaaacaaatcaattacaaaaaccaacaaacacattaaactagaaaaatataacacagatgaatctagatagcttccagacacaacaacacacgagatttatactgattctgattctaagttcattatgaacttggtcatactccagtttgaaagcattgccagtaatatttattgataatgagaattagagatatcaatctcaggagctacaaagaaatcatcagagtaagtcattcatgttgtaatccctcaacactcattaactcactaacccgagttaacataattgacaatgttgctcatacaatttcccaattccagctctctctctctccctctctcagatatctgtctctatttctcactctaacttctctctttattgtgttgtgtctctctttttattcttcttcctcttctttctattcctttcaaaatgagatgagtagtcctttttatatagccaaaggacccaatatgcaagctatcttttttgacagttaagttagttaaagactagctaactaacttaatgtaaattgggggtttaaggaataataccacacacataataatatatattgtcacaattttaatctgcatattatattattaaataatataacgttatattgttggactgtgatattatatttaatgattatttgaatgaagatagtattaattacaacttcttagtggacttctgcgcttgaaatcacatgctgattttatatatatagcaatatttgttatagttataatatgggtaaatactggcataagtacccaaagttttaagtttgtaagcggcataaacccaataatttttttagtggcataagtacccaatgtttataa

SEQ ID NO: 135047 - DNA, 1012 bp, Cannabis sativa
  modified_base (42)..(68): a, c, t, g, unknown or other
atactttatatgtgtttattttttatcgttttagaagttcannnnnnnnnnnnnnnnnnnnnnnnnnntgagtagatctaagaccctggtaaaataattcaaagaccacagacaagtgcattcctttcttcaacatcatgaagaagtgccaaaaatttgaatggtccgacgagtgcgaggaggcattcaaaaaactaaaagaacacatggctaaacccccaatcctatcaaaacctgttctcggagaagacttgttcctatacttggccgtcttcgagaacgcggttagcgcgaccttagtacgggaagaggaaaaaactcagcatcccgtgtactatgttagaaaacacatgataggggcggagacgcgatacccggtgatcgaaaaactagttttttgcctcctaatggcctcaagaaagctaggactctactttcaggctcacccaatcaaagtattaaccaaccacctgttccgacaagtcctacaaaagccggaggcgtctaggagacttctcaaatgggctatggaattaagccaatttgatctacattacataccacgctcctccataaaagaacaaacgctagcagacttcataacggaatgccatgaggcagaggctaacgcaagcatgcccacactacaagtcccagcgtggaaagtatttgtggatggtgcctccaacgaaaatggaaccggagtgggggtagcaatgatatccccaaatggacttcgactccatgcagccctacagttcaaattcacagcttctaacaatgaggccgaatatgaagccttgatagcagggctgagattagcaaaagccgtgggggctagaagagtagaagtcttcagtgattcacaactggtagtgaaccaagtatcgggggaatatcacacccgcggagaaaaaatggccgcgtacgtagcaatagttcgggagttgctccacgagttcacggactacaaagtggaaagaatccttagagaaaagaacgctcacgcaga

SEQ ID NO: 135048 - DNA, 556 bp, Cannabis sativa
aagggacagaggtctaacgtatgcaactagtttggtggcttgtctcaagggcctgccaacatgcgtggaggcaaggttccttgaggattggtccatgaacgtatgggagtccttgggcaacgagggagactgttcggacagtatcgaatgagacatgatagaattgttggcacgttaacttggtgttggcatcttgccacaaatgttaccttggtcacgagtgacaaggtgagcgtcggtgttgggatttgtcttaccatgctgggaacctattgacagtgtgagtatcttggttagagagcctcaatgcatggatgcactcatggatgcttgcgagcatgactcggcgggcgttgttcgagagacggaagtgtgcacgaggcacacagtcgcgcgaaaaatgagcccattgttactcggatggttggaaggctgaccttggcttagacaagtcaaggtgccgcacgggtcttctgctccctgaaaaggtgagcccgtgacagttggtatcagagccaagttcatctcagtgggaggtgaaccttgttggcctatc

SEQ ID NO: 135049 - DNA, 713 bp, Cannabis sativa
aaaacaagatcatcaacatatgaaaaaataatatcaaattgaatgtgtgtgatgaactgtgttttaataacatttccttttctataatcatgagagtgtaaaaacttatatagacgctcataccatgcacggggtgcttgtttcaagccatacaaagcctcgtctaaaacatgatcaagaaggtgggatcctcaaccactccattttgttgtggacttttaggagtagaagaattatcaaaaataacataagatttacaaaatttaccatacacaatattttcaaaaaaaattccatgattactcttaccacgaactatcttaccaatgttgcaatctttctgaacttttaatttcaagcaaaaatacttaaaaacatcaaaagtatcaaatttttctctaaaatgttctacccatgaaaagcaaaagaaatcatctatacacacaaaaaaatatcttttaccattcaaactttcaacctgaattggaccctttaagtccatgtgtaggagttcgagaaccgtggaagtattcacatcaggaaaacttttgtgaaagtttttcagttgcttactaagatgacatggtccacattttcgttcaacttctttacccgatttaggtaatcctcgaacaatccctgcaatggataattctttcagttttttgtaatgaatgtgttcaagtttttcatgccataaatcagtggtgtta

SEQ ID NO: 135050 - DNA, 642 bp, Cannabis sativa
tagactaaaaagggccttggcacatatgaagcacgaagcatgtactcaatacaaaagaaaccttgaaatgatgattggtggtgacagtggatctgaaaaaacagcaggtccctagtcaactctaatttactatgatgaggtgttagtgatgttgaattatgtagtgtgaacaatgtttgatttaagtagttactaccatattcatgttttgaatgtattattttcgtatttctatgtctaatgtattttgagttgtcatctattttaatatacattaacaactatttcttaatatttatttgcctttgaaaaaaaccttacaaataataataaaaaaattaaaaagcatctagttaactgtataaaataatataccacataatgtcaaaaggacacttatataataatatatttttaaaacacatttggtatagtgatatgtcttatataaatacccctaaatagagaatgcttagaataccacttactattatattgcacttgcatataaaaactctttaagttaactatgtcttcctctcttgtgacttctatcaatactcgtccaaagtgccattgtggcacagattcggtgtgccgaacttcaaggagtgaagagaaccctggtagaagattttgggg

SEQ ID NO: 135051 - DNA, 952 bp, Cannabis sativa
ctaagagcataattaatcacatcagcaaaaccaaacctgtcagggggtctagtagctcttctttttctatctcttgttaattgatagtcttgagtgtcttcatctgcatctggttcaccctcagactcaactatttcatcctcttctccttcttctttctctggttctgtagttctgtccataacatgctctcttctgttggactccacctcaaactgtatagggctattagaattgttctctggtatgtcattcctttggatatttgcaagatctttgtacatggtcttctcatcaaagatcacatctctactcacaaagttcttttggtgattgccttcttcaatgctccatactttgtaccccttaacaccttctggataacccagaaaatgcattttcttgcccttggatctaactttccttccttgacatgggcatacacaagacaaccaaatatccttaggtgatcataccttgcaggcttgcctttccacacctcaataggtgttttgaattcgattgcagatgaaggacatctgttaatcaaatagcaggctgtaacagctgcttctgcccagaatgactttggcaaaccagcatgaataagcatgcatctaactctttcaagtatagttctgttcattctctcagcaagtccattttgctgagggtttctaggtactgttagatgcttgccaattcccacttgcttgcaatattctttaaactcatctgcacaaaactcaagcccattatctgttctcaacttctttaccttctttccagtttgtgtttccaacatggttctcagctctttaaacttacttaatgactcatttttatttttcaatatgaaaatccaaacaaaccttgaaaaatcatcaatgaaaatcaagaaatacctggcccctcctctggattttgttcttgatggcccccacaaatctga

SEQ ID NO: 135052 - DNA, 1122 bp, Cannabis sativa
gataagaaagtgtttgtttcaacatatactacttttctaagaaaatgaccaagtctgaaaacattgtagcctcggggagtacctcatggcactatctttttggggcttatataaagaatgatataattcgaatttttggacgactagagagatacaaacaagcaattttgagattagaaaacacattgaagagcaagagagaagagacttcaagcaatcatcatcaactatcatcattagagttctttcttcttcttcttcttctttattcttttgtttagttatttaattatgaacatgattattgtggttattatgtttgtaattatgaagtaaatactttttctagagtgtttatggaactattttagattatgaattattgtttttaaatttttctcatatttgtttttgctatttatttatgtaattttgtgttaaatatcatcttattaatgcttgatcactatcatttagtatagagattttttgttttacacttaagagaggaaatctaaaattggactagaattgcatgacataggaaaagtgtgagattaagacattttactaattctatgagttttattcatatggaattatattactttattattgtttaattaattacattaaatagagataccttgttagttaattatagttaattctatcatcactcgagagagattaatagattacattagaattcttgaaactatgaattatagaataaattgggataatttgtaaattgagattcataatttgaatcagggaagtcaatgctctagatctttactttctaattaaaatttttatttgtctgtttacttttcagttattttattatttcaatcttaatcattatttactttgaattctctaattaaagcataaaatcaaaaattataataattaatgatatttaataatcaatccctgtagattcgacaacctttttaaaattaaaatttactataacaacactgtacgcttgtagtaaaaattgtgcatcaagtttttggcgccgttgctagagattaaaaattcttcaattattgctaatattattactaaaagtttttactttaaattagattttattttgtttcttatttt

SEQ ID NO: 135053 - DNA, 650 bp, Cannabis sativa
agggcataaaacccaacaaagaaaaatgtaaaaaaaaaattcatttaaatgtaaaaatgtaattttttacaataaatagtgccttatgtaattatccctaatttatatatctctgcgggttgtttactaggattagtaataggaaaacttacaaaaatactgacttttggcccaatctttacaaaaatattgccacacggcagaaataacttttatactgtcttagcccatttttttttatactataaacaccaaaaaaataaaatgaggcctccatcttccacactcacggacggaacaactacatgaacaccaaaacagtcagaaaataaccattaattccggtgatattgagaaaaaatagtgaaatcgacgacaaataaataatcacggtaaaacaactgtaaaacaacactaaaacaaatcaaacaaaaaagaaaggaaaaaaggattaaaaaaactaacaatgttctgcacaacctcaatatcagatgcaataacaactatatttgcaagcctaatcttagagaatcagaataaaaagactactaaaataacacaaaaataaatgtaaaacaataagcagatataaccacttagagaaacataaaagaaccacacacctcaaaacttttttttctagtgagctc

SEQ ID NO: 135054 - DNA, 1142 bp, Cannabis sativa
  modified_base (63)..(64): a, c, t, g, unknown or other
  modified_base (1088)..(1113): a, c, t, g, unknown or other
atagatgccccttaagtaattttaaagaataaaactttgtaattacttaatataaatgattcnntttattcataactgaagtttaaatatcacatcagtaatgcgagttacttcatttacttattggtagtagggtcacaaatgctccaggttccagtagttctttattagcgagtcgttgagtcgagccaatttataaactcaaattccaactactgcttcgatgacatatggaccctcccaattcgggttgaacactcatgcggatgcatctctcatatttgcaaatactcgccttagcaccatgcctccatcattgaatagtattttcttgacttttttgttgaagtatcttgtgactcggatttgcaactcagttcgttttatctcaagtagatccaaggacaattttagtagttcttggttttcttcttgatagtatcctttaaggttttattaacagcttcggagccaagatatgttcacctcaataggcagcattgcttccaagccaaatgctagcgagaaaggagtgtgtcccgtcggtgtcttctcagtagttctgtgggcccagagtacctgaggtagctcgtcaactcatttgcctttggcaacgtctaacttcttcttgatagtatcctttacggttttattaacagtttccacttttccattcgcctgaggcctggatactgacgagaagctcttgataattttgttcctctcgtagaattcagtgaacaagtcaccatcaaattaggttccattatcggatactatcttcatgggaattccaaacctacagacaatgttcttgacgacaaagtcgaggacttgcttgcaggttatggaaacaaggggctcggccttcgtccatttagtgaagaagtcgactgctactaccgcatacttagctcctcctcgcccagtgggtaatgccccaattaagttaattccccatatagaaaatgggtagggcaaggtcatcattcttagttctcttggcggcactcgaggtatatgtgaaatcctctgattcttatcacatttcttgacaaactcttgggtgtccttattgatcgttggcnnnnnnnnnnnnnnnnnnnnnnnnnntttagacagactttgccaacccgcatgat

SEQ ID NO: 135055 - DNA, 607 bp, Cannabis sativa
  modified_base (33)..(38): a, c, t, g, unknown or other
accggattggccagccattctggataatacacnnnnnngatcatgccactggtcagtagtttgtccacctctttctccagggcttctgccttcactggttcgaggggtagcggagaattgtatgccgctcattggtggagttgccgatggtaaggttcccgagagctggacttcgagcgcatactctgctactccggtcggataatatcccccataagccactatttgggcctcttttaagctgatgtacttttggactctcttctggaagtcttgaaggttggaggctccttcttgctgcaattcgttccagaatggagtccctgtatggatccctacttgaagaagtgcaagctgttgtctgtcgtccactttcttagtcttcgaggcttcttccttaaatctctttatgaaattttttaatgtttccgtgggcagtttcttgatgttagtcagggcactaacctcaggattaacctttctcgcggcgacaaactgtctccggaaactaactcgaagcttgttccagcagtccactgatcctggttccaacttcttgaaccattcctccgcggacccactcaacgttagcgggaagcataaacat

SEQ ID NO: 135056 - DNA, 978 bp, Cannabis sativa
  modified_base (311)..(316): a, c, t, g, unknown or other
  modified_base (403)..(405): a, c, t, g, unknown or other
gagatcacatcaatcaagaagggataaaagactatatccacctaacccctaagatacctaaggtataggtcatgtatctcctattttgtatctgcagggaatattactgaaactacacagaaagacaagtgcttcagttctagggatcaccccagaaaaacactataaataccccccaaatacactgagataagggtcgagaattttgggttcataagaattaaagagaacaactaagaggaatatctaccaagaacattctctgtaataaatactgtcataaataagaaagactcgtggactaaggctcnnnnnngccccaaccacgtaaaaatcttctgcattaaacttcctacaactttctcatatacattattcaattggttgccgaaaacctcggtcnnnattttggtgctttcattgagagacgaaggaagcatctgcaactagacaacaaccttgtaagctaaaatggtggaaactcgcaacacacgtcagccccgtcctcctcaagacgctcaaaaccctgaagatgaggaagtagcctcaagagtcaacgtggattccaaagagcgagaagaggccattgatggcgaatacgaggaaaacgttgacgaaggcagttacacaaaattgctgctcttaagacaaaaggctgctgatcatgaagctgagatcaccgcccaaaaagaacaaaacaaaaggatgcaagaggtgatggtcaccatgcaaaaagccatggagacaacagggatccacatacaccctaaagccatccctgcaagacttgaggaaacaccggaagagtcctcaccaagcactcagaagcataagtctagggagcctagtcccatacgatatccctctaaaggaaaccaatagcaaaatcctacttccatctcggggaaaaagaaaaaaggtgcaggatctgcgaaaggtccactcagatttcccgaaagggaaaggtctgcagagggg

SEQ ID NO: 135057 - DNA, 975 bp, Cannabis sativa
aattttcaagcttcacaccaagcaatttctctaattttaagattgaaattcaatgagggtttgagagggagaggggttcgggttatgggggaaaaatagccagaatttctttttcattttcttaatatccatcacatttaccaaatatacataaaggtcaaaatgactaatttgcccctagggctaaaaaggcatgcacacacacacacacacacacacaggacatttaggtcatttcacacacacataaatccaaatatattttcagattattcatcaataaataaaatgccaataattccatttcaaattgcatttcaggcccgaacccggttcagcccgaaatacccggttgtgactataccgcgccaacctgtcacaacacacctgaaaaagacaacacaggcatactatataataatatagtcccataagcacgttaataaattaattccattattttacccttattgggtcaaaattactaaaatgccctggctcactaacggggtcttagcatagcataaatcatataaattttcatatattaaattatataataatataatttctcaataatacataattatctaattagggttttgctaatccattttataatcctagggtattatagttctggtgtcacaataggtcctctagccaaaattatatcttcaacagatattctattctccatttttgaacctaatagccctttatggaagtccaagaaagccttagtaatcagatttggatcatgcaccctactcccatcttgttgctcaatcgataagatttgattctgtctcatcctatgcttgatactagcatggaaaagagcattattgcagtccccatcttgaatccaagctactttagctttctattgcaaggagacatagtcattttgtactctgaccaatctctctcttgtctccttctcttgcaaatgtaagtttttttttttttttt

SEQ ID NO: 135058 - DNA, 761 bp, Cannabis sativa
gagtccctcaaggactacattcaatgattcttagaggcaacagctaagaccaaaagtcttagcgaggaagcaagggttatggcactcgcagccaggctcaaggaggtgagtcctctgtggtccgacctttttctcaagaaggtatacaccatgaacgacttcttaaataaaacatatggattcattaaacttgaagaagtcataacccaagcaaagggctcaaagggttgcaagaagaaatcgccagacattgaagcccctgctactaaggcatagggaaatgggaagaagggaggttcaaacagaggaaagagagccaacaatggtggcaagcaaggcaactcccttggaggaaagaagcctgattgggggcaagtccttaagagaatatgggcctagcttcaccacctactccattatcttggctccaagagaggagatatatacaaccatacagtcaatagtgttgtatcacaaactttttcatttcaaagagtcagggaagagggacatgaacaaattctttcattaccataacaatcatgatactaatgagtgtattcagttgtcagacgagatagaatttctcatcagacaaaaacatgctattcttgaacagtatatacaacctgaagctctagctggaaggaaatgcacctctccaactttgcgccaattgcaggcaggttggagatcgtgattgaggccctcacatagttgggaattcaaggaaggccttagaaaggtatgcaagatcactt

SEQ ID NO: 135059 - DNA, 791 bp, Cannabis sativa
  modified_base (302)..(303): a, c, t, g, unknown or other
catgtctcgatgttgagaaaatacgtttcataccttgctcatgtacttagctatgagaatcttgagctgcaaccacacatgtcttatgaagaataagcagctcagatccttgacagaaaggataaggttcttcgaaacaagaccatagctctggtcaaagtactctggagaaatagcaaggtggaggaagccacctgggagttagaatcggacatgagagctcaatatccagagttgttcaggttagatttcgacgaggaaatcctattaagggggggatagttgtaaagaccgcttagctnnaatttggaaattagcagataatttgggtttaattatgaaaatcatttattagtattgaattaattatttatgatgatttgtttgaattcagaatgcatttttatgttacatatagaaatttcataattttgcatatttttagtgccccacaacattggaacgcggtgtatggctattagaatcacatcttagtatttttagtttaacgggacaatattttagacattgggaatgttgggaatagtcgggattttagaatttcccaaaatacccctttggtgccattttgtgacttttagtgtggaagggaaaaatggtctttttgaccatttgtatttttgtcctttagtggactttatgttgatgagcaatctgattgttaaagtttaattagctgaaatatttaataaaacaagtgttatctcatttattttctaaaaataagaaaattcaaaagaaagcaaacttttctctcaagctctctctct

SEQ ID NO: 135060 - DNA, 870 bp, Cannabis sativa
  modified_base (768)..(773): a, c, t, g, unknown or other
attaattcagatattaactctaatagtgtttctttccttcaaactagacgggttttattgtgtcggatgatttcaaacatgattgtctaatacttgctgggaagttaatgaaagacttcaagaatagaatgataaaagatgttataatgcccacattagaagaaaaagatgtgcaacgactggcacaagtccctgaaaagctttcgaaaattgactttactgattggttgaaatttgttgaaattcgactaagtcctgaatttcaagtacgctaattatatttgtactaagataacttttaaaaacaagtgcatgtttctaatgtattttttcggcattgtaggaattgagtaaggtgcaaagggaacgttcgacaaaaatccaatccaaacatcaaagtggtcagagtggaataatgaacgcaagggaagatgtggtaagtaatcaatgatttctaataatgtgctttaaaatgtaattgtgctcatttaacttttataaagtaatgtaaaaaaaggacctcgatgttcaagatccgccacgccaccgtgtttggatcaaatctcagaccaagagaacaaaacttgtcactgattacaacaaggaaattgccgaaaagatagtaagtatatattaatccttaattgagtactactaatgagttagtatatataattcatatactaattgcttgcatatgtgcataattaggctctattagaggagtaacttagtgacaaatgtaggtccatggccaaaacgatatcnnnnnncagacgctcgggacaccagagcatcctggacgtgtgagggctactaggtatgctagtacttgaaatgttgtttccttagttatacaaaaaaatcata

SEQ ID NO: 135061 - DNA, 874 bp, Cannabis sativa
taatcgccgtaaaagaggcttacgccatctgtcaaatcctcttatggagcatatgatacgtttccctcatgcaacattaaatgcgaaatgactgctcgaacgatctcctttcctcatggagatgcattgttacatttccagctcccggagagtaaaggcgtgctttatgctcctctctgggaggctcagtctatgaggtgcacttctctgtctatgacttaatcaatttttgtgagtgggtgttctttgagatctacatatcacacgcagctgctgtcacgtattttgggaaaaatccgaggcaacataaactataatatatacatattgtttcatcaacacaaatataatcatttatattaatttgttgtgttattattaactaatatatagttatccacaaaaaataattaaaaacaaaaaatatcacttacaaaatttttcaaaagctcaaaactatagttatcaaaataatgtaatttttattaaattataaagattataatggaaaaaagagttaaataaataatttaatatgtaaaagcttaaaaattattcacacttttaatttacatagttctaatttatgccttgtagtcttttttatataaacaaatcatatgaaaaactataattatatattagtaaaagaaataaaaaagtgtatttgtaggcataatattgtatataaaaaatggagttctctatgatttttgatgtgcggatttaatagtaattaacaaaacaaataaaaacaattttataatttactatagaaagcccaaactattgggttttgtgccctaaataatacccatttcaatataatcaaatttattggaaaatatgccattattgaaaagaagaataagtg

SEQ ID NO: 135062 - DNA, 550 bp, Cannabis sativa
tgaactggtcgtcggttggtccccaaggaataggacttccagttggggaccgatctgtcggttgggccatttttgagaaccctagttttccccgtttttgtgttatttagggtattaccatcctattcatcgatatggttattcttagttttgataataagtccccgataagcattttagcgtgtctctcaccagaattataaatgtttgatttagggccctgtgaaatgtcgagctgtaatttcactgaggctgacaggcacacttgagcacggaaacgaggtaagatagcataaataatctatatgtgaatgtatccttattttaattatttacactactaacactaacgaaaatgtgattttaagggtgttagtacagtgtaggattttagggtagttatagtgttaccaacacgagtaccaaggggtacgtcgtgtatgtggaacaacacttagtaactcttgagagtacaataatggcactaccaatacgagtatggagttggtactttagtgcatatggtacagtggtcgtacttccattgaga

SEQ ID NO: 135063 - DNA, 869 bp, Cannabis sativa
  modified_base (45)..(46): a, c, t, g, unknown or other
aaataattttcataattaaacataattaactgctaatttctaaannaaactaagcggtctttacattaagagccaaaaatctaagatggagaagctcgagaagaaagtggatgccttagagacaggtagtctcgagattttttatgacttttggaaagccaatcccaaatggaattttgaataccttggcacttctaaagacatatttctcgactactgcatggctcaaatggccaatgagaaccccaaggtgaccacttccacttctcccaccgactagaatgttgatactccttccgttcagaccgatgatcctccggccccgtcagacctagttgatccataccaagagcttgggactcccgctgtttagttggcttctgtgtatcattttttttgtatatgtttgttcggctagtaggccttcttttgaaactaaatgatcgaccgagctgtccttaaacttggaatattttttatttttcaaacaattggctgaccgagcaacttttaatcccgagtttaaatgctttgttatgcttaatgaattttgttctttgtttatgatcgttgtgcaactgtgttcgttttgttctttttgtgtttgttattttaccaaatgtcttgtacaggtatagatgccccccaagtcaccgagcagacttttgactcttggtcacttgtctttcacaagtatgctttttgtctgttcggatctttgggtacgagcagacctttaatacacatttaattgtaaatgtataacttgctaataaacttgactcaatttgaattgaaataaacatctttattcatttattggtcgggaatatgtttgttaccaaagtaacttacattgaagctattat

SEQ ID NO: 135064 - DNA, 1002 bp, Cannabis sativa
gctagttagggtgttacatttttagattgtgttagcatgttagttttttttagttgttaggcagttttatgttagtttttcaacttttacttttattgattttttaattttctcttccaagttccagattccaatccaaatgttgttgctgaaaaggcaaatgccattgcttctaatgtagaagaggatgacactgttacttatactcctctgttggataagagaaagcgtgccccgacattgaaatcgccttttgtttattttgggtcacatgatgtgagcagcactccaatggaggtaatgtcctcaagttctcaatatggaggagatgagagggattttaagatagttacgtatgtgaagggtctttacgctcttaacgatttattttctgatcccgtctctcttgaaatcgaggctaagtttgatgattagattaccaaaggattgctaaaacatcctaggtaattattttctttattctgtttttatttttttatttgtttgcatttcattttatttttccaattatttgaattcaatattgtttcttagtcgtttgttttttgatataggccttacaatgtttacgaggatggtgcgaagaaaatttccccggggttcaaattaggtgtagattatgttgaagataaaacatgattttatcatttgtcttgctgtgacatgtttatcaatgacacagtaacatttcttttttccttttaaaattctttatagctgtattatagttgttttatcattgttttttagttgagctactgtgattaagtttttgtaatatttgttcacattttcttttgtgtttctttattatcttgtttgagcatatgaatactatattctattaccttaggaaaaaaaggaaatattattctgttgttattgtgaatttcgctacaacatatttccttttcgatgattctattcaatctttataccacaaattctgcaaagccaagtcaataaaaacaaagatgtctc

SEQ ID NO: 135065 - DNA, 785 bp, Cannabis sativa
tatttttttggagaagaagcccactccatatatacaatatggagtctcctgaaaattggctttagtataatatcgttattgatataatttaatatcgaaacttaattattttagtttataaaatttatagggaatcgcaaatcaattataagacgtggtgtcatagaagctctaaatactttaatgtctcaacgctctaatttcaatgatgactctctttaaaattatcaaataaatttgatattatctaaatatttaatattttatatactcttgtctaaatcactttgcataattttatttctaaaactactttaatactaatcattcttcaaggttgtcattattttaattatatcaaattaatctaattcaatctaattaaaaaattatatattcaaattataagttgataagttgcatgcgtaattatttttcttatacacgtggtaagaattgtttttttttaaccagtggtaagcacaattgtttaaaccttatttttctgcattgtaaaccattcaaaaaattttaaaaatttataggtggtgctaaataactacaacatattcacgatcatgataaaaaaaaaaaaattagactaaaaatctcgctttgatgttgaaatagataagtttttctttttagtgttgtactacatattttctaagtttttctttttattatatttgaaatgattattgattgaaaattttatagtagaagtaagaagcgtgcacccagtactatttttaatgattatttgtaatatacactttaattaa

SEQ ID NO: 135066 - DNA, 798 bp, Cannabis sativa
catgagctttctccaattgctgaaagtttccaaagcttgactcttgtttctcaacatgaaaacccaaaccttcctactgaaatcatcaatgatgctcatgaagtaattggcacctccaagggattgtgttcttgatggcccccacagatctgaatgtacatagttgagtggttccttggtgatgtgtatgccagtagggaactttaccctgcaactctttcctaatacacactcttcacagaactccaatttcccattcaacttatcccttaacagaccctgtttgtctagttcaattagacctctttcactcacatgccctaatctcaaatgccacattctagttttgtccccagtactgtcatttacagcagcatttgctgttcccaacactgcctttccattaagaacatagataccatttctgatatcacctttcatgaccacaagtgagttttattactcttaaagactcattgatctagaacatccactagcagctaattctccaatagacagtaagtttctcttaagttcagggacatacctgacatttttgactgtcctcttgatgccatcatgcatggtaaacaacacagatccaattcctttgatctgacaggctttgttgtttcctaggagtacatttccaccttgtatctccttgaattcacagaacagatttctgtgaggtgtcatgtgaaatgagcacccagaatctaatatccattctctgcctgattccttgctagacactaccaatacatctgctgattcgtatccatcttctgcaacatt

SEQ ID NO: 135067 - DNA, 1107 bp, Cannabis sativa
  modified_base (34)..(44): a, c, t, g, unknown or other
atttcttatattgattattaatcagattgtaaannnnnnnnnnnagggcataaaacccaacatgctcatctctctatctaacacacccaatgctctattctaacttgaaatctactgactctggttatcacattgtaatcttaagagagccatttcagatcctattactatagtgatctaagtggtattatttctggtatcaatacaattaaaagaggagtaagtcgttactcgctaactaagagggtcgaacctctataaaatctaatgtttatttatttttctattttaattgtgtaatacatgataaatattagtattaaattcgactatgatgtcatttgactaaatgtgaggtcaacatctttatttttacaatttataatattttaagttcttaattatttaatttctaaaaatcttagtaaacttttagaaaatgttattattggaaatgctctaataaaatggccacacctgctttagacaaaaacgtgtctattgatttatttgttagattgtgataattataatttttgtttatattttttttaatttatagagatgactagtgaagcaccacgtgcttcacacgtacgcatataaattatatatattgtgttaaattatatttatatttaggcggcgtttagtaataaaataaaaagaaaagaaaataattttcattctattttttttatttagttgcatcttaagaaattaaaatattctgttctcattcttattcttaccaaatactatcataatatttagtgattttacgagaagactttttataaaacttaagacctaaataaataatctttttgtatatattttgaaaagtataatgtgtgtattatatttttttatggagaataaacataactcttccttaattttttttgatttgttttgtaagatgattttttttatttaatacaatatattattttttcaaatatttaaatattattatttttaaaagcaaatgtttaaatattattagtaaacttataatgtagtatatatatatatatttgtctactataactataataatttgctattaaaataaatttaattcttaactaattaaattttatt

SEQ ID NO: 135068 - DNA, 519 bp, Cannabis sativa
ttatatttagttcttttcctcctattttgtgagaatgtatattattttgtatttttatgttcttttgggtactttagagttgttagtaaaaattaataagttttatttgaatttttgtaaagaaaaaggcttaatagagaaagtacaaggttttgttgaaattttgcaagaactttgctacaacaaaagtagcaggggtgattgttgaaactaatgtagaaaaagaggatatgataattcattatttgaggtggcaaatatgaggctgaggtggcaaaagacaagtggtttagagttgatctagttggaaaaggctctaagtgggaattaaggaaccatgtggagggcatttttggaaaggtaaaaaaaggattttaccctagctaaaaagaaaaggagaagaatacaattcttggagctactcttgttgaaaatacctagaggaatgaagaaaaagaagaagaagaagaagaagaaaaggagtgcacaaaggaagaaggaagaaggaggagccatcca

SEQ ID NO: 135069 - DNA, 730 bp, Cannabis sativa
aaaatgttataatatattgatatcaaatcatggtgctcttaattattaatcctaattattttattagaaataaagtaactatatgtaggatgtttgtctatttatagagatcaaaatataaggtacatagaatagaacattccctacaattataataaataataaaaacaagtttttttttataatatttggcacaatactcgaagaattcacgtgacatgtatgacttttttttttaatattttggtcggatcccacagaaggagtaattatttaatgaatactttgtcacctaaatatttaaatgttatggtaataataagtacatggtttaaatggtgaaatttaaaaaggtgatgtgacatctactcatttcagtcgtgaataatttattaaaatttgacatcataatcgttgttggtactactatcataatttattaaatctgacctaattgatttgtccaaattttaataagaaaaatgtcatattagtatattagagcccaacaaatattaaatctccttaagtaattactggtaggtttcgtgttttgaaatagtatattaattaactcaaatcagggaatcccatgagatctgcatgtcagaatgtagtcagtttgatttgatgttacactgtgaaatcgctgacgtacgttatttaaagtgtaggaaatactccatttaacgtcagtgagtacactgtgggacgtacacagaaaattaaa

SEQ ID NO: 135070 - DNA, 629 bp, Cannabis sativa
gtgacaggtgcggtcacaagggaaactatatgcgagagacaggtgaaaggttgtcacgaggaggtgacctttggttgtcccttcgagggtttcgaaaaatggcacccataattattacttttattgcatttatgataccacgtcagaaaactcctcggttttcgtgtaggcgtggccattgttggctgttggattggacgactttaggcattccggttgccacgtgttgtgatcccaattaatgagggatatgggtatttaaaccctttgattcgaatcaaaatcccccattttctctaatttccttaacttccttattccctctctctcagagacttcaacggagattttcatagtttgcccagattttcgcctttctttgtggaattttctcaatctcaagtgctgtcgagagcaatcgcaggaacaacttatcagaactaaaggttagttttcgaaattcactgcatttttgttttttgtttggagaaaaaacactattttctgggtttcaacatctttgagggggttttaggaatacatgtttgtaagaaatacgtatggggctgttttttaggtaagaaactgggtaatttcagggaaaatgacttaaaattggcataaccgtg

SEQ ID NO: 135071 - DNA, 659 bp, Cannabis sativa
aataataatttataatagtcacaacttttttacttttactcacaagttttattgtgactaaaaataagattttttgtaatgcatagttattaagtcttaacttaataatagtgtaatttttttattttaaaaatatatagcttctaacaaaataaataaattaataaataaataagattgcatagcttggaggtgcaaaataagatcaatacaagtttaatgaaagctactacaaagaagcacggcaaaaagttaaaagtgaagataaataatagtacaaacaatgaaaataatgttagaactaaaaacaatatgacaaatcctaccacaaatcatgtaaagaaccaaaccccgacattgcttgacttattcagtacaactaatctattcacaaataagatcaacatacactataaccagaaaaaaaaaatcaacatataagacgtataaatatgataagatgagattaacatgcataataatataatattgaaaaaaaaaaaaatagaaactattctccaataatggtttgatatgtaatattgtaataatttggtgagtgttggatatttttagggtgggtttggtaatacttttttaatcagttttttgtttttaaaattagaaaaatgaaaatatttttcaaaatcatgttttat

SEQ ID NO: 135072 - DNA, 710 bp, Cannabis sativa
attaaggtgaatttttaattaataaataattttatataattaaagatgttgtggctactccctcattattaaaaattatattttcacttagacattaggtataggttctacctaaaaataatttcgttattaacataatagacaatcactaagattagagctccaagtgtggtcatccaaaaattattaaaaactattctaaatatgagcatttatcccagtttcacattttcttatgtcaaaccacataattgcttatgttttattcacattttactcatattatgaatattttatgaaattttataaaattaatgtgttaaataaaatattgaacatatcttaatatttgaatatattcttaatatatctagcactatttatagaatttatatatagcatttaaatcatataaatcttaagtaattatactaataataaatttacaaaagtaaataaaatagcataattattatatgataataaattaaatataaagtctataatatgtaattgattaggcatttatgaccatataatatctcaaatatttataataataataaatttgtataaaaatatgaattagtacaatttaattatatgaattttaatcaaatgcaaaaactttagaatacttaatgactgatttctcaaaatttattaatttaaataataaataacgtaaatttggtaataaatatttaatt

SEQ ID NO: 135073 - DNA, 614 bp, Cannabis sativa
agcttttgaattgtgcgagcaggttgtgtattttgctcagatatgctatcatcttttctccctgagcctcgtattcgctgggatacatgatttaccaccatctgtaatcactgcagatttcaatgtgttttgccttcatttccagggctagttttagccaagcgattagagcttcgtattcggcttcgttgttagatgccttgaatccgaacttgaccgtagcgtgcaggtgttgcccccgagcgtgatgagggaaatccctgcacgagatagttgatctgtagccgacccacccacatgtagtttccaggtcggtttatcttcattgttacttggctaaggtgctggcttggggttgctttctggtatgctttcttctttgcttgtgcattctaccataaagtcggccaaggcctggcctttgattgttgttcggggttggaagttgatttcatactgacccaattctaccgcccacttgagtaaccatccagaagcatctggtgaatttgtcgtaacggctggtcggtatatacctgaacaggatgagcttggaaataatgcctcaacttcgttgttgctagaatgaagaagtaggtgagtttttcaatcaa

SEQ ID NO: 135074 - DNA, 928 bp, Cannabis sativa
ttcagtagttggtggaggaggcaccgtcgactgactttgagtgaatgacttctttcctttgcctttgagccttttacccacgcctctttgatagtcagatctttctcctagaactgtttccagaacgtcaaacagattcagtactagatgtatcgctctgggattgtcgttcaagtcttttcctatgaagctccttcaccagttgctcctatttaaataaaaattattagaatatataattaatataaatagaatatataattaatataaaatataaactttaataataaatcattttattcacttacataatcttttgcagcagcttcattaacgaaagtgccagacggctttttcaaatgaacctccgtccatgcgtcaactccatgctctccaggaggaccccctgtacgaacataaacaatgaaattaatttattataaagaaaaatcatatttaacaattaaagtattaataaatatcattccgtgtcgtatcgaagccaatgattttgtgccttacgttgttggatatttcatttgttgccgattcgctttatttttacttgagcgattcaaaaaaatttcgctagtgaacaactcgcaaatcgacttccaactctccgtattcaagtggtcaggaggcaatccaagaactttctcccaatcttctgtttagtttaatgttgtttaaaccacttgtatctgattgtctttcgctcactatacctctcagccatctccgaatataaagtcctcataagtaggtctcggtggggattcccatcaatatcaaaatagtacttagaataatttaaaaattagattaatttacaaataaggatataaaataattacaaccatgaataattaaaaatcactcactcttattcgattgagcacttgatccttatattgttggggtacat

SEQ ID NO: 135075 - DNA, 1273 bp, Cannabis sativa
tttactacactctcactcatattatttcttttgaatttattttgtgttcatcaatcaatctttcctttaatcttttctgagtttttaaagatctgatggctgaagtggttggaggagctcttctctctgctttgcttaacccattggtgaaaaagttgactacagaggtgaaggacttcttcaaaggaaaagatgccattctcaagctgctcaaggagttcaaggctttgctgtcctctgctgatctgctgctcattgatgctgaggagaagctcatcaaagacccaagagtgaggaactggcttgatgatctcaaggacgccatttatgatgcagatgacttggtttacaagatcgacactgaagcatggcgaaatgaactggaagatggtggtcctcatgaatctcatagtggctgcacttgtactagcaaggtaataattaatcaattacctttgattaatcacaattgctttttgtttagtaacatactttcttatttaggctttacatttgattgaaattatttcgggttggtttgagcagtttatttgaattagagtgtttgtaaaagaatttgtacaccacaaatagttatgagtcttttccaatatatgacaatataatataaaattcttcactctttctctatcaagtaatctagtgcataatacttgtcaggcactcaagagactcatctcatcaactcctttaacttgttttgataagaccattaaacctgagatagaagaggcacttgggaaattgaagcttcttctagacaataaagatcttggtttggaacgtgtgaagaatcataagcttccagagagggtatgtgctcccttggtggaagaatctgatgtttatggaagggatgttgacaaagaagctattgttaagttgcttagttcggatgacacaagtggtggtgacaaattgtcagtgatccccatagtggggatgggcggtattggaaagactactcttgctcaacttatgtacaatgataaaagagttatgaatacaatgtttgatactagagtgtgggttactgtgggagataataacaaagtcaatagttctaaagtaatgaaaactatcattcagacgatcacaactaccaaatgtgaaattgaagaggagttccaagttttaaatgaagtcaagaaagttttgactgagaagaagtttctcattgttctagatgatgtttgggatgaagatagcaacagatgggacgtcataaaaagtacttttcaatctgggttgc

SEQ ID NO: 135076 - DNA, 658 bp, Cannabis sativa
gtcgacctagtacgtcgcacattttaacacttagttaattttcatgttaccttgtggtatgatttaacacgctcttccttattgttcgcagatagaccgcctcgacctgtattggacccgactagcaaagaagtcgctgaggttctcggttgtctccctgttcaagatcgcgactggcgattgctgtgcacgactttgaaactgcgggaacacaagttaattccagaggacgccagccttatcgggagccagtatacaaggagccgtctgaaaaacaaaaggagaaaatagacaagcgtctttccaagcaggcttctcgaccgacatcaggtaacatatcgcacatatagacttatgcatttgaatttattgctattttaacttatcttttcttgtccttgcagagatgacttttctgaaacaagcacccgttcttaatcgcaagacgaagattggaacaacgacgacttctcccatcgttcccgagaatcaaaaaagcgatgtcgtgggtatccttgccgcggattcatccaagaagctagttaagcctacgcaagacaaggggaagaaagtcttgatcgatccagctgttcgggctcacgatttcctagttcttcaggagaagttcgtgggcgaggagttcatgtccaaggcggag

SEQ ID NO: 135077 - DNA, 624 bp, Cannabis sativa
  modified_base (492)..(494): a, c, t, g, unknown or other
catttgcatctcgaaataattgaggtgggataaaggatcttcctttccagtatacatcttccacgttggcattttaaacttgtggggcaactccaggatatttatctcagaggagaaaggggttccacgtgctcggtccaactcgagattgttgttcctctgaccggccatgcctcggaacatactttttagttcatccaactgtgcctgcacggctggactaacctgtttggcctcttggccgatctgagtcacattagcatctttttgagcaagaatttgagcgcaggttccgggctgcacgatcggcatgtcaagctgatcatccacccctctcctcctattcaaatcatttttgagatcatgagtcatccccaacctatcaaatacggaaacgcctggctgtcttagtgactggttggtttggccaattagctgaccgacaccattaacttggttggaattggtgggtatgacttctcccgatgaatnnntagacaaggtctgcccgcctaccgttttgcccacaggtggacctcgcttttagccaacgacagtgagtctaattttgtaagcgacaagtagtttaatacgataaaaatatagtaaagcaaataaagacac

SEQ ID NO: 135078 - DNA, 552 bp, Cannabis sativa
tccgacctgtaaataggcaccaattcacttttttacagaacttaactttgattttatttgaattagttatgatttttgaaacatcgaaaaaaaatcagggatggtgagaaaaatatatagcacttcaataaagatgctattataattcagtattaccttaagttaatttatgtggtgagaaaaattatttgttatatgagaataaaagaattaaaatagatattgtgttaaaatttaaataatatttattttacatttttataaaaaaaaagcttcattttaaattttgccataggcatctcaacatcttgagacgaccatgtgggctgcccatggttgaaaactgcatgggaggctacaacagatgcatgtttgcttatggtcaggtgaatttacatttgatactatttgatgtagtagaatcatcattgatgaggtaatatcttaattattgtttatgtaactttagggcccgtttggtacgcaggattggactggattggactgaaaaggattggactggactggacaagattggattatgctgaaagt

SEQ ID NO: 135079 - DNA, 688 bp, Cannabis sativa
  modified_base (345)..(346): a, c, t, g, unknown or other
cgtaaattcatgagtgattttaatcactttgtgaaaaaaaaaaaatattgacacttatatgagaattaagttacgaataaatatgagatatgatatatatagtaagaattaaacattttatgtcagtgacaatataagattcactacaagaaatatcatttttgtcagtacatttttgtgctggcgaaagttagtattacgctggtaaaataaaattacttgtgatgtgttggcaaaaaagagggttgacaaataaattttggtattagaacttttgccaacataaaatgaaaagcactggtaaaaatgactttttccagtgcgtaaatgcgctggtaaaagttnnattttagccactgcaaatgtatgctggtaaaactttgacctctttgccagtgcagtatgcgaaatgcgctggtaaaagtactctgctagtataagtgacattttttgtagtgattattttgatgcatagggtggagtaatacaatatatataatataaatgatacttaatgttagagtaagcttgaatgtattagatatgtagaattatatagcgttatttgattcaaataaatagaagcaataaaggtactaggggtataccaagtcatataagaagctaacatggaaatagtgaagttagtggcttagttagcaatgtggaaagccaaggcttggtatac

SEQ ID NO: 135080 - DNA, 695 bp, Cannabis sativa
ttgttattgcttcgactcatattccccaaaaagtggatcccgctctaatagctccgaataaattaaatacatgcattaagatacgaaggcttcttattccacaacaacgaaagcactttttcactctttcatatactaggggattccacttggaaaagaaaatgttccatactaatggattcgggtccataaccatgggttccaatgtacgagatcttgtagcacttaccaatgaggccctatcaattagtattacacagaagaaatcaattatagacactaatataattagatctgctcttcatagacaaacttgggatttgcgatcccaggtaagatcggttcaggatcatgggatccttttctatcagataggaagggctgttgcacaaaatgtacttctaagtaattgctccctagatcctatatctatctatatgaagaagaaatcatgtaacgaaggggattcttatttgtacaaatggtacttagaacttggaacgagcatgaagaaattaacgatacttctttatcttttgagttgttctgccagatcggtcgctcaagacctttggtctctacccgaactcgatgaaaaaaatgggatcacttcttatggactcgttgagaatgattctgatctagttcatggcctattagaagtagaaggcactctggtgggatcctcacagaca

SEQ ID NO: 135081 - DNA, 821 bp, Cannabis sativa
accagtcaagaccatttaatttgggttggggaattgtcgggtttatacacagttaagagtgcttataaacgtctccaggagctgaaaggtttggtgaactttgaggaatcacaagtgaatctcttttggaaaaaattctggaacctcaaaatgcctccaaagatgaaaaatttagtgtggagggcatgtacaaactgcctccccacaatggtgcaactcagaatcaaacatgcagtaccccattcacaatgtcatgtgtgttctattgaagaagagtctatctcacatgctctagtctgctgcccgattgctaaagattgctgggacagggttggcattccctcgattatgcagcaacaacacagttttctggactggtgtattagcaattttcagagattggataaggagaattgtgagctgctggtggctgttgcttgggcggtttggaacgcaagaaatgaccgtgtatggcaaaacaagatcaagacagtggaaaacattgttacgtcagcaaaaggttacctttcacaatggaaaaatgctcattcttctggtttggagctcttgtctgctggtttgaaccaaggcgacggagtcgagcattgggtgcctccaatggaaaataatgtaaaggttaacgttgacgcagcgatctttaaagcttctcgaaagtttggtgttggttgggtagccagagatactcgggggcttctcatcaatggccatacaaagttattcaatgtacaagctacaccagaattggccgaggctgtaggaattcgggaggcgttaagctggataaaatctagtggattgca

SEQ ID NO: 135082 - DNA, 509 bp, Cannabis sativa
gccatcttttaaccatctgcaaaccagaagcagtaaaattgcagtgaaaaaataagtgctctgcactctcatgctgtgtaacacaaaattcacactgctcagttacattcatgcccattttcctcaatctatctttggtgcgaatccttccctgaatagctaaccaggaaataaaagagtgttttggggtgttcaacctcccccatacctgctgagaccacaaaactttcctttgaactggacagagaagggcatacccatgagacacatgatattgttgctgctgagaacaaaactgggatcctgcaatgtctcgaaattgatccttgagagttacaagactcctccaataccaactactctgagaggaagccttataactccaccaatcattttctttgagataaacactattgatccaccgcaaccataggctatcctgcttttgagctattgcccaaatatacttccccattgcagcttggttccattcatggattctcctaaaa

SEQ ID NO: 135083 - DNA, 924 bp, Cannabis sativa
  modified_base (550)..(560): a, c, t, g, unknown or other
  modified_base (702)..(702): a, c, t, g, unknown or other
actatgattgagtactagacttgatatgggtgggaatgcactcactcactataggctcaaaaattatgaagagcaatgatgaggaatttaaaaaattgaagaagaggatggtggtctcaaaactctagttgtttgatagaatataaactatgttaaaagcattggatgagaatgagacaatcctattcattttatactatttcaaaattaaggttaggattaaattataaggaaaaaatgataaaataatagtaaaattaggactaagtggtcgaccacataaataggtcccagtagttataattttgccatttttcaaccatttatcttttctttcacaaatgccatatttttcaaatttcaatcctttaaatgtgaaaattatctctttaataattaaaattaattatcaaataaaatttccatttaatttatttattaattagacttagtaaagtctctcaatttacaaataaaccctaaaacctcttttcttcacaattaggtccttgcttcgtgagaactcattaataagacatagtctaatttnnnnnnnnnnnttgattaattaaaatcaactaacttagtcttacaagtagtattatatcaactagtgtagggaccacgagcctatataatgaagcttccaataagtagctttagaatttaccaagtagattctctaacttattaattcctccntgcaccactatagatttggaattgtactcttaattatatagagcgctctatatgttccataataccgatacgttttgaaattatccatcattataatccccataatcaaagatcctctataggtaatttgagtagggataaatttaccgttccacccctcaatgtattatacccttaaaacacttagattcctataaatgatatttcagtacactaatataa

SEQ ID NO: 135084 - DNA, 702 bp, Cannabis sativa
agagctttaatctagtgccaggcaatcaaatttctaattgaaaatgtttcttcagactgtcaagtgctcatctcaaagattctcaagaagcatagggatctttcgaccctttttgataaagtctggaagattatctcctctgtttatcacactttcttggtgtaacaatatgtttcatccctaaaagcttaaatgttttgctcaacaagcattaggaattgatgaatagttactttgaaacaattgtgttttaaattctaactaaatctttgtaacttggttttaccctgtttattctcttgttatctttcaaaaaaacattaaaaaaatcaaaaataaaacagagaagacgttattcaaaaataaaacacaaaaagaaatatatgaaaaaaaatatatatattgatttaaatataagaaacaatatcttcaaaaaatttcttttttttttttaatcgaggggcttgttattttctatataaataaataatgaaaatgtattgacaatatgtagtcattttcgaatttttttaagattttttgtttattttgaatgattttaactaaaatagtgtctgcttaaaaataaaagacaactaaaatagtgtcagatatatgtatattaattaatatcatttttttttcaaatttaattaaaaaataaatcagttaggcctgcttttttcttggcgccaacgtaaa

SEQ ID NO: 135085 - DNA, 1759 bp, Cannabis sativa
  modified_base (1720)..(1730): a, c, t, g, unknown or other
aggaatttcagttgcagcaaatactttgaaagtctcttcttctttttgaacacgcaactttaactcccccttctgtacatcaattaatgctcttcccgttgctaggaatggtcttcccaagatgatatgaatattctcatcttcctcctttggcttggctttgtttggcacatcataggtcttaccacttctcaaggtaattgcattacaattctcctttggattgactttagtagtgctaggcaagttaccttaagccctgttagtgttttgagcaaccaactgccccacctgagtttccaagacctcaatggaagacttaatctccgtcatgaatgttagtaacgtgtctaattgaggattagaccctccactcgaggcttattgttgttgtggatactattggctttgctgagattgattttgttgaggataaaactgcttctggaagttctactgacgaccataattatttggatagtttccaatggcatggcctggctctattagcaaactatcgacatctatagggcaagtgtcagtggcatgagatcctccacacaacttacaaacaacttgagcttgtttggcttgtgcagtcaccagctttgttaatgcctctacctgggctgtcaacttagttattgtatcaatttcatgcattcctgcaacctttttagttgggcctctctctgttgaccaatgctgattagttatggccatctcttcaagtaattcaaaggcctcattagcacttttcctcatgaaagctccactagtggcgacatctattagtattcgggtgttgttcaatagtccagtatagaagttatgcacttgtaaccacttttcaatcccatggttcagacacttcctcaataaatccttgaatctctctcaggcttcataaagagattcgttgtcatgctgggtaaagttgttgatttcagctctcagcttggcaatcttcgcaagaggaaagtatttggaaaggaatttcagggccaattcctcccagttgttgatagaattggatggcaaagataccaaccaactcttcgctcgctccctaagtgagaatgggaacagccttagcctgatggcgtcatcgctaactccgttcatcttgaacgtctgacaaagctctttgaagttggcgaggtgcatgtttgggtcttctggtggcagcccccaaactggactaaagattggaccatctgtagtatggctggcttgatttcaaaattgttggcgtcaacagcaggtggccttatacaagatttggccgctgacaagtttggtagcaaatagtccctcaagctacggtcattgttgttatgaccattagcttggtcttctacaactccttcattattgccattattggcgttgtcagccatgactccttcttgttcaatctcttttgcggcggtttccaatttcttccttcttctattctttttacaagttttctctatttcaggatcaataggtaatctggcaattgcaccttgacttctcataaactagttaaacgtgaaaaagataagattctaaaacaaacagaattagtactataattgaaaagaaaaaccaaattagaacaaaatttaatttttaataatgttaactatcaatccccgataacggtgccaaaaacttgttgtgatattttacacacacaagtgcacatagcgtgacaagtagtaaactcaccaannnnnnnnnnnatcccacaaggattgtagttaagtatgtt

SEQ ID NO: 135086 - DNA, 566 bp, Cannabis sativa
ctaaaagctcagtaaggaaatgcttaacatacaatagcatttaatacaccatacataccttaaaattcacaataatacgattccttacagtattaacttatccagttttagcgatattatacaccttagcccataacataacttaaataattcttgatatagaaagttatatcttagacatctgtgctaaatgaaactattacatatatgtagggatcacaaccctaacattatgcttatagcgcaatcacaataataacatataataattattttaatcatatcatatctttaccataatgtggcttatcatagccactgcatacacaacctgggcctaacctggccctataataacctgggcacacttagccctaccattattatggaataaggtatctctacattcaacagcactgtcgtcgtatcataccttaccgtaacaatgtcgtacacaaatcagacaaatgcagggtagaatatctctaaattcaacgaccttaccccatatcataccccgccatggcccctcatttgtaactgagacgttagcatacaacacacaa

SEQ ID NO: 135087 - DNA, 816 bp, Cannabis sativa
tttctccttttctcaatatggtatcagagcgggagagataagccctcccgtccgatccttccagccaccgcgtctgcttctccggtgcagctgtgttcttctaagcttcatcttcttcctctccggtgatcctcttctcgttctgaacattgattccgcacaatggctacagaagaagatcaaaccagaactcctgctactgttgtcgatcttggcgattcttctactaatcaaagtcttcgaatcactgctgccaagaatccaatggaagatccttccagtcccttctttctccaccatggagataaccctggaaacgccctggtatcacaacctctgactgggcaagataactacatcgcgtggagcagggcgatgcaactcgcgatctctgtgaaaaacaagatcggatttctcgacggttccattcctaaacctcatatttctgaattgaatctttataatgcttggtaccgtaataataacattgtcatatcttggattttaaattctgtttctaaagagatttcatcaagtattctctatgatgaaagtgcctcggctatatggaatgacttgaggatccgttttcaccagaaaaatggtcctcatatatacaatttaagaaaagacttaatgaatcttaagcaggaaaaccagagcattagcatgtattttactagactcaagaccatttgggaggagctgaccaactacagacctacatgtacatgtaacggatgtacatgtggaggagtcaagaaacttcaagatcatcatcacatggagtatatcatgtcgttcttgatgggactc

SEQ ID NO: 135088 - DNA, 500 bp, Cannabis sativa
ccaatctaggttgaaagcttgaatggtaagaggtatatttttgtgtgtgttgatgatttttctcgattttcatgtgaggattttttgagagaaaattttgatacttttctagcttttcaatccttgtgtttgaaattaagagttgaaaaagattgtaacattggtaaaattgttcggattaagagttatcatggaaaagaatttaaaaatactatatatgatgagttttgtaaatctaacgatattttgcatgaattttctgctcctaaaactcctgaacaaaatagagtggttgaaagaaagaacagtactctaacaaaaatggctagagtaatgttgaatagaaagaagcatacgaggcgtctttgggccgaagcaatcaacacaacttgctataccattaacaaagtgttcttacgtctaggtactcacaaaacaccatatgaaatctggaaaggtaagaaaccaaatgtaagtcattttcatgtgtttggatgtgt

SEQ ID NO: 135089 - DNA, 524 bp, Cannabis sativa
aagaatttgattttagagatacgactagttgattctatttcctctcctatggtaatctattatgataatcatattgatgttttcttttcaaagaataatgagattagtagaattctaaacatatagaaataaagtatctcactattagagacttggtcaagaaaggaggcattgtgatagaatattgtaagaccaagtcgatgttagtacatcatctaacgaaaggattaagtgtcatgttgtttaataaacatgttgttgatatgagcatttttataaattttgcacctttgggttagtgggagtttcttattctatcttttgagattacatttatatgtaatttacttattgatgttatgaactacttggtgggccaataatttttttttattagatatttttgcattcagttgtgctttgtaatattctcgagaatgattgaattgaaagcatgtagtttatatcttgttgtgattattatcttttaagtttaattacttaatgataatgatattttgttg

SEQ ID NO: 135090 - DNA, 782 bp, Cannabis sativa
cctcctaccactcactgacaaactgtattacataaagactttaggttgctccgttattcaagaggtggtaaatattattttgtgttcaaagaaccataaaatatatcataaaaagaaagttcgccaattttaattttggggataaaaaaaatactttgttatcataaaattaaaaagaaaatatatcatactatcacattaaaaaaaaagtaaaattaagtgtaattcatgaaagctcttgaacttcactaactatgattttttttttattatttattttattctgctctttatagagatcacaattaataacttctaatgtagattaaggagacatcaaataaatatatttatatatatttatattaataattctaaataattttcttttccaccgacatatatgtaaatatatttatacatatatatttatattgtgaaaataattccattgctaacaaattttatataatgagtaatacttggtctcataatatcttcttgtatagccacaaatatacttgcaggttgtcctctccaccttctaattggtgttagggcttatatcccacattcaagttcacttcatgaataagttgctttagtattgactttgctgaatggtatatttcttctatgaaaaattattgctttgtgaggtggaatttttttaagatataaataagaatttttttttcaaaaaagttatatatattttaattataaagatcatagtccactaattaaactcactctaataagtcacaaattagtttaagtcc

SEQ ID NO: 135091 - DNA, 665 bp, Cannabis sativa
ccatttacaaaactagatatattgccttacaaaaccaaaaaacacgtgccataaaaactaaaaaaccatattagtcataattaaaataacaatattgataattccaatacctttaaattaataaagacaatttgactcataaaaagagcaactacaatagagaactttctgtaatgtaaataaaaggaaagaaaatcatgtaactaagataataaaaaatcataaataatctaaatcatatttaaaggtcaatacaaaaaagccaccactcaagcaattacataaattgtaattaaagacttaacagataaaaataattaataaattaatgataaaaaaacttactgtaatgtaaataaaagaaatgagaaagtaaataataaaaataataaagatcataaataaggacttaaaagaagaaaatataattaataaattaatgaccaaaaaatccactaaccttaaatacaataaaacaataaaattaaatcattaatagctttatgaaaaacaaaatcatacattttaagtaaaaaatactagtaagaagatctaaaatatatactgaattataaatggtaagaaaaaataaagtgataatgtaaaaataaatttcatttaatgtaatttaatgagtttcgtaaatcttttcctaaaaaagtatc

SEQ ID NO: 135092 - DNA, 1240 bp, Cannabis sativa
  modified_base (77)..(78): a, c, t, g, unknown or other
attgttgatttagataagaaatttgcaccttcatttcttatgttttgagaatagcaatttagtatgtaaagaatatnnatatgattggtaaatatgaagaaacttaaatttaatttgtttaagtgaacttaaattaagaattaatacaaagattaaaaaatatatataaagagacataatatgataataattatagttcaagacaaaaatcctaattattcgatattttaatagtaaaaataagtaaaatctaatataaagattatgattatgtaaggagaaatttttaatcatccatataatgataaaaatactaattattctatttaaatagaacccaaatggaagttgtattctttattttgaatttaagtttttcatttcaaaagttttaggcagtgtacatacaaatcaatgagttttttttacgatgcaccacactcaaaattgggcatactgatgtattttttttttttttttttatgatattcaaatgattataatcttagttttatatatatatgatgatatttattctagttatttaagacttgtgtgttgtaattatttaatacattttaagagaatgagaataattgccaatacaaaaaataggattcaaatattatatttcacatgcatataaaataaaagaggcacatgtgcaacaggttgtagagggtgcaccataaaagctcctagtatattattatggatgttgaaatagtagggacaatatcaatttaaaaataattatattttctgtaaagggtgtaccataaaagttaattgtatattattattgatatgttcataaaatttaaaaatttatttattttatttaaaaataaaataataataaagaaaaaatattttttttgtaacttttaataatgtggtttgaatagagttaaaaagaagaaaaaacttaaatgttgatgattaattatctatatcattctaaatttttatctccagaaaacatataagaagttgttttagaaataataatactaaatcttttttaaaatttccctttataattacatttaaaatttgaaaatcagcatcccaacttacaacatactttatcacaaaatatagaaggttgcactgtgactttcttaagttgcagcctcaacatatggaactttttttttttgtgactattctaagtcgttatttttttaaaaataagttttcttttttttttttatttaaaaaattatagataaatcat

SEQ ID NO: 135093 - DNA, 645 bp, Cannabis sativa
gcttgctgtagcagccaatgcgcggtactctgcttcagcagagctctttgagattgtaggctgcttctttgttttccacgatatgagattgtcaccaagaaaaatgcagtacccagttgtagaacgtcgagtaattgggcatgatgctcagtcagaatctgagaacccccgaagggttaatgctgatgtagatgaataaaaaagaccttggccaggttttcctttgagatatctgagcaagtgatggacagcttgtaagtgaggcgtccttggtgtggccataaattggctgagacaattcacagcgaaggtaatatctggtcttgagagagtaaggtatagcagttttccaatcaattgtcgatattgagatggattatcaagtggttcaccgtgttcattatctagtttcagcttgggatccataggggttttagtaggtttgctgcctacataaccagtgtcatcgagaagctgaagtgtgtattgcctttgagatatgaagagaccttgtttggcacgggcaatctcaaaaccgagaaaatatttgagattaccaagtgcctttaacttaaatttctggtgtagtgtgtcttgaagtgtatggagaagagaaatattgggccctgtgatgacaatgtcgtc

SEQ ID NO: 135094 - DNA, 512 bp, Cannabis sativa
tcgaaaatcaccattgtttacgttcgaaaatacggttcttgaaacgaacccgaatttgaacgtatttaagttgtttcagagatcaaaggaggttgtgtttaagtttatggaccccaatgatcatttttgacgtgaaaaaacagggtaaaaggctctgaaacgaaaaatcacagttttggacaccatttttgccggtgtaccgtgtttggagaagacaatctcaaaccgaccatttcgagacgaaatatcagtggtatttggtttctttgaggttctgggatccttgggaatattttccaatcgaaagacgcatcgacacgggatgtagaaagacattggagctcgccggcgtcggagaagacgactacgccgacgtaactctggcgaccacgatctgggcatatctgaggtttttttccatatttttttttgtagatttcgattctacatattattctagggtgtttggtgaagtttcataattttcttgcaattatttgatttattatgaa

SEQ ID NO: 135095 - DNA, 904 bp, Cannabis sativa
ttcaatttagcataaattatagtacttatttcataaatacctaaacataacaaaaattatattttttaataggtagtaaaaaaattattaacaatttttagactaggaatattttaataataattctgtccaaaaaaaattattaacaatatatatatataaataaatataaaatttattattcggttatgtgcattaaaagaaataaaatatttagttagctatacatttaaatttttattactaaaaacttaaattattttataaaaaaaattacaaaaccgcgcaaagcgcgctttatttgactagtataagataaagtgagagtataattaagtgcaaagagtatatacaagatacgagacaaacacaacgcccaagactcttacaaattaagataatagaagaatatgtatatattaagctatttaatgctattacttaatgagattgttattagaaaatgcagatacttttttaaatttctcaattgagaataattatttatatgttaaaagctattattaaaagtaataataatatatttaattcatcttttaaactaattgacaatgagatgagtagtcatacatcttatatatggtattatatctccacacattactaatgtggaactattaataatagatcatccttatatttggacctaaaaaagtgtgggtataataaacaaccgataaaggaccacaacttcaaatgtgacatttgaaaaaatcccacaaggctaaattggaaaatttatgagtgtatatgtcgagaaaattgtgatttttttttgaaattgatcaaagacaccaaaaatagaagttggcacacattggccgaagggtcttaaataaaggtcaaaggcagaaatagcggaattttttattattattattta

SEQ ID NO: 135096 - DNA, 1382 bp, Cannabis sativa
taaaattgaaaaatgtaaaaggtacaaaagtttaataaaccgtgtaatgacaaaaaagaaaaaaaatgatgaaatgtggcatcaggtgtaaaaatctcttttgttttagatcacgaattatatgatgtgtttttttttttatagatttgataattttttttcgagatctctattcttggtgagatttttttcaatttctaatatttgttaatagtcttttattaccctatatcgtttgacaatatctcttattattctttttttttagaccacaaattatattatgagttttttcttttttcacagatttgtcatttttttttctcgaaatctttattcttgatgatattttttaatttttaatgttttttatctctattttagtattgatttagtcttctattaccctatatttttaataatactctttctctttctttttagtaaagaatttataacaaaattattcacttatgtataaaaaagttagtagttaattaactcaagtatatgatttattttatgtcaagagcaaatttattttgatcaatagtgataaatgagatacgataatgatagcgaatgtagtggtgactacaaatgagttacggtgataatatctgttttgaatgacaacaattttgaaatcatatgatgagttttctatagataatttatcaattgttttttttttatatctctattttgtgtgaggattttccaacctctattttttttattttactataacatttgaaaatatctttttgttgctattttttagataagaaattgtatgatgagtttttctaccatgttaatttatttttctgtataaaaattatgaaaaaattaagtagaatagttactcatactattaaaaaaatatcaattttaatatatttttataacttaattatcagtaaacaaaatataacctcacgcgaagcgcagtttatttcctagttattatatatcagtgagtaagagaatagagtggatatacaatgaattgaggcaatctccaattacatccaaggggcctaaggactcccatgcgtatgtaattagcttttctatatcaatcttgctgctgttgtgtgtgttttggttactgttttattattttcttgagcttggattatttggttcttacttaacagtatcaataattttttctttcttttactaagagaggtgtcaagaaattaaacacgaaatctacaaaacttttacaatgttttattaagtggggtacattttacttgtcatttaaaataatcttacataaacataaaattaaaataaaatatggatgtatatatatatctctatatgcggaattcttataatattacttatggttatatatatatatatat

SEQ ID NO: 135097 - DNA, 574 bp, Cannabis sativa
ccctggcagctgtgggtgccttattagggacgaagctttcgaccgttgagctctgttgtcctcttccagcatgagggaggcggtcatcccatcttggatgcggttcactatgtcatcctcaggtcgcccgttctcttctttcgttgagagtctttgaccttttgtacctcctccattctatggtgcttcatcaccaggcctcttcctccggcagctgttactagcaggggaggtattgaagcgatcagttgatggtcatcaagtcgtacctctatttcttgatggcagcgagaacatcttagcattttcgtgtcacttgtattagggaagaaacgtcgcttttagactgtcgcttcccacagacagtgtaaaaatgttaacggtcagaactcattaacgatatagaaaacatttttaactaataatattgacaaactttaatggaactttgactttaattccaagaagaaagaactttagaatctctaaagtgtttgaaagtaatatctcataaactctctttcaatgataaaagtttttccctctggccaaaaaaaactcccctacaatggat

SEQ ID NO: 135098 - DNA, 900 bp, Cannabis sativa
catcaggtccttgagataatttggaagctaaagatcactttgcgccttagcacctgacggagccatgagcttagtgcgcccaaagtgctccattttggcaaagtgctcctctttggctaatgagctcctatttggccagtatgctcctccttggctaatgagctcctatttggctaatgagctcctctttggctaatgagctcttttttggctaatgagctcctctttgttggacttctatatctagaagaaaaattcatgtacaattattttggattttttgagagataacataaggaaaatataatttaaaacaaaatgaaacattttttttacatataaaatttttcttcttttaaatttgttatttgttatttatttattttgttattaaacataaaataacaataatttaatttattttattgttagttatgtgaagaaaaaaaataataaatattaaataattcaatattaaaaaaataattaatctaaaataaccgatccaatccgcacttttgtggattgaatttgagctattgtccagattggattgaatccaaaatacaaaatccgcacttaggctatctttggtaagaaggagggagagtaggatggatggagagttttgaaaggatggggagtaggagaaatgaaaatgatagttactctctttcatattgtttggtattagaagtaaagttagaagagtggagaataaaataaatattaaaattactatttatcatttttaatataattgtgtattttattttaaagggtagaaaagtcattttaaataacttttggggagttctatttgcatcccataaaataataaatataccccattattaaaaaaaatataaacttaaataattttaaaaaattactcttaat

SEQ ID NO: 135099 - DNA, 565 bp, Cannabis sativa
cttccttgtggcgtacaatccttgtggcgtacaaagacttgtggcgtacaaagactttggcgtacaaagacttatcgcgtacaaagacttatcaaatatttacaagttatctgatccacgtgtcccatttcgactggtccacgtattttgggcgaattcaggggcaacagtaacaattgttggtcatcctcgactggctattgttgttgttgtgggggttggtcgttgtcacaacgtgtacatatctcttcaagtgggggttgttttgtctcatgaggaactcaatttcttccttcagattgttgcactcatcagcatcatgatcgtagtcattgtggaatcgacaaaacgtattcatgtctcgtttgcttatatcctatctcatgggataaggcttataatatggcaccactgagtgagttgcattataaatgttttctctagtgttcaggagaatgatgtaggtagtgaactttgaggttggatcttgtctggccggctcggtggtattctttagtcgcttgttatcattgttgttaccgccattactggtattccccctctt

SEQ ID NO: 135100 - DNA, 1726 bp, Cannabis sativa
  modified_base (239)..(240): a, c, t, g, unknown or other
  modified_base (1680)..(1698): a, c, t, g, unknown or other
ttaaaatgtcatttgccgtctgtaatgcatatccctagaaagacgtttatagagttgaataactcaacatagacctaaccatttctaaacttgtgcgatttcttctttttacaactccattttgaactgcatatccatatactctccatccctactagttcgcaagatctttaatgttttaactagttggttttgagccaaagcctgaaattccagaaacttttcaaacgtttcagatnncttttgcattaggtaaagaaaattatatctagagaaatcgtcaattaaagtaaaaaaatactcataacctccattggcttttacatttataggtccatagacatctgaatgcactaacctaagaggttctttggcacgctctccatttgaagagagagaacgcttagtcatttttccttataggcaagattcacaaactagtaattcacctaagacgatatttttcaatggaccatcttcggttaacttgtgaagtctgtcatagcctatatgaccaagtcgcaagtgccatagatatgtttcattattattatcaaactcttttcttttatggtttctaggtttagcaacattgaaaagttcgttattaagcacaatttgtactttcggtctcaaaacataaagcccttgctccatgtaagcaacgcataattgaaatccattacgagaaatagtgcaaatagaactcgaaaaattcaattgataaaactgtgtttgtaaacatgaaacactaatcaagtttttactaatattaagaataaacaaaacattgtctaaaactaaaaatttcttttgaaacttgaggcgagcttttctcttagcttggacctatactaattttccatttccaactttgagctttaactcctttggatttaaatgatcccaagtttcaagcagcttcaatgaagaacaaaaatagttagtagagccagaatcaataatctaaaaaggatatgccattctctaaaacacatgattcaaaaacaaaagtgttaccttcgttcgaattttttagaagtttggaacatctttcttcttgatgtcccttcttatcacaatatgaacattgaagagtacgattgtccattgttctaatttttgcagcaatgccagaagcatcatactcaattactatcttcctttttctcatgtctacaaattttgagggaggcctccttgcagacaaagtccgctcgtaagcatgcaattttgcattcagcttacctatgtcggatgagttaaatttttttatcatataagatacaacaaatgcattatactctggtggaagactattgagtaagaattgaacatactgttgtcttcgcaaagaaattccgagtatttttgcttacaggattttcaaatcaaaaacaattatatgtgacttgatgctctttgtaggagacatcttcacatgatgtagttcatttgcaaaggcatgtaaaaggtgagaggaaggaggttcgaggtgtgggtaatccattttgacactacaaatatcaattaacagaaataaattatttggttctttaaattcgtacacatgttcagaaaataacaattaaataaacatgtttgtaaaaatataccaagaaaaaaacatatttaataattttctaaggtttccaacaaactaatacagtgtcccgtttnnnnnnnnnnnnnnnnnnncatctattgaatagagtagtcaactcat

SEQ ID NO: 135101 - DNA, 829 bp, Cannabis sativa
gactccaaagattgagaaaatcccgattagggggaaggagagtttgaagtttgcgccaacaagcaactccatacgcctggacaaattcagacccagcatctccaggtgcggccgacaaggtctccatgaccttgctcgaagaagcagtagcgtgggttgcctcaggatgaggagtattggcatcaaaaacgacttgaggaggaatttgttcttggatcttgttatcagaaacctcgagatcgataggctcggccagtgaatttttcttgtgggcagtggttttactttggctcttaggaggaaccacttcagcagtagtagggactccagggttggataccctcttcttcccttttcggtccatgatatcttcataacccatgtctgcaaaacaaggccaaacattacaattgttaaaagaggctcttgaaaaagggtaagagtataatttttcacctaagggatttaccaaagtcactaaggagcgagctatcactagacgaaggggtagagggaccataatacccactaaaatccctacaacttgtaatgttgaatatataaaaatgctcgattggttctaaatctcagctcacatctatatgaccttccctatcttccatggtatcgtattgcccagctatacaataatatgactcgtgatagttaaactagaactggaatctaggataccagctatcaaacttacgagcaaggcagtccacgagaagggaatcctaaatataaaaattaaggcaggaatcttggaaagtgtctaatgtactacgttcagccctaagtactatgggagaccaaccacattgattac

SEQ ID NO: 135102 - DNA, 702 bp, Cannabis sativa
gaatcatggaaaactagcatcgctctcgaagaatcacaagcctgtgaagaaacgaggtccatcctcatctggagatgtcaagaaaaccaagtcgatggatgcagttctgggaatagaacccatcgatttcactgatgaagaagatgacgttcacgaaccagattttgaacagcatcaagttctttcaccacgatcatcacttcgtgagttgcagaggcacgacgatattcgaaatgatttcaatcacgtcctggaagctaaccacagttgcagacgagaagtcatgacaggtaattcccctgttcccccaattcttaggtcaggttctgttattagatctttagatcattcttttcaggaggcttcgattgagaaacagaaacctgataatgagaaagtaattgtaaaaatcacaatggatgatatagaaggggaaattgaatattggaactctgctattgtatgttatgtgttgggtgcaaaccccccactggatgttctcgaaggttttgctagaagaatatggaaggagaaggtggacaaggttggacttctctcatatggtatttttctgattagattcacttcagttgaaataagggatagcatccttaatggaggttatactttcttcaacaagaggccggtgataatgaaatcatgggatccggacaccaatttcagaaaaggggatattcataa

SEQ ID NO: 135103 - DNA, 769 bp, Cannabis sativa
  modified_base (45)..(56): a, c, t, g, unknown or other
ttgtcatttaacaaaacacagggtccaatctgtaacttttgcaannnnnnnnnnnnaaaatagtatttacccttaaatttatactggttacaaactccaaattttaagtacttatgctgatatttatccattatattatattaggtaaataggctacaagtttttaagtggcattaagtgaaactgtaatttttgttcagtacagacttcaatatagacaaaaacacgtagtatctattagttttaggtgacgattggttgaaagaaatgaaattataggaatgggaatgagaataggaatatgaatatgaatgaaattgaataaaatttaaaaaataaattgataaaaaaaatcattaaattatttttcttgttacattggaatggtgtttcttttctctttaaaatggaatagtcattctactaaaatgtcattccaatagtttaaaatgcaaccaaacaaaagaatggaatgaaaattgtttcatttccattctattccatttcattacctccaaccaaacgccacctaaatcggagtctgtatcgacgaaattgaaagaaaattactattttacaaacattaagtatttatgccgctaaaaataaatattgactttatgctacttacaaatttaaaacttgtggtaattataccgctatttatcttatctatatataatataaaggaaagcatcaacaagtttatgtggcactctatatgagttttttcatctattcttaattttctcatatttgtcattttttt

SEQ ID NO: 135104 - DNA, 553 bp, Cannabis sativa
ttattttatttgttttgtttattattttagacattttaaaaaattttaggaacgtccataacagctgttatgttgccaaattttagtagattagaataaattttactaaaaaagcataaatatttaatcaaaagtacatagcacaaataactagttaattactagctagttataagaaattaagtgacctagcacaaataattataaacgcatttaaaattaactttgcaattataaatgatcaacaaacaaatgaatggattcactaatagaaaagtcattgcattttgggatccattccaatcaactaaatactactctagttagttaattacaacttaataacatgaactaaactaaaacaagatctatagtaatatataaattaattgtgagaaacgttgcttgttacattgtttaagtagtaactagttataattagtcattaaatacttaatttttttgttagaattttagttatggataaattatggatgcgtgaggagagagacacaatgagatttcaagtaggattcgatgcatttttagagtt

SEQ ID NO: 135105 - DNA, 840 bp, Cannabis sativa
ttttttaaagtgttgattgaattgttctttcatccagtaatgatttcgtctcaaatttttcaggtattgtcggattgtggtacgattttagttatgaactcataatcgattttatgttgtttatggatgaagcttttttttaatcattaatggagtttttttggtggaaaatagttttcaatgatttattattttacaagaagtaaatttataagttttcattttggttagtgtttcatgcactgatttattgtaattaatggagaagatagtatgttcttggtgagaagtggctgatttgtgtttttgattacggtaagtaattttttttgatatacggtatatattgcttacgtgtcacggtatataattctatttaattgatggaagttattaatgttattaaaatgtatattacgtatatatataaagatttccctaaaatattttggtctcacacagtggttgtactcactaaaagaaatttttcttgctacaactatttctcctaatactgtaaaaaaaaaaaaaggttttatgtcaacatacaaagaaaacatactaccattaggtgatgtaacaatatgaaatatatttgatatgagatcaaaatatcattgtactcctaccaaaattcaaactaccagtttatcgaccaaagaaaaagggatacaaaaaccactagattcaaaaatacaagtaactttttggtatatcataatcacatgaaaaacgcacatatataacagtcctatgtaattacaaacatatttttaaataataaaaaataaaaaaccctaaagtatactgtatcaaaataacaaccgctcaaataaaatt

SEQ ID NO: 135106 - DNA, 1019 bp, Cannabis sativa
aatacaacatgtactgcggtcggatgggtggagaaattttgtattttttttatgttattttgtttgttttgttttgtatatatttgttttgtttgttaatttaggcacttttaaaaattttgagaacgtccaattacagtctttatgttgccgaatattcagtaggattaaagtaaactaaaatttttttgtattattttgtttgtttgttacaatataacttactttatattgtgtttgtttatcctgaatacataatggttgttcatgcatttaatatttcgtatagattacttgttatatatatagctaactttaaattttatttgttaatggtgtagatatgaccaactcaggttcgggatcagattcagacccagaggcagagtgtcctaggccgatgcctacacgagaaactactcaaatgaatgaaatatccaagctgatggatcaaggcaaaagtgtggccctcgaggtgaatgacaaagggcaatactatagcaaaagctactccaaactattatcggctttaggagttagatgccctcagacgatagggttgtcctataaaaattggaaagaagtcaaccctacactgaaaaataaagttcggacagatatacaggtaagcagttatttgttagaattttgatttgtttttgattaattcagatgttaactctaattgtgtttgtttttcttcaaactagacaagtttcattgtgccggattccttcaaacatgattgtctgatccttgctgggaagttaatgaaagacttcaagaataggatgacaaaagatattataatgcctacaatggaagagaaggatgtgcaacgactagcacaagtcccttaaaagcatcccgaaatcgaccttactgattggttgagatttgttgaaagtcaactaactcctcaatttcaagtacgctaattatatttgtactaagataaactcttaaatacaattacaggtatctaatgtattttttttggcattgtagaaattgagtaa

SEQ ID NO: 135107 - DNA, 775 bp, Cannabis sativa
tagctaatcccgttaatcggggtccataagccaagtgatttaaaaactaatattaaacttaatttaactaaataacttgcattattacaaacttatttcaaatcaaaacatttatagatacatatctgggatcccgtaaaatttatttttaaaatattacaagtcattcttaccggccaacctaagcggcaaaattaaaatttctacacaatttcctgttggacccatcccttgtggtctaactttgttaatacatgtacaactcatcttcaaaactctcaaactcatggctaaagcgacagcgcctaactagtgcctgcacattagagcacccatgagccaaggcccaacaagacagaataataaaacatcatgaataattataacaattacacttcatagtatgccaatacatatatactgtgtcaccgcactttatattacattattccatatattataatgtcactataactaatgtctatatagcatagacccacgtattatgctcacacgtctcttttacatttaaggccttactaggatttgtctcggttataattgccaagtctaacctgattatgccttacccacgtaactctactcatatatacataatccatacattatgctctcacagtggttcatcctaatgatatttatcagggctaacctagttatgtcttatacatataactcttgatatataaatatgcatacaatacatttagtatatactcaaccatatgaagttttacggtaataaccctaactt

SEQ ID NO: 135108 - DNA, 1016 bp, Cannabis sativa
  modified_base (989)..(991): a, c, t, g, unknown or other
cacgaatgagttgcaatccaactcaacgcttctttaatgcctattatcttagcaatttcggatggaacacatccaatcttccccttcttgaatgcttctaccatagcatcatgatgattctgagctacacaacccatgccaaaagacaagactcgaaccaaaaaatactaaaaggaaaagactaaaaaaccatgtcaaaagacaagactaaagaaccatgtcaaaagacaagactaatagaaaaattaaattagtttcaacacataaatacgatcacatcattaaaattaattaaggaatgaactccttataattctaaccccataaaaacattaagtggaattaaactaataatatatagtaaattaataaatgaaaacaaaaatctgaaacggaggacgtcgttgagccgaaccgaaccactcttagacgactgctcttgaacccctcacagaagaagacgttgatgtgggaatgagaaaaactttggcataaatcaagaagatcaatacaataatcttctccttcggtaatgatctagggtttttttagttgattattattgtatatattaaataaaaagaatgaatgttaagggaaatataccatataaggaaaatatctattcaaatcatagtattaatttttaatctgacatataaagtatcttaattaataaataaacttttatttcttttttttgctcaatcttgcgcaaccttagtaaaaattttcaaaatttgacacaatcacttttcaaatttcaattgattgagtcatcaagaggatattattccagataatctggggactaaaggcctatgaaatcaagctcccaatgagtaaatatgaaaattttcgagtaaattttttagcttattaattcatcgtgactctactattgatttagaattgtattcttgattattagaatattttatatatggaaattattttctaattaaggaaataattttctatttaaggannnaaataaataattgattttctgataa

SEQ ID NO: 135109 - DNA, 2837 bp, Cannabis sativa
tgttgacaaagaaaaagaaatttatggattatgaaactttgagctcaattgagtaatgtagtgccataattcagaagaagttgcctcaaaagcataaagatctaggtagcttttcaattccttgtgagattggttgtttaaaatttgaaaagtctttatgtgatcttgggactagcataaatttaatgccacttttggtattcaaaaagttgggcattggtgaagtaaagcctacaacaattttgttacaattggtggatcgatcattcacttatcaaagaggaataatagaagatgttctaattaaagtgggtaagttagtatatccagctgatttgtggtactagacatggaagaagacaaggatatgccattgattcttgggcgccctttcttagcaactggtggtgcacttatagatgttcgaagaggccacttaaccttgagtgctaatgatgaagaaatcaagtttgatatttataagtcttctaatcaagccgatattgagaatacatgcaataaggttgagtcttgtaattccaatgaagataatcgagagactaatcataaagaaaagacaaagaggcctcaagataaaaagaaactaaaggaggagtttttaatagggcaacaagtgttggtgattaattcaaaattcaaatctttgacaagtaacgttatctgaagatggaaagatcctttttaagtcaaagagttacttccttgtggccttgtaagtattaaaattgagaaatttgagattctaaaggttaacaagcgtaaactgaaggcatgcactgatgagctccgacgaccatatcaaccacctacaggtaatgatgatgatccacctgctaatgatggcggtggtagagctatggacccgtatatatcaatgtaaacttatgacctaagggaattcgatgatgaacttatgataaactctttgacactatttagtatgtgtgaaaaacttttagattgtgtgcttaacctgttatgcttgagttatgtgttgttctacttgttccatatattgtaattttatgtgcttatgtagatttggtttcatttggttgatattgagataactagaacttgtgtgattaatttattgaggcaaaatcttaaatctttgttgtgtagagatgattaaggcaattttctttgaactgtttgagccaaaaacctaacattaatatattattctttgttatcctattttgagcctaatttctctaatttttattctctattaaaaagaaaaagcatatttatccttgattatgagccatgaacttaaataaattatccttaccctattttgcaccataaacataggttgttgtgtattgaataaaaaatatgatgtaagtaggatgagagataattttttcttagaattatgttggaaatccaagtatagtatgttgaaaaattctcttgtaaaaaaaattcataatatgaaaaaaaaaatagcaagagataaatttaataggattataactctaattatgtgaacaaaggagtatcaaatgaggaaaatatttttgggagaaaaggaaatttatgatgaagcattttgtattattgattagatttgtaagtttatggtgtaaaactagcctaaatgacattcttatctaccatttacttaagccacattacatgcctataaagtccttttgatctacatgactttggtttacattagtggagataaattggttatacaagcctatggttatcttgaatgttttgtggtaagggaagtcttattgcacatagattacatgtatatagagttagtagaattgacatatacacatttttattaaatatacaatattggaagttaattttaaatgagttaaaattctagtccattgtttgaaaggcatattgaataatcgaaagagagtttgtatttttagataaattacttttggtctaagtttcttgatttatcatccaataattgacttgttagtttttagtttttagttttagttttattttttttattgcttgaggacaaccaatagtttaagtttggggatgtgatgagtggactcattcttagtcaattattagatggattagtatttatttttgtatatatttgatgtgttttctccaagtgtgtaggtttgtgctgaaaaagacattttgtgatggaataagatctttgagcccatttttgacaatgatttcatcattttctctaagagcttatgaaatctaaaatgatagacctcgttccaagctttccaaaatatattaaatcatctcatttggagttcggacgcaaaagttatgcatgatttaatgagcaaggttgaagcagaaaatttttgtactgggcactatagtgtcgggggagtgcgctatagcattcggctggaaaaaatgattttttataaaaaaaaaagataattttagcacaggttcgtgatttttttctcttgggcgctataacgccgcacgtatgatttttttaaaaaaattcttaattctaagaggattaatctatctttgttggcctatataaagaaggatgtaaatcaaattaacggagagacgactagagagatagaaagaagcaactttgagattagaaaacacattgaagagcaaaagagaagagactttaagcaatcatcatcaactatcatcattagagttctttcttcttcttcttcttcttcttcttctttattctttgtttagttattcaattatgaacatgattactgtggttattatgtttgtgattatgaactaaacactcattctagagtgttgatggaactattttagattatgaatttaagttt

SEQ ID NO: 135110 - DNA, 590 bp, Cannabis sativa
  modified_base (381)..(400): a, c, t, g, unknown or other
cgactattttatgaacactcctatcctaaaccaatttccttgaaaaattgcaagtttgatggcgattgttgatggcaatgagaaattttttagaaaaacattatgagggtgaaaatagcaaagtaaagccgcagaattttccaacgaagagtccaagcacaaaattttccaaccccatgttctagattttgtgatatgataattaaagatacaatttttttttttcgttacatatatattaattgttagatcttggttttaattaatgatttgccttttttctttctttctttttttattttttaatttggggttcttgtatttcaatgtgttgattctttgtggagtttttctcacaacaagaaatgtcacttttaccannnnnnnnnnnnnnnnnnnnggtaaaagttacttttaccagcgtatttcgcaaactgcgctggcaaagagattaaagttttaccagcgtacatttgtagtggctaaaatctaacttttactagcacatttatgcgttggaaaaagtcttttttcccagcgcttttcattttatgctggcaaaagttctaataccaatattgatttgccaa

SEQ ID NO: 135111 - DNA, 620 bp, Cannabis sativa
ttatgttaaaatgggttttatttagggcataaaattctaacaaactctcacttgcactaatataaaactaaaagtgcattttaattaatctcaatatcttgatgtccaaatcgtgtaatatgtagtattatctttataagtagaatttgacaagttgtattcaatacaaccttttctccaccattacatctccttagtcacaaaatccttgatattgtgaaattcatttctatatgtctactcctcttaggaaactggattatttactatttggcaactatatctgtgttagtcaggaagtaatactagtggttaatccatcaatggaataatgccaaaaactgtatagaactttccataggctgaataattatctagtagccttcttgggccactttatcattcagtctcactagcacagttagagacttcagattagtttttacacttctctaaaaattaccgctctaccccagagtaatcaccatctcataagtagactttctaacattaacacaagtctagaaacataatttggtgtagtctgagagtattaaaataccacccttatcgactaacatatagttcatcttttgatcttaagatttaatttattgtct

SEQ ID NO: 135112 - DNA, 896 bp, Cannabis sativa
  modified_base (595)..(596): a, c, t, g, unknown or other
gcgaatcggaagagctttggatagtatacaccaccacagaaccttgagtctctcagggattttgctattccacagtttattccacatggagggagccacctctcctggacttactcgatcctcagcttgggctctataggctgatttgcaggaaaaacgaccattattttccaaagtccagacccagctgtctttgccagagccggtaggagaacctcctttgagaatagcagagacagtatcgcgatcaaataaacaattaagcttttggatgttccatccgccactagtctgaaataactcggccacctttgattccctaatcggagcccgcccaatcggcttgggagtgaaaccttttaggtgtgtaatcgaggggtcagaccagatgttcgtctcctttccatcagccacacgcttacaagcaccctttcgaataatagttctggactttgtcacatttttcaaaaccaagagtctgaggccttcggttcacaatcaagaaatgacttacccttcaggtatttggcttcgagaatacgacagcataaagattgattacctgttaggaggttccacccccatttagcaaggnnagcctgattcatttctttggatttacggaatcctaagcctcctaacgacttgggtaggcaaagtttatcccaagcttttaggtacaagccgtggtttcccttctccgagccccaccagaaatcacgcacccaaccatcaatcttagacgccatgcgattagataactttgtagtttgcataccgtacagaggtaaatatagacccactgactttataagcgtagctcgccccgctttcgagagcgtcttggccttccaaccatgaagcttctcagtcaggttttccaggataaagttaaa

SEQ ID NO: 135113 - DNA, 836 bp, Cannabis sativa
  modified_base (784)..(789): a, c, t, g, unknown or other
aattccggttctggaaattcctgaaccccatctggaatttcggatgcacaaccggaattccggttcctcgtaggaaaccttcaaaaattcatactttgctcaactctaatccacttcaaacaaaaccttccagacctactaattagaccttaaggaacatttctaaagcatccaaaccgagctttaagccaacaaaccaaaatcaccattaaagcatcaagctttgagttccaaactcaaacttgattaaacaacaatatcatgcatcaaacctttattgaaactacctattcgtgcatataaaaactgcagaaactgaactcaaacacaatcaaactttacagcagctattttcacctttttactttgaaaaaccatagatttgagctaaagactaccaagcttgaatcaaagcaaacaacatgcatttcaacctatctaatctattcaattcaagcattttaaacatagaaataacaacaacaactaatagcagcaacaacatcaaaaaccatacatgcaatactcatcttttatgatttcaacaatttcaagagggaaagataaaggaaccttaccaacacttagagatcacaaaaaccttgaagaatttagcttgaaacacaaaagaagcccccccataccaagctgctccaaaccgaaagagagagaaggaaagagagaaagacaggttttgtttttcttttattttccaaataatttctaacttttgaaataaaaataaaaaatgggcataattcacatatattcagccaacataacnnnnnntaacatttaatttcaaatttctaagttcactaaaggacaaaacataa

SEQ ID NO: 135114 - DNA, 609 bp, Cannabis sativa
aagggataaattgataattacctcttttttttctcaagtaaccaaaaatacctccatataaaaatccattgaaatctacctcttttataagttcattaccaaatatacccttaccagaataattgagtccccaatagaaagaatctaaagactccccattctgccatagcgacccaacccaacccaacccaatgcacgcaagctctacctcctctccgccatcactagcgtccttatgcctcctccattgtcagcatcaacgctacaacatccttcaatatttgaaggtcagtaactttctctttcccattctgaatttgtattattctttctctttagatcttgtttctccttcctccaatcttccatttagttttggtttgtaaccaacacacaaactataataatgttttgatcattgtatgaaaatataataatgtcttctagctgtttgttgaaataactaatagaaattagaaagtcctcttgtttctttctaactccacacaatgtattgttcttcttagatgacttagaataatgtcttctaagtgtttgttgaaataagatgtttcttttttcttcttctctgttattaacataacaaat

SEQ ID NO: 135115 - DNA, 688 bp, Cannabis sativa
aagaatcgccgaaccaggaccctagaacaagactaggatcgtgaccaggaccctgacccagacctagaacccaacacagaccaagtctcagacgtaaactgagactggaactcgggcccagacacggtcgtgtacccaaaccggaactgagatccggacctggacctaaatctgggacccgatcccaaacacacacttggacctagatagggatccggatacgaaactggacttggacaatgacccagactgggatcgaaatgctggacctagatgtggaccgagatcctgacctacaccaaaacttggaaccgcactcgggatccgaactatgacctagacccgaacctagacccatatcggggtcaagacctagacacaaacccgaacacagactcggacccgaactgaaacacccatacctagaatcatacaaaaagctacacctggacacaactcgaacccagaccaggataagaaccaacgacttagacccagaacttaatccaaactcagatcgagattggaacttgggactagaacccaacctagaccaagactcagagagcgaacccacacccagagcctgatcttgacctagactgaaatcagaacgcgaacccaaactcagatcagtactcaaattccgactcgaagtcaaacccaaactcgaactcagaatcgcaaa

SEQ ID NO: 135116 - DNA, 632 bp, Cannabis sativa
taaaataatttccaacaaagtgctcgttggagctataccggtggtggtgttggtgagtttgtcttttggtgttttgaagagagagagagaaatttttatttaatgttttaacatgcgttgtttagtgggtctcactcatattattatttttcttttcttttcttggtttgactgagtcttcacaattacgatatattattttttgtggtgtttgacacattagtgtgcctcttaatatttctctgtttgtaatgacttttgtttaagtcatgttgtttttctagtgtgcttagtctctttgttcaacctcccatttttttttaaaaaaaataaaaagctaagagctcatttgacaaaaatgtgttctaataattaggggtgtacatcggtcggtttgattgggttatagtgtaattttaccaacccaatataaatgtcgggttgtaaatatctaattgtaacacgtccaatgaaaaaataaaaaatgtgtaacctgcctaatgatttttgtctgtttggtcgggttaacccgtttaccgatctttgtttttttttttttttcattattgttagtttttggtgttcaaataattgatttgaaaaaaaataaatgtatagtatatgcctttcaa

SEQ ID NO: 135117 - DNA, 802 bp, Cannabis sativa
  modified_base (289)..(292): a, c, t, g, unknown or other
gcttgcagcagcagcagcaccaactttaggcctttttggaaaaaacgccatcaaaatactccgagggttggaatgttgttccagtcagggaaggctcatgagtttcatgagattgggccaaatttttgtgagaggaaaaaaccttaaagattaaatttggaaacacaagcttaaaagttggctttttacctctccgaaatgagacaatttggttcaaaatgtgggaggccaagtcgatggatgctcttgaggtgatacgatagaggaatgaggccacatcttgagacannnnagtcttgtttgagtttggaacccaattgctaagagcaaatcgcatgacagatgcatgagcataggttagatgtgtaatgcgaagactctcccccgatttcagttcagcccatgcaccagtgagttcagtgagcatcaattggcgatccatagacattatggcatttgggacattttctggcagttgcaaggcttgggaaatgtcttttttagagaatgaaaaccaatgtcctctaacatacacttttcgaaaaaagtctagaattttcatcaagaaaatcatcagataagttagcatagaaatctttcacaatgtttgcaatataccctttgaaaccagtgagactgttctctcattgatggtattgaatgaactaaacaataccatacaccctatgagcatgcaaatcgtaattcctttcactctcaaactttcaggtagcatacaaattccaatcacgctaattatcacgatagtagaaccgaggacaataggagagagatgtaggaa

SEQ ID NO: 135118 - DNA, 500 bp, Cannabis sativa
cctaaccttgggataatcgagtcgagaacgtttcaagaacatatcgataacccgttaagaaaggtcttccctaaccttgggatattcgatttgagaacgtttcaagaacgtatcgataactcgttaagaaaggccttccctaatcttggggcatcagtgtcgagaacctatcgagaaaccgtcgagaaagatcatccataaccttgagacaatggtgttgagaacccatcgagaacatatcaagaatctatcgaaaaaaaatacgaacacacagaacacttcaaaaaatgagatctcgcgatttcagcgaaatttatatcaaaacacccaaaaaaaaaataaccatataaatctaacaaaaatatactatatatgggacaaggaagtttacaaaatactttcaaacaaaatgtttctacccattgatccacaatgagagggaggttgggcgaatgtccttcacgacgaggggcggcgattgggctgatgagggaaggttg

SEQ ID NO: 135119 - DNA, 545 bp, Cannabis sativa
aaagcttctggatgataaactcttgaaccagagtgggacattgctaccagcaaaaagtagtcccaatccctggagagaattttatcaaaccagaaggaaatgagttagaggtcttagaacaacctacatattgcctgaaccctagtatgaacagttttaaccctaaaaaactaccaaaaccagatgagatggtaacgatacaagcgaatcaagcaactaatcaacactatgtaataaacatgaggaagaagaaaataacttactgtttgaagttagtgcttggggcaacgcttgggaaatctgtctacaaaccttcgaatgaggcaaagatttccttgaaaaaataaagtcgaaggaaactcccaggaaaaaggtcaaagacaaggatggcatgcaaatctccagacgagtttaatggtgatccttaacgaagaagttaaggatgtttctcaaactttctgaaatggtgcaaaggtggttctttttccttattttatactcatgataatgatttcaaaaaagatttgatccaatggacgtgattc

SEQ ID NO: 135120 - DNA, 1185 bp, Cannabis sativa
  modified_base (1153)..(1153): a, c, t, g, unknown or other
aaaccgactaaaccgaccgatgtacagccctagtttgaataataccattgaaaaagaagattctgattctaatgaatctgaaatctgtgacgagttattagctgagtcttattaattaaatcttttgaaatgaaaattaaagaatacgagattgatttttgttgaaagatgaataaattattctataagaaacttgagatttcaagaaaaatgttgaaatgtttaaccctagttcttctatttctaaggaagtttagaatgcatgtcaaataggctttggtggttttggatcaaatggttccgaaagttatggaaacacaaaatttataaaatctaatgttccatcaaatttacctactatagcaaaggcatcgtctcagaagcaaagtctccagtaagttcaaaaaggtaagatctcaggtaaggcggtttgtttcaatttgtcatttttgtggtattaaggggaatattaggcataaatgtttcaccatgcaaaatatgctcaaaaaagttattttggtaattttaaaaaatttcaaaagaaatatagtgctttgaaacaaaagtgggatgaaaaaaaatatctagctagtttttttgataaaattgttgcttcgcaaatatggtatgttgacaatgattgttctagaataatcattgtcaaaatatgtgattgttctataattagcttagtgtcttgtactctttattcttttgaggtttggattaaaagattcaagttacctacatatgtgtgattgggataaattatagtattaatacagagctgagcgatttttacttcagtttcttgtcataccccttgttggaatagagctaccgttgtgattgggataaaatgatttcaatatcacatatagttattcacaattacagtgatgttaatacagtagaaggtaattttgattttatgcttcaaaagataatgtcacatgattcatcagtgtactggatttacactgatgtgatagtcagtgataaagcttacttacacattggataagtgttatgttctttccagaacattcacagagtatgctagtattggatgtatggagtatacattagaatgagagcgatattaatcttggtaaaaatattataatcttaccattgtatctttctaagtcantatcactggttgatcttaggtcaaaagatctt

SEQ ID NO: 135121 - DNA, 670 bp, Cannabis sativa
cttcactagttgagataatactgcttgcaaacttagttaattgattttaattaataaattataattctaaaattagactttgtcttatttataaaatttcactaaacaagaccaattgtgaagaaaagaggttttagggttaatttattaattaaaagactttgtatggtctaattaataaataatataaatagaaatttttattggataattaattatgatcattaatagatagttttggtaattatgtgattaaaattataaaatatggtattatttaaagaagaataagtagttgaaataaagtgataaaattgtaactagagaatggtccactaagtagccggccttagtgtgtaattttgcctaatattttattcttttttaactatataattcaaacctaagccctagttgaaacactataaaaggaagatgatgctctcatctcatccaacaatcttcaacctcccaaatctagtttctaactcaatcagacaactagtagatgagagacacattctatacagttttcgaaccctccttcattggtcttcatgaattcacccatagtggtagagtgccatgcccacacatagcaagtgaagtactcaatcatagtgcgaaagaaggtggtaaccaacccgaaagagagaaagagattcaagct

SEQ ID NO: 135122 - DNA, 508 bp, Cannabis sativa
atatcccgaaaactgcgtttcgtactcggtatggacactatgaatttcttgtgatgtcttttggactcactaatgccttggcgacattcatggatttaatgaaacgagtgtttaaagattatttggataggttcgtgattgtatttattgatgacatcttggtgtactcctagtcagaagaagagcacgagttgcatctcggagcagttttgcaacggttatgggatcataagctctatgctaaattcaacaagtgtgagttttggttatcccgtgtctcatttctggggcacatagtggataaagattggatcatggtggatccagcaaaaattgaagctgttcgggattggccagcactgaaatcggctactgaggttagaagttttctgggtttagctgggtgttaccgttggttcgttgagggtttttcaaagattgttgtacccttaacgaagctaactcgaaagaattagaagtttgtttggactgatcggtgtgagaaaag

SEQ ID NO: 135123 - DNA, 636 bp, Cannabis sativa
attgtataaaatacaatttaatataatattatacaatacaatatggtgtattacaccataccaaacgaattcttaatgcattaaatagtataaatccaatctccttaaagttgctcttatacgtttggtttttatatcctttcagtttttatcgtctgattagaagtgatgagtttgtaatgctctttgagaattcaatacatttttgtattgtatcaaatttcactagggagcggaaactaaataattatatgatggccttgttttagaaaaggaaattttactttttggccttaataatacaagctatatcaaaatttataccctcccttaatttgtacaaatttagtccattgattacatgaactttctattttacccttttttttaaaataaaaaataaaattggtaaaaactgaaattggtctttctctctctcttccctctctctcgtgcaccactctctctctcttaaaaaaactgaaaaaacttctcaaaaaatttccctctttctcgtctatcccactctctcttccctcttgaatggttgtttctcgatgactgttggtggaaaaccgaagcacaacccaatatcactcaagaatcttacagcattacaatgggtaagttgtgttt

SEQ ID NO: 135124 - DNA, 573 bp, Cannabis sativa
aggcttcttctggtgtctatgcttcctgcatagtctgaatcgacatagccagtgacatcacagggagaaatgttgtctttgtgaaattttaaaccaatgtccaaggttcccttgacatatctgagagtccatttgactgctgcccagtgttcagtgccaggattggcaatgaacctacttacaacactcattgcataggccaaatctggtcttgtgcataccatagagtacatgagactcccaacacatgatgcatatggtatgttatccatgaatcttttgtctacttcagttttaggtgattgagcttgtgtaagtttgaaatgaggagcaatgggagatgttacctgtttagccttgtccatgctgaacttgtctagaaccttttgaagataacttttctgagatagcatgatatattctggtctctttctgataatgtcaattcccagtatcttgtttgccctccctagatctttcatatcgaattcactactcagtttcatcttgattttgtcaacttcactccttagtttacctatgatcaagatatcatctacatagagaagtaga

SEQ ID NO: 135125 - DNA, 703 bp, Cannabis sativa
taaaaactaataataatgataataattatgtgacacgaataacaatgataataattagttgcaacaaatctaaattaatttctaccatcccaatcgtccaacaaagtttttatccttaatataaaagcattgctattagacactagtggtacctattactttcttgatatgtcgttttgcgattgactagtgatactccctaaaagctattatattaaactatatgagaccgatacttaattggaccaataacgatattgacacataagaggatactagacaccactggtaccttttaacatttctcctaatataagactcactttttttactcatactaattcaaagtgtgggtagtgttttattttatttttattttttttttaaaaaaaaaaaggatattgattcgttgaaagtgtgggtagtaagattagaatgactttatgaatcaattatcaagagggttgagacaagtatcaatagtgacgtgagactaattacataacgactattattaacgactaccactgttttacttgaggtttgtctctctttcttagcttatgatttatttgtaatatttctttttttatttatgagaaggtttgaaggtttgtaataaatttttttatttattgtgattggagtttataatctgtccatgttgattaaactcaatattgatctcaaaaaaaaaaaaaaa

SEQ ID NO: 135126 - DNA, 1686 bp, Cannabis sativa
  modified_base (1243)..(1252): a, c, t, g, unknown or other
tgttaatactaactttattaataaaaaagaaataaaaatactttggaaaagaaaaaaatttgaacaatctttataatcatttatgtagatatatatatatagtgatcatgaagaatgtagattgagagatcatcacataattctcatatgaacaatggcaatagatcgtgcttcttttatagtctaatatatagattgattttgtagtaacaattttgtttaatttggtggggcaagttataaaaagggaatattgaatactatattctcattgtgtaactgttaagattgtaaatcaaagatcatgatataattatataaaattattaaataaggtgagatgaaaaaaatgaaaggtcttattattaaataaggtgagatgaaaaaaaatgaaaggtcttattattaaataaggtgagataaaaaaaaatgaaaggttttattaaagaaaagtaactaaaaaattttaaaaaaaaatgtgaaaatatgagaaaacaaaaaaaaggaaagaaatttcattgaaactgtcatgtcatcactattgtgctttcctttatttatatatattgatattgatattgattgattgaactctatatttaaataaatatccctaataaaaaaggctggtggagtatgtagaaatgaactacaaaaccacgtaaaatacctggtgttcatttattattactattatgaaattctgtagtaaaatttattacataaaatgctatatatttagttaaaaaatctgcgttaacataccatattcccaagatgtaagtattgagccgatccaattagtcagctttaatgaacaagtcaaagaacataaataattcatttaagccaaaacctaaccatctcaagattaagatctattgacctaagatcaactaagtgatattgactcaaaaagatataacagtaagtttatgatatttttttcactgttaatatcggtcccgtctgatgtatactcaatacattgatactagtatactttgttaatgccctggaaaagatattccacttatgcttgtgtaagtaaactttatcgttgattatcacgtcagtataatttagtgcactgataaattatgggattaaatacagcagtggtatttcaagcatataatcatgaataactatatgtttaggatttaatagactttatataataaacatataatcatgaaagtaatcacgtgaattaatcaacataaaataatttatgatcttnnnnnnnnnngtaaatctgattatattaaaataaattttatttaggacataaaattccaacaagtagtcagtataggactacaagcaaccgctcctggagcaagtgctcgagagataactatcgtcatacgagataagtccctgtagttgccagcaaggcgacatgatcaggcaacaactacaaggcctaggtcgatcaacgtctttgatcgacttggaagaagaaagaacctgtaaagcaacaacaacaagaagcggccaaatgatatgcacatcaccacacgtgatgtctgcaaggctgaatttgatactcttgcaaccttagcaaagattattgcaactccaaagaaaattgagtttaagcttgaacgggagtgacgttcacttctcttagaaggaatcaacgctttggagatccccttaaagttcaaaaatccagtgtgg

SEQ ID NO: 135127 - DNA, 2407 bp, Cannabis sativa
  modified_base (1517)..(1520): a, c, t, g, unknown or other
tattgtatttagacgtgtgagagcaacacgtaggtctacgccatgtaaacacaattagatgtgtgagagtaacagtaggtttacgtcacgtaaacatacataggcgtgtgagcccaacatgagtgcagggaaaggttaagactgttattgatatattttatactgtcttgctgggcttggctcaagggtgctctactgtccaggaaaggttaagactgtttttgatcgccatgagtgcaggagctggatgaagagtgaacatgtccggtccatatcagaccaagtgggttggggtctaccagtgttgtgtttttgagactctgttttgccgcttaggccgactaaaagaaaaggacttgtaataatattttgtaaatgtttttgggatgccaacttctgtaacatttagtttataaagcttaaaatattacaagtttatttccattccgattgttattaaagtttagattctgcgcgaattctattagtaatcccgtttaggggattaggatttcataagtatcttgggtagcgtgcctaattatttacggtgttacaaatatccttgtctaataatcattttagacagactttgccagcctgcatgatccccacagaatccttcatgaatttctctaatgatttcattttcttctacatgaataacacaccgaagtaggggcattgaataccctcttccatagagtttgccttcgatcattgtgtagcgaggcactgaatacaatagttttggctcctcgattttgtcatttggaagttgttcgtcgagtaaataattaataataggtgtcatccatgttggagagctatatatcctctcaatatctttagtttcacatatacttggcacactcagcatctctaccggaaccagattcaattcatccagatcattctacgaggccagttttgctaaggcatcggcgttggagtttttttctcttagaattttttcgattttaaaataatcaaatctttccaagttcttccgaactttctctaaatactctgccatttttaagcctttggccaagtattccctaaggacatggttaacgatcagctctgaatcattatgacaaatgagatttttgcctttcaatgcctctgctatctttaagctggcaatcaaggcttcatactcagcctctttattggatgcgtcaaattggaacctcagagcatagtgaaacttaaagccttctggcgatattattattacccctgcccccaaaccttgctcgttggatgcaccatccatgtataacctccaagtttccacatctcgctgatcaggtggaatttcttctagatttatacgttctctcaagaagtcagctaaagcttgacccttgatggatgttcgaggatggtatgttatgttgaactgccctagttcaactaaccattttatcaatcttcgagtagcatctggttttgataaaacctgtctcaagggctgatcggttaacacttttatggggtgagcctggaannnnggccgtagtttgcgagatgcatggactaggaataacacaagtttttctagaggggaatgttgagattctgcccctaaacctttcacttacatagtaaataagttgcaagtgcttgccttcttcttgcgctatagctgcactaatcgcatcttttgagatggctaaatagagaaacatcgtctccccagttattggtttcgccaaaactggtggcgctgctagatgcctttctatgctcttgaaggcctcctcgcactcttttgtccactcgaactttttattgcctcgcaatatgttgaagaacggcacactcttatcagttgacttcgaaatgaatctgttaagtgtagccattcttaccgccaaggcttgtacatccttaggcttcgtcggtgatggcatgtctattaatgccttaatttttttaggatttgccttaatacccctcgcattaacaatgaatcccaaaaattttcctgaggaaactctaaaggaacattttttcgggtttagcttcatgttatacttctttaatatctgaaagcattctgtgaggtctgaggtatgatccttactttttattgatttcaccaacatatcattgacgtaaacctccatgtttcgccctattcggtttgcaagcatttcgtttaccaatcgctgatatgtttccctagcgttcttcagtccgaatgacatgactttataacaatagagtccaatgttggttacgaagcttgtatgttcttgatctggaacgtacatttttatttggttatatccagtatatccgtccgtaaatgacataagctcgtgcccagcagttgcatccactaactggtcgatcctaggaagtgggaaacaatcttttggacacaccttattca

SEQ ID NO: 135128 - DNA, 1131 bp, Cannabis sativa
tcactaaaataccatttattaacaaaatatacaaatatgtaattatttattaaaatcagaagctagcatatttcttaatcatttatacagatcacaaaacatattcaatctgcttggaaatatgtgtgaaatactatccatgattatgtataaatttattgttaaaaataaataaaaccctaaataattacccaaaaatagcaaaacctcttaacatagtctcaaattaattccagacactataattatatcttagcattatattgaaggtccccagacagtaaacacaatttttactatttattctatttaaaatctaattaaatagttaattagccacaaataattataataaatacctacagtaactaataaattataaaactctttttattccgtatcataaatagtaaatagcattacaaaaatatattttactattttaacatcagtattttttatatttattttaagtattaactaaataaattcatgaaaaatacaaaaatgatcgaaaaccaaatctaacaattctaacaaagtatatagtatgtactaagccccgaataattaactttcaattttctgaatggtctaggtatttttcataattaaatttagaaataacacaaataattcatgaaaaatacaaaattaaatgcaattcaaatctaccaattttgcaacaatttatatctcataactaatcatataaaataaatttagatttttctgagtaatctaaatatttttcctaattaatttgacaaataaattaaataattcataataaatcaaataattgcaagaaaattctcaaacttcatagtagacctaaaaatacctaaaacaagtcaagtataagaaaaaatatgaaataaaacctttaaaaacccctgaacggagcttcgccggcgggtcgtcttctccggccacggcgagttccaaactcccgttttcttgctttcgacgcctcctttcaattaggaatgatccccacaatgcccagaaactcaaactgatctaatcttgtccaaagaaacaactaaatcacgtcctaaaagagttgtcttctttagctccggtgtaccgccgtttatggtgtcaaaatattggttctgtgtttttgac

SEQ ID NO: 135129 - DNA, 785 bp, Cannabis sativa
atgcaagcgagtgtcataaagatgcactcgctgatttggctcaaattctttcctcaggatctgcttgtcatgagccgcttttaatttagccttgtagatccttgagttgtcataagcatcattgcgcaactcctcaatttctgacaactgaagcttacgattaaggcctgccgcgttgagatcagaatttaggttttttacagcccaatatgctttatgttccagttcaacagggagatggcaggccttgccatagactagtctgtaaggagacatgcctagctgagttttgtaagcagtgcggtaggcccagagagcatcgagaagtcgggaggaccaatctttgcggtcagggttaaccgtcttttctaaaatttgcttaatttcacgattagctaactcagcttggccatttgtctgtgggtgataaggcaatgcaaccttgtgaagtacaccatacttttgcatcaaatgctcaaaagagtgtggttgcagaaatgggtgccttgtgatcactgatgatagctcgtggtgtgccaaaacgagataacacattttcttttaagaatttcacaacagttgtgttatctgcatttcgacatggcacggcttcaacccacttggagacatagtctatggcgaggagaatgtaaaggtaaccagaagaaggtgggaacggtcccataaaatcaattccccaacagtcgaatatttctattacgagcattgggttcaatggcatcatgtgtcgtcgggatagcgcacctagtttctggcacctttca

SEQ ID NO: 135130 - DNA, 549 bp, Cannabis sativa
gtggtggtccaagagagaataataactcaagaaatattgggtataaatttaagtctttgactttaaatttagattccctatagaaattattttcagtttcctaaaatacatttaacaatacaatatgactttcacaagtttttaatattcattttctgtcaatggattcaaactatatgtttatgtatggaatatgagtttagttttctgtgactaggatccacttggactattctaagaactctttgttataactaaaccttagtcatcaaaaaccacaaccacattctttttatatctatggcatttgcatcttgttcatagtggttttgataagatcattctctgcaaatagtcaatatgcctataaccacctgaaagtaagatcatctatattcgaatatggatatacattcagggatggatatgagtttttgttatattcttaagacgatcactctaaattttaccttaggctaagagatttaaaatgtttgagaaatttcatgaatttctagccatggtgaaaaaccattaaggtaagtggtt

SEQ ID NO: 135131 - DNA, 638 bp, Cannabis sativa
attttatttatgtgtgaataatctgattttttcttgagtttatttatgatgtgaatgaccattttttccttgaatgcttttaagtgtgttatatggcccaaggggcaatatggtaatttggcctacatgtattatttgtagcaaatggaattatttgtaaaagagagattttattttttggtttttcaacacccagcaaacccctctatctctctctctctctctccctaaacttcttttccaagttttgattttttgttgagaaatagcttgaatctttgctaacttttggagcttggaatttagaggtgttgagaattgttcttgctataatttgaggtagtaattactgttttaaatttaattttcccttgctgaaatttgttgagagtaatgtttttgggctttgaatgcatgagggttgaaaaggggagctaatggtgatttctttgtaacttgaacttgtttaattatggatttcgcacctatgttgttagcaagttttagggttatttttcaagtttagaaatctaatttttatcccaatttattgttgttggatgatggtgaagcatgtggggattttcaagttcttgaattgcatgtatgtcttaattgggttgttcttgatgttatga

SEQ ID NO: 135132 - DNA, 723 bp, Cannabis sativa
  modified_base (665)..(669): a, c, t, g, unknown or other
ttgaatggaggtaatccttcaggcgtaggggaggatacctggctctggaccctagaatctaatggtaacttttcatgcaaatcagcttatagggcacttgctgcagaccgtgtgactcctactgaggtagccccggccctatggaataagctgtggaatagtaaaatccctgagagactcaaggttctttggtggtgtatcctgtctaaggctctccctgtccgtgcggtcttagctagaaaatttcctattgaagatgatagttgtccgttatgtggaatggaagtcgaaaccatggagcatctctttctagcctgtgactttgcctctcgtttgtggagatctaccccttggggtatctatcctatttgtaatactggcattagaatgtgggattgggtcaagttcttatgggacctaaaaagcaatggcataaacgatagggaggtcttcctctatgcgtcaataataattgataagatttggcaagcgcagaatgataaggtacacaacaacagctttgctgatatttttaaatgcattgactctgttcgcttttcttttgcagatcaccaagctcacttactcccttgccccaagttgaacacattggatacttggcgtcctccccctcaggattggttgaagctgaactgtgacatcannnnngggttggatagcatgtgtgcagctgtggttgcaagggatcatgttggcaaggtg

SEQ ID NO: 135133 - DNA, 828 bp, Cannabis sativa
ttaaataatcaaactgggaatattaaaatacggaatttcaatgagcaatgaccatgttgtattatttatttatttatatatttatttattttttttgaaaaatgttactttattacccactaaattttttgagagactatatataatataaaatttaattaaaaagtggtatttggaccatagtggataacttttagagttgtttattattagtgtaatttttataagaaaatatgtgaaattttatgtggatgtaagaaaaaattaaaaaaaaaaattaatattttagtataatatgtttattttagtaactacgggtgttatcctatcaaaatgctcttacaaaggtacggggttaattgtaattgtcctcctaaattattttcttcttacaatattgccttcatttatagttctccctctaccattgattatatattggaaatttggacgtggtttgatcattgtttttgtgcattagtagtatttaatattttctaaatgtgtcgttttatatttgattagtgatactttttaaaagttattgtattaaattatatgagactcgatatttagttagaccaataacaatattaatacgtaaaaaaatactaataccactaatatcttttagtatttctagatttcaaatgtatataaccaaaattataagtccaaccacttcgatcaggccatattgaagtataggatttgaatgatgacaagaaacaaaattgagtcgagatgtaaaatggccctcaatttggtaactaagttagtaaatgtccactttttaaaaaaattaaaaaaatggccaaatctaataaa

SEQ ID NO: 135134 - DNA, 852 bp, Cannabis sativa
  modified_base (37)..(39): a, c, t, g, unknown or other
aagttttcaaaatgtataagtttttaaaataattttnnnttgcacattttttgtaattatgttgtttttattgtacatttatgaaaaaagcccttatcttaaagtaatttgtttctaattcttaaaacatattaaaaaaattattgattttttttatgtggcaaaagataatataaataataaattagtgtaaaaatgtttacataattctatgatttgaggtcatttactataattttctttgtaaaaaaaaacctttaaagtatctaggatttttttaaaaaatatacgtaaaatacaaaataattacaaaaataacttaacaaatcttaattacaataatatgttgtcacatcattaaaaagtactttaattcgaaaataatatgcctgaaatgaaactaatcccgattttttttaatttttctgcgttttaaaaagtaactttttggttgcttatgatgttgataataaatcaacaagtaactttgtcatataaaaatatcatttttgtattatataatttgagatatattttggttacctctaaaatatacatgtatacactttaataataaattaattatttagattaatacacttgagtaacattcaaatttattttcgaaaaaaataagttgtcatccactaaactactattttagtaaactgtatttttaaaaaatatatatcataaatatttaagttaccaatattctttaaatgtgagttaatatatacatttttgttagttaaggtgtcgtttggtaacacttttgttttttaattttttaatcacaaaatgaaagtaaaatttttgtttttaaaaaatttgtttttgaaaaacaaaaat

SEQ ID NO: 135135 - DNA, 681 bp, Cannabis sativa
ggttgttgtttaacaggactatagcttgaatatttaacaatatgcatggatatttttaatgtgtctgcgactttgtgcgacatttatgcgattcttgtgcgattttatctcatatttataactgctgtttttgcgcattttgtatgcgatatgtatgcgacattgtgcgattttctgcactattttaatttttttttatttgcgatttctagcgacttttggcgatttcactggtaacatgcctaatatgctatgctgtctacttttcacgatttctatgcgatgtatgtgcgacattttttttttaaaaaaagcaagattatcattactccaaacatccatttagcatctcattcgagacctgaaaataatctatgcatcaacaaatatgcatatgtgtgtttctttccaaattttcaaaccatgacctatttttggcactaactttcttaggccaaacacttttaattctatacaagatgtctatttttgttttacttactatttgagcagtttgcacactctttccttcccaaaatactccatttcgggcttgccaaatattgtatgctaaagctgccacaacagcaacatacactctcgtcttgaacttgtttgctttgtgtcgttgcagccatctcactatctgttgaagtgaacttgagcaaatctgccattgca

SEQ ID NO: 135136 - DNA, 2319 bp, Cannabis sativa
cacaagatttcatgctaaacaaagataattcttttgaaaattgtgtaagtcattttggtatgaattttgaaagttcttttgatagtgtaaattctttgttagagtctacaccattgataaacacagaagagtggaacaccaaagttgagtcaattgaaccctttcgccaattagaatcacagtcactccctgaaccaccaaagttagatctaaaggttttacctgaagatctaaaatatgcattcctaggagagtcagaaaccttccctgttatcatcgcatctgcgttagacaagaaacaagaagagaaattggtacaagttcttaagagtcacaaagaagccatagggtggaccatggctgacatcaaaggaattagtccttcggtgtgcatgcatcgaatccatttagaagaaaatgcaaagccatcccgtgagtgtcaaagaaggttaaatccaaatatgaaagaagtagtgagagatgaaatacttaaaacattagatgtgggtattatatacccaatttctgatagttcatgggtcagtccgatccatgttgttcctaagaagtctggaattactgtagtcaagaatgcaaacgatgaattaatccccactaaaatccaaactggatggagagtgtgcattgactacagaaaactgaatagcctcaccagaaaagaccatttcccattacccttcattgatcaaatgcttgaaagattagctggtcacgagtactactgttttctcgatggttactcgggatacaaccaaatcccgatagcacccgaggatcaagaaaagaacatgtccttatggaacatttgcttatcgacgcatgtcttttggcttatgcaatgcacctgcgacgtttcaaaggtgtatgattgcaattttttctgatatggttgaacattttttggaaatctttatggatgatttttctatttatggatcttcttttgatgaatgtttacaccacctgtctcttgtcttgattcgttgtaaagaaaagaatttagtgctaaattgggaaaaatgtcattttatggtaaaacgtggaattgtcttaggacatgtgatttcatctgagggaatagaagttgacaaagctaaagttgatcttatttcaaaacttccaccacctaaaactgtgaaagaaattagatcattcttaggtcacgccggtttctaccggagattcataaaagactttagcaaaatttcacggcctctgtgccatttacttggaaaagataatgcatttgtttttgatcatgattgtcatattgcttttgagaaattgaaaactatgctaactactgcacccattattcaacctcctgattggaaccttccttttgaaataatgtgtgatgcttctgattatgctataggagctgtcttagggcaaagaattgataaaataccacatgttatttcctactctagcaaaactctaaatgatgctcaattaaattattccacaactgagaaagaattgcttgctgtagtctttgccttagaaaagtttaggtcttatctgttaggatctaaaataattgtttattctgatcatgctgctttaagatatcttttgtcaaagaaagatgcaaaatcacgtttaatccgttggatacttcttttacaagagtttgatctagaaattcgtgataaaaaggggtctgaaaatgttgttgctgatcacttatctaggctagttattgaaactagtaaagagcctacccctatcaccgaaacttttcctgatgaacaattgatgcatgtttcttctctgccttggtatgctgacattgtgaattatcttgttactggtgaaataccatctcactggtctaaacaagataaaaataaattttattctgaggtgaaaaattttatctgggatgatccatacttgtttaaatattgtcctgatcagatagtacgtagatgtatcccgaattgtgatcaaactaaaatcatatctttttctcatgatcatgcctgtggaggccatttcagtagtaaaaagactgctgcaaaaattttacaatgtggtttttattggcccacaatttttcgtgatacatatgcatactgtaaagcctgtgaacgttgtcaaaagttaggaagtctgtctagaagaaacatgatgcctttaaaccctattcttattattgatatatttgatgtttagggtattgattttatgaaaccttttcctaactcgtttggaaatttgtatattcttgttggagttgattatgtttcaaaatgggtcgaagctgttgcatgtcacacaaacgaccacaaa

SEQ ID NO: 135137 - DNA, 733 bp, Cannabis sativa
accattggagatgatattgagatccaaaacctccgtgctgctcttagactcatgcaaggtcataccaacaccctacatcatgatcaggaggaactccgcgctacagtaaatcttgcgttcgaggaatagagatgcatgtgtaccgaatggagggacaaagggatggaagcgttaagggcttatcatgcagagattgacaatcgtagttggtaagctactgtgctgatacgataagcctatcaaacttttgggcagcaaccctcgaatgtcatccccttgggtgaaacagacaaagatccagcgatgaatacttatcaaactataaatggtcagctgccaaatctccagtcacaggttccacttgtgggctaagcagtaggtgggcagaccttgtctagtaattcatcggaagaagtcatacctgataattccaaccaggttaacagtgtcggttagcacgttaaccaaaccaatcaatcactaagacaacaaggtgtatctgtattcgaaaggttgggaacaactcatgatctcagaaacgatctgaacagaaggagaggagtagacgatcagcttggcacgccgatcgtgtagcccggaactcgtgctcaaatttccgcccagaaagattctgacgtgactcaaatcggccaaaatgtcgaacaggttagtctagttgtgcaggcacaactggacgaactaaagaatttgttccaaggcatggccggacaga

SEQ ID NO: 135138 - DNA, 807 bp, Cannabis sativa
  modified_base (63)..(69): a, c, t, g, unknown or other
  modified_base (138)..(141): a, c, t, g, unknown or other
cgtaatggttggtcagtgtacaccagaacaggatgatcttgaaaataaggccttaactttctnnnnnnnagaataaggcagtaagcgagtttctatatcaatgggtattggccttcgccctcaatgagtcttttactnnnntaatagactgggtgttgtacgctgttctcttctctgattagcgcgacactcacagcatgctccgtgacagctaaatatatgccaagttcttcttcgtccagaggttttgagagtacgagaggttttgcaaattgtgcttttagctcttcggaagctttttcacattcctccatccactcaaattgcttgtttcctcgcaggatattgaagaatggggcacacttgtctgttgattttgaaacaaatctgctgagtgcggcaatatgactagtctaattttgtacttctttggttttagttggcgacttcatatccagaaggggttgaatcttctctggattggcttcaattccttgtgcattgacgatgaagcctataaactttcccgagctgaatccaaaggaacaatttaagggatttagtttcatattatactttctgaggaccttgaagcattcgtccaggtcatctatgtgccccccagccttcctggatttgacgagcatttcatccacatacacttccatatttcgcccgatctggtctttaaacattttgttgcctgtctttggtatgttactccagcattttttagaccaaacgacattactttgtaacaatatagacccatatctgtccagaaacttgtatgttcttggtcgggtg

SEQ ID NO: 135139 - DNA, 902 bp, Cannabis sativa
ttagtgtcattgaagctcccactggtaacgaggaagatgatgattttgatttcgatagcattccctggcatggatcagatttgagtgagtcttgtactctacttgtaaaaagaaaaacctaaatatgtttcttaatataattgtttttctttactaagaattgtctttttttctataatgattgtggaatggatgatttcttaacaatttgttttaaacagtaatgagtaagagtaatgaccccttgagataagttggtttggtgggttcattgaagaatacaatttgggatttttcatcaaaagagaatgtagtgtagtgtagtgtacaaggtcttttactaattaatatataattttttttctattttatttttgtaggataagagcaattaatccatacttaaatgacgagatgaatcttcggcgtgattagtagattgaatacgtttgagcacaaacattgcgacaagggctattacgatgatcagtttctgtttttgtttatactttacactataaccagttatactttcatataactaatgattaagtttgagtacgtagtttgtatgaatttcaatttttgttcatttttaatttatgcttatacttcatcctaactaattagtgactatataaattagtgaaaattaattaatgcatgaaaaaaagtatattttttttgttttttttttttgcaacccaatgactggcaaaaaccgtcgctgaaaaatacaaaatttataattaaactgaaaaatttactacaggcgacggtttaaaactgtgcctaaagcactataggtgacagttttaaactgtggcctatactttaggccatagttttaaactgtacggtttaaaaccgtcgcctatagtgttcactataggcgacggttt

SEQ ID NO: 135140 - DNA, 800 bp, Cannabis sativa
atagtgtttacctaatattccaggaaataaagaacatttggtattagttattcatcgatgaaaaccaatgagccaacccttttgatgcattctcaaaagagtcttccttctctaaatcgttgatatcgttcactgcgagaagctttaggtcgtaaaacttgaatattcgtctcaaatcatttaagctctcccagatgtgcttgcattaaattgttaaatattagggttttataataatttcagtagaatttgatagataaggttaatcgaattaaagaagagtatacatcattctaaaaagcattccctggttgtcgatgaagtcacacaacgccacctactgcaaatcttctccaaataacgtgatctaggtacgaggtgttatgaatccacggggtacccgagttgggattatatgacgtttatccttgactctcaaaaattcttcaaccatctatttaagtgacttagggattagtgccataatctctggtgtgaataattcatctacttgatcaacactgccttttctgcttggcatgggacctttgacacatcatgtcttgatggtggttgagctagtggaccctatacaaaacaccatatagtatatcaaatttgattctaattctactgaatttttggcagcataatggttgtagttgaacgcccccaaaaattttaaacatgcctgataacgaataaaatagataaaacaattgattattcatccatccgaccacagtacatgtatacgcagaacctacttcactatggttgaatatttaagatattcaaac

SEQ ID NO: 135141 - DNA, 500 bp, Cannabis sativa
tagcgtacatgtttttgtgattgtatattagataaatatatcagtaaaagcgatattggtgtacatagagttgcattagatactgacggatatatgtttgacaaattcataaagtacgaaccgatgctactacatcagtatgactagagtgctgagtataggatggtattatggtcatttgtactcatagtatggattgatactatcacattagtacgactagagtactaaatataggctgatattatggtcaatcgtactatgtcaattacatttgtggctcaattttaaacttgtgagtaggtgtatggatgtctagttacatgttagttattgtcggaatatgttttaccaggatctagatttactaccatgtatgtttttaacatcctaaacatgaatttctaaaacaatataaataaacacatataaaattttcagaaaaccatacagtgggtgcagcggaatattaatggctcattccactcaaatctctaacc

SEQ ID NO: 135142 - DNA, 1686 bp, Cannabis sativa
  modified_base (890)..(894): a, c, t, g, unknown or other
ttcgctaagtgttggttgccttgcgcggattgctgattgctttgctttgggcatgccagcaaggcaccctgctcggactatgccctctaagaagatactccaagtggattccacgtgtcaccattatgtgatgccacgtcagagtgcaaagattgggataacatttgccccccaagtctgtacgtgacttccaaagttgcatgtagacttcatccgagctgttcctacctttggatgtggacacgtgttaagcgcgagtgtctgagactcgatgtgaggctgactgtgcgtccgttcagttttcggctaataaatgctttgacaattaatattttaaaatccaattttctctcaccacggctgacggcttgcacttcattatttttgatttcccatatttgcttttatggagggaaactgaggcgtctgaggttcctttgaaatgattacctcttttcgtgacttgcctataaataccaaccagcattggcacataaactcattttcaccatccttccttgcttagtgagttagagcaaaaagagaggttcttggcttcaagttttctgaagtgccttcatcaaaactgcttgttggattgacgttgctcgaacccaaatctttgacccttgagtaagttttcgatttcctttatgcttattttgcatgtttacatttcgaagagaaaatatttaggaaaccctaggtctagcaactctctaattcttctttgtcataggaggcagggtgccttgggcgccaggtgggtaagtcctcagtcgaagattacggatgcgcaccttcgaactcttgaccagggcgaatacgtgggcgagctggactgctacattcccgcccataacaatcgtgccacaaaccctgacaagggnnnnngcgcctggtcgggtgcccatggtcagcaaggagtgttgatgaccttgcataaatacttcaaggatgtggcagacttcttcagtctctgcacggcccagttcactcctaagggcattaagtatttatctgccctcttcgtcctctacgcttcccaagggtggggtactccttctcctcacgaagttgcctggttctttgatttgaagtccaccgccaagcaaggcaggtcggggtacttctatctctctcaaccaggctctaagtggttgaccgacatggacgacaaggccattaacaagatagggcattttgctgatgagtacttcatggggaagtacgcgggcattacccagacacggttccagcaaattctgacatatcaccgtccagccctcactcttgctcttagggatagagctcaaaaacttgtccgactgccgggggaagaccagaatattatctagttgacctctgaggataactttgtgaggtacgggctctatcccgaggactttactcctaagtctgtggcagggaagaagaggaaatctggtgctggccggaccgaaccagctcatctggagaatgagctgattgaactgaagcgtgaagctaagttgaaaggaggtgcaagggccaagcaatatgctcaggagcccttgaatcctgaagatgaagctaaggaagagctggtgactccactaaagaggagaaagaaactcccagccacgcccaggcctgctgaacatgcgattcgcattagggagcctgtttcacctgttcggccatccc

SEQ ID NO: 135143 - DNA, 946 bp, Cannabis sativa
  modified_base (105)..(111): a, c, t, g, unknown or other
aaacttgaagatttttctcaaatcatttatgcgctcccagatgtgcctgcataaaattgttaagtattagtgtcttataataatttcactagaatttgatatatnnnnnnnattagattaaagaagagtatacatgattccaaacagcattccttagttgccgatgaagtcacgcaatgcaaccgactgcaaattctctccagataacgtgatctgggtacacggtgttatgaatcccttaggcataggaatagtgattatatatatcacgtttatctttgaggttcagaaattcaacaaccatccattttagcaatttagggatcaactccatgacctttcgcgagaataattcatcttcttcatcatgaccgccttgtggagaaagcatgtgagctatccccttcgacgcatcacgtcttgaaggcagttgagcgagtgggccctacacaaaacacaccataatatatcaaatttaatctaaattttaccaaaattttggcagcataacgactgtaattgaatgccctaaaaaattttaaacatacatgtataatgacaaataacacagacataacagtagtttattcatccatcccaccgcagtacatatattcgtagaacctacttcactatggttgaatattaaagatattcaaactccactaatcattaataattaatttataagaaaagttacctcgggtgttacaattaggtgtttaggccaaggaaggaacatgtttggtacttccctaacatatctacacccttcaattgagattgggatttcagcttcctcttgcagcattttcaaatcagaacttgggcatgtgaatcatcgtagtccgttcagtgaatagtgattttatcctcctgctcgtatagatacgctcgggccacaatgttgtcaatattgtcagagcagagatatacttgctgatca

SEQ ID NO: 135144 - DNA, 1521 bp, Cannabis sativa
tcatctggttttggtagtttttagggtttaaactgtatctaggttcatactagggttcacgcaatatgtaggttgttttgagatctccaactcattaccttcagatttgataaaattctctccagggattgggactgctttttgcttgcagcaatgtcccactctaattcaggaatttatcatctagaagttttatagtttgagtttcctacagaatcagccatcccgtataaacccaacccttcaaaacccacgtccaaattagagttgaacgatgctagggttagggaacacgtagtgagaacccaacaggaaggtattggtagtcgctacaggcatttcttgcaagaaatctccgaaggtaaatgccgattcttacgagaagcagcctggccggaaccatccagtgtgtcctttattcctgtggcaaagcctttgtttttacccaacgtcacgattgcttttgaactaggtgacttggattttgaaattatgcctcccaagccacgtacatcaaagactccccagaaccccaatgtcacctttgaggctgagttgatagaatcgaaggtgcggtctatctcaggctacacgggggagattttgaagacctacaggatcaaacttgggcaatcatgccaagttagatcagtatgggagggtgagttaagttgttaccccctgcacgttttgcaagcagtaactcggggactagtggtgagactagtaccagtggttctactagtatgggcgcctggagccttgagcatatcagtacaggggccacgcttcctcttcgagactacttcaaagattatataaatcacattggagttgccccattccagttgactcccatctcttacaggattctcgctagtttgaaagtcttatataaaatcctgaactaggggtgtcccacaccagtagagatcgagtatctttactcagttgaggccatcccgtcaaggaagaattccacagggggctttttctatctcggtactcatcctagcgagcctaaaattattgtagacttgccaaataaagtatccttcaagaacaacttgttctggacgtctagtactctttcccccatcagaacaaccacatttcgcaaacttcgtaagtgattgttcttttcttactcatttacatcaatcttcgtttttcaagtttatgaccaatgttttgtctattttgacagttctcttgacgaggcatactcctacccccgagatagttgtaggcacaggcgcctactaactctttcctacggtcttcggtcatacgatttcctttggagcgaggttaacctgtgatcagtgggaaggaatatacttgtgattataagattcccaagtattcctcttcacagcagattactgctctgcccgagcaccaagccagggatcgcttggctcaagcacaataccttcaaaacactgccccttgagaatttggtgaaggagcatcccgaggtaatcaatgtggtttgtctcctactgtacttagggctga

SEQ ID NO: 135145 - DNA, 1436 bp, Cannabis sativa
  modified_base (355)..(376): a, c, t, g, unknown or other
  modified_base (573)..(581): a, c, t, g, unknown or other
  modified_base (1375)..(1381): a, c, t, g, unknown or other
gcatgcacgatgctttttgtgtaagaaagatcactatgggtacgatttgtctttaaccctctttcctggaagggaaggattgtttaaagtctaccttactccccgtgatactttccattttatatttttaagcgatgtctaagcttgaattttttatgcaacttcagccttccttcgcggaagccaaagcttgattcataaaaattaaacatgactctcgcatgcacgatgtttttcatgcaagaatgatcattgggagtacgatacgtcttcgactctctttcctagaagggaaaaatttcttgaagtctatcttactccccgtgatccttttcctttgatcttttcaagcaannnnnnnnnnnnnnnnnnnnnncaacttcagccttccttcgcgaaagccgaagccttcttcataaaatttcaacaagggtctcgcatgcacgatgtttttcgagcaagaaagatcattggggttacgatacgtcttcaaccctctttcctggaagggaaggattacttaaagtctatcttactccccgtgatgctctccctttgatcttttcaagcaannnnnnnnnttgaatttttatgcaacttcagccattctttgtggaagccaaagcttgcttcataaaaattcaacatgtctctcacatgcacgatgtttttcatgcaagaaagatcattgggggtatgatacgtcttcaaccctctttctcggatgagaaagattgcttgaattctatcttactccccttgatgcttttcctttgatcttttcaagggaagtctaagcttgaatttttatgcaacttcagccttccttcgcggaagctaaagcttgcttcacaaaaattcaacatggctctcgcatgcaagatattttttgtgcaagaaagatcattgggggtataatcgtcttcaaccctctttctcggaagggaaggtttacttgaagtctatcttactcaccgtgatgctttccctttgatctttttgaaccaaagtctaagcttgaatttttatgcaacttcagccttcctttgtggaagtcgaagcttgcgtacgatacgtcttcaaccctctttcatggaagggaagcattgtgtgaagtctatcttactccctgtgatgctttcccttcgatcttttcaagcaaagtctaagtttgaatttttatgcaacttcagccttccttcacagaagccgaagcttgtttcataaaaattttacatggctcctctcgcatgcacgatatttttcgtgcaataaagatcactaggggtatgatacgtcttcaaacctctttctcgaaagggaaggattgcttcaagtctatcttactcgctgtgatgctttccctttgatcttnnnnnnnaaagtctaagcttgaatttttattcaatttcagccttcctttgcggaagccgaag

SEQ ID NO: 135146 - DNA, 1551 bp, Cannabis sativa
gtggattaaatacgctgcaaagtgtatcgtactgggacttctcgctaggaacatagtaataataaccctagcagtgagctaaagcttttcccatgtcctttcgaggttgataatgtaagtctcgtcgtttttgcgattaaagacataactctctatctgacaatcgtagttcttggtgacaagatgaacttcagtaatcaacatcatttaaatgccagcttctatctgagagagctgactcgacagagcagtgaatctcattgaaagatgtttgaagctgataagtgaaggtaccatgagtatgccctcctatagcgagatggatgtctcgctatttgctgttcaagttcattctactgttatgcttagttgtataatgtatattatatgctaagtgttctaacagtcaacatgtcttacttacatctcttcatacgtagtgaggttggtgcctcactttgtaatactgatgttgtccttatgatcatatctttgtatacaaaatggttttctcgtcaatacgtgaactaatagtttgtacatccttatctcgcttaagactttacagtcagcaagttataaatatactctattagctctacatttaataagttattccattttaatatcttctaatataatcattataatatttgttgattcatattctcccagtttggcatgtgtccttctctgaagtaccagccaaatttcaggaataacagtaaatatctaacaaactatacaaatgttaagggatttgaattgtaaacttagggttttaggcctcttatataaaggccttaacctttggctaaaaactttagtttcctctaagctagaaacttgctcttaaactcttagtgtttcataaactctcactctttctcactctctctctctcttacacgcctaccctagtgctttcataccttgtaatcctaagggtactatagcagatcccacctatagcaatctggatagtaattccctcggtataaatacaactaaaaggggggtaggtcattacccgcaatcacaagggggccgaacctccataataaatcgtattgtccattgcttttcatccttatttgtgcaaacatgtgacaagcattagatctatacgaccacgttgtcagttgatcactttttgaggtcaacaatgtccatacctagtgtgaaaagcagtctttggaatgtcctcctctcagattcttaactaatgatagcccgatcggagatcaatgttagagaagactatcttcccttgaagttgagggaacaagttgcaatcctaggtaaatgatacttattcttgatagttaacttgttcaattcccagtaatcaatacacatgcatagggattcgtctttcttcttaacaaataacactggagctccccagggtgacacattgggtcgagaaaaccctaagtcaagcatcccctaaagttgaatctttaattctttaagtttttctatagccattctataaggtgctttagaaactggcttcgctctaggtgttaatgttggaattattttacc

SEQ ID NO: 135147 - DNA, 617 bp, Cannabis sativa
tttttgttttgttttttttctttttgtttttttttttttttttgttgtaaatattattttagattttgtaatttgcaaaaattatcaatttacgctctgttttattaaaggcttatgcataccgcaactccttaaattatatatattttagtaagttaagtccttaaattttatttttaactaattgctccccaaactatataaattttaataaattaatcatcaaactttatttttgacaaattagtctctaaatttttattttgttgaaaacaatatattttgtatttatatgtaatttttttaaatataccaaaataaaaagaaaaaaaaaataattgaaaaaacttaaataatagtattaattttttataaactactgaaataaattttatttttaatttatactcgacagcgaattcataaaattttaccaacattgatgtaaaatttaaataatcaataaatatgtatacaaataaaatatttttggcctccaatcaggtttttagagtcgtcgaacatgaaaatatttttattccacaaataactcatattatatccacgtattttaaataaatttccgtaattaaaaacaaattacgcttatatatcca

SEQ ID NO: 135148 - DNA, 1365 bp, Cannabis sativa
atttaacaaaacagagggtccattctgtaactttttcaaaacacagggtccaaaatagtatttacccataaaaaaattatcattaattttttaatatgaaataataaaaattaatagttcataattaacgctataaatatactaataaaataataaaagtggcataaaagtaaataataaaattgtccatttatcataatgtaaattttgtgttataataaatattttgtcaaatttagctcaatatttactatgtgccaaatttacatcaacttttagcacaccattggagaacaatttttgctatgtgaactatattttaactttacatcacttattaatttacatctctattgaaatttctctaagttttttttaattctttttatttttctcttattcatattgtttataattagtcatttttattagtatttttgtataaatttatttaatttatttttttttaaagtacacatgtattggatatagagaaaaaattttgatacatgtgcatttcataatttaattattctctataaacttgaaataaatatattctttttattgaaatagattaagtaatttagttgattagacaattatatattaaatttttttcaaaaccataagtaagttttatagtaaaatttatgcgggggtcctgtatgataatacttgagtataataatatatttttattaatattttatatttgcttttaataatattttttttttggattttaaatgaaaaaaaaaattaaaaaaatactttttatgcataaatttttttttttttactttttgtacttatttattatttgtaattgttttgaaaacataagagaaaatataattttatctttaaaataaaataaaagcttgttagagtttgtctcctaaactttgacgtgtaccaaattatatatttaaactttttaggtcgttaaaaattccttacaaactattgagattgttagattcaaaaacttgtatgtgtcacttcttgctcttctatttcctattgtacatgctctttttatatttttatcaatgtgagtaagattacatattagtaatttgtatgtcttcaaatatgtattttattttatttgtaccaattataatcacatgttaaattaattgtatatttttgttgtctttttcctctttttctttcatattttttttaagctatgttattattttttctttatttctaatgagttaatacattccaattaaaacatatattattaataaaaataataaaaataaactggtgataggtgccatggcaccacccatcactagtatgtatatatatatgtggaagaggtttcaatggttacatttttattgt

SEQ ID NO: 135149 - DNA, 628 bp, Cannabis sativa
gcttaggttgttcacattggtgagtggcttctctttggcctcttgtgcatatcgctcctgcgactttctggagtcacctgcgatatggggtctgcttatgatggtgaggatgttgcaaggagttctcgaaccactcgcattctggttttcttctttgtcatccgctcggggatgactttcctcgttcttgttgtatttgctgaactttcctctcctgatcagctcttcaatctcgtcctgcaaaacccaacactccaaagtagtgtaaccaatatctttatggtacttacagaattttttggggtctctcttgtcgtagattcccctgatcgggggaggcttcttgaagaccccattcttctcttcgatggcgtagatatggtctcgaggtactgcgtgctcggtgtaattcacgaagcgcgatccacctttcctttttggggaggattccttcttaggaagggacttggccaattttggacttcgctgtctctgtggactgcgtcttcttcggcttaatcctctggaaatctctcctcggggactgcgggatcgtgatcgcggcactggcgatttacgcttatctttgtctttctccaattctgccagagaattttcaatcctctta

SEQ ID NO: 135150 - DNA, 630 bp, Cannabis sativa
tttttttttttttttttgtaatctagttaatattttgctattatcttgttgtttgtatgttattttttatgttgttttgatattatttttctgatattttcacgttgtttttataagatactacataattgtaattaaaaaaataataaaacttgtaaaattgaaaaaacaaattataaagatgtaaaataataataataataataatttgatcttaaaaatgttaaaattttgctgaaaataaattttgtgtaaatttttcatacggaaattatagcaaacagctccaaattatatgactatattagtaaatgttctcatttcaaaatttgtagagaaatgacccttttagactatttattttatattgtcttttaccacataaaaaaattaatactttttttcatattttgtttaaaattagaagcaaattacttaaagattagaaatttttacatcataaatacaaaatgcaatctttatcacactaatatcactacacggctatatcaacgtttttactcttcttccttattttattactattttaccacatgcacactcattccatgcatcggtacacgtgctgacctatgacccctatcaatcaaccatccatcatttctctct

SEQ ID NO: 135151 - DNA, 732 bp, Cannabis sativa
  modified_base (428)..(438): a, c, t, g, unknown or other
catggcaagtcacgggattcccctggtttggattggtcagaaactcctcaaccctggaatccattatttctggctccggttgaggtttgaagtctgtgggaactaatggcgaatggttggtgcatctgggtattatgagtctgaaaggaaaaacttctgaactcagaagagacattttgacaagaaggaagtaatccattctgaaaatggatttcactaaagagccagaggacttgtgaaaaatgacaagcatgagcagtctttttatacacaaagttcagtagcaagaaagctaaatattgagaaatctaaaggcaaggaatcgtgcaaaatatgaataggcgattcataatgatcttcaaaaccatacaaccgccagaatcgaaggaggcgtcctttccaagaaaggattttggcaaaaatgcccnnnnnnnnnnntaaaaagctctttttactaaaaataactttttaaggggcaattgttatacccgaaattcgaatggaggacacatgtcaagaaaaagggaatgtgaatcagtgccgtatcttttatggaataactcattaattgtgtaagtactagagtatatttgtaaccagctgtctgtaaagtcttaggtgaggagtcaatgtatgaactgatacttagagtattaaggagaaatcatatgtcgctaagggataatagcgaggcaccagagaagagtaacacatacctcagcttgcaataag

SEQ ID NO: 135152 - DNA, 1222 bp, Cannabis sativa
  modified_base (1171)..(1180): a, c, t, g, unknown or other
atgcaaacataaatcactttaaatttcttatattgataactaatcagattgtaaaggattttatttagggcacaaaagccaaaactttgagttgaagttaaccctttccatttcgtctatggtccattggctcattggtttggggataacgatttcattctccattatcgttggttttgaccacccttcttctatggacatccatactctttcatcaacagctctcaagaaagcacgcatcttcgtcttccagtattgatagttagcaacttccaacatcggaggtctcgaggttgatcgtccttctctaaacatttccattctgcacagaggagaaaagaagaaacacactcttgtactgtagttcttggagaaagaactcagaggtggttagtggtgacagaatcaatcctcaaacacgtattaagagatttcaaaaatcaaggaataagaataagacaagtataggatctaacataaatttttagaaaatttcacgctctaataccaattgaaagtacaacttgttgattttaaagattcatattaccgagttctttatctttgaatagattgatttcaacactcggattcaagactcgaattgagaataaagcagtaaagcgaggttaagaatagagctttactgttttgtaacaccctaacatttaggcacgctacccaagaagattaagaaaccctaatcctccaaacggggttactaataaaataagcgtggaaattaaacttttaatgaaaacagaataaaaataaagttgtaataattttaaccttacaaacaaaagttacgtgtttcgggatcccaaaaaaaaaattattttacaaaatattacaagtcttttcccttacctgacctaagtggaaaaatagagttacaaaagtttcaacactggtacaccccaacccgcttggtctagtgttgcccgaacatgtaaattcatcgcccagctcccacactcatggctgattagaaacaaatttaccctttcctgcacagtagagcacccgtgagccaagcccagcaagacactaaaatatatcgataatcataaatacacatcacataaatattaatgccgttttatttttgtctatatctcacagacccgcgtgttacgctcacatgcctatttatgtctatgtggcatannnnnnnnnnttacgctcacacgtctatttacattaaggccttagaacggtt

SEQ ID NO: 135153 - DNA, 550 bp, Cannabis sativa
taccaacttgattaattaactaaaacataagatagaaacatataatagtgcattccaaaatttctttagtttcataggaataattttttatacaaacaaactatatcgagtcagttacaattcgtgataaaagagacgacaactagtagaggcaagaggtggaaaacggcgttgagaaacatatcatgccttgagagtataaacttcttcaataataaaatatatgcctacatggttggccaaaaatatttgttgatgctcaaataatatagtaataggtagtatatataacatagatagtgattacgtattaaatatgagaatataaagagaatgtgataataataatcataataacaataatacatatttaatttgatataggagttataaaatgaaaagacatattatatttttatttcaattaatataaaaataaatgttaaataaaaaaaaacaaaaaattagacattagactaaatagaacattagaagaagagaatgccacatcatctctatcaaaaccctcctttatataaatatatatata

SEQ ID NO: 135154 - DNA, 800 bp, Cannabis sativa
caatttttaaaaacacagtcttcccctaaagctgatcaaattggtcgtcgatcttaggtaaaggatatctattcttgatagtcaatgtcccggtagtaatttcacatgcatagggatccatctttcttcttaaaaaattacattgctgctccccagagtgacacactaggtcatgaaaatcctaggtcaagaaacccctgaagctaaatcttcaattctttaagcactgccagagccattctataaggtgctttagagactagttttggtccagatgctaaatcgataacaaaatctatttcctattgcggtggtaaatccagaagttcatcaggaaatatatctaaaaattcctaaaccactctgacatcctctcgccgaattgattcaggccgtgtggtatccaataccactaccaaaaaccctagccatccatctagtaataattctctagctttcaatactgagatcacaagaatttgggatccctgaactgatcccacaaatacaaatggttctttgcccttgggttggaagataaccatcttctgcttacagtcaataataacaaagtacatagacaagaaatccattccaagtatgatatcaaaatttgctaaactcaattccactaaagcagcactcatctctctatcctcaattttgattggcatagacctaacccaccttttgaagataactatttctccgctaggcagtagggttccaaaccccttatcataactatcaaatggtctacccaatttatcaaaaactctggccaccacatatgaatgagt

SEQ ID NO: 135155 - DNA, 876 bp, Cannabis sativa
ttttagggtactctcatgtgcctctaacataatatataattattaaccatctcattatggttgttgataaatattgggcacataatcaataattttgtttatggtatacgtctataattatattagttcataataatcattctaacactttcaactaatcagatgtgaagactcggtttgactcaaaccgagtatatatataataataaataaatataatataatatatatgtatatacaaaaaaaaattaattatatacaaaacagacccaccccctgtcatcccccctctctctatcaatctctattttctctctcttcaaacacaaaaaaaaacccacaaaccaccatcaacaacacactctggcaacccacatccggccaccgcctagtcccacgcgctggacaaatcgaaagcccaagtgccggtgacttcaccccccaagcggcgccgctcctttcgccaccgttagctcgggatcgcaagtcaaagtttggggtttcaaactttgaacggatttttcggttacctccggtctctgtttgacgagacgtcttcaccactaaactcagctcatcgaggagaacaacctacactaaaccatttttcccagctcgctacttttttcggtgacattttcagagctccgcccctttctggcgactttccggcgatatcgtgtaccgttttgacaaatggttggcatgggtgtgatctactcatcgatgtggtcgttttgatatatactacccctatttttgacgatatttctgttacaccaatttttaccgccaccgattgttaatgtgcaccccttaggtgaggcttcagaaccctaaattttaaatataatcatattatatgtcgttgaactc

SEQ ID NO: 135156 - DNA, 606 bp, Cannabis sativa
  modified_base (147)..(162): a, c, t, g, unknown or other
atttataaagctaaaaagtggtcaatgacagaagtagtatatctgcaatcacacaaagatagaagtggtatttttgcttcctatgcttatctagagaaaacatcatataacgtgaggttaactttaatatataaagatttttctttnnnnnnnnnnnnnnnnaaaaaattattaatattcttccaagataggtttgttagagagatttgtggctaagataatttttttaatttaaaaagatattattaatatttaaaagattatttaattttttgggtttaatggtgactatttaattgtgcaaaatattttttattttattttttttttttgaaaatgtgtatacacgcttaccaaattaattattattattttttttcttttttttttttctctcaaaagtttaaaaaaaaattctagtcacagtaataattgtttgagcttaaaaattatattgttacaatctactctttgaggtgatcattttaacatgtgatattttttcaccgtcaatgaaaaaatactaaaaattaaaagtaacttttaagtttcttttaaatttagttaacaaaaataattaaaattttaaatttaactatttttatt

SEQ ID NO: 135157 - DNA, 770 bp, Cannabis sativa
gagttctaaaactcaaaacttgattaaacctaataacatccattaaatcatgcttgattcaacatataaaactataatctaactccaaaaacacagttcatacaccaccaacaataataaccaccacagcagcagctaataataactcaatttttcacatgcaaaaaatccatttcttaaaattcaagaaaactagagaagggtagagcttaccttggcttggattcactaagaattgctagtaaacacaacaatttgatgaaagaaaacaaagaaccctagctggttctatagggttcgaatgagagagagagagcttgagagaaaagagcttcttttttttaaaaaaaaaattcttattttgtgaaaatgaaatgaaaacttgtttttattaaagataatatcagcttatttgatttaaaaaaaatcagatttaatcaacttaagtaaactcacaaaatgacaaaagactaatagggcaaaatcaccattttctccctcccacactaaaagtcataaagggcacttagggatattttgggaaattctaaaatcccggctattcctgacattcccaatgtctaactatattgtcccgctatactaacaatactaggatgtgattctaatagccaaacaccgtgtttcaatgttgctggacacaaaacatgataatttatgaaatttctatatatgacataaaaatgcattctgaatttaaataaatcatcgaaaataaacaattcaatattaataaataattttcataa

SEQ ID NO: 135158 - DNA, 513 bp, Cannabis sativa
  modified_base (481)..(487): a, c, t, g, unknown or other
taggaagagatttgtcgaaaatgggattttttagatcgggcccgatggggcccgatgcccgtccgatgggggcatggctggaggttgaagatgacaactcggtgggcatgatgacccgatataggagggttcgatgggcccgattccttgggcccgatgggcccgacaggttcgattctttgggcccgatgggtccgatgccttgggcccgatgggtccgatttacgtttagggaaaaagatgggaagagaggagttgatgtaattgggggagggtattttggggaaaacaataaagttatcatatattagaaatattagtaagtataagtttaaattttttttttaaggtaatgtaaggatagaaattcaaatttccctttaaatatgtatctatcattaatatttttattatcaaagaataaaaaatgaaattaccttttataaaagacaaaaaaaaggattttttttttatttttacnnnnnnnaacaattttttttttttttacatttt

SEQ ID NO: 135159 - DNA, 1265 bp, Cannabis sativa
ggtgagttgaaggttctaaaaaaacttacgtattgcctgaaccctaatgttgacccaaatacagttcaaccctaaaaattactaaaaccaaatgagatggcgatgatgcgaacaaatgatgcagcaatgaaacctagaaatacaatgtaacaagcatgtaagatatcaagaagaaaagctacttactgtttatagttagggtttggggcgatagacagctcttcggcctgcgaatctttgaatgcagtgaggatctcttcaagaagatgaagttagaggaaacttgcagaaaaaatgtcaaggacagggatggcatgcaaattcttgggcaaactcaatgttgtttcttagcaaagaagcttaagagtttctcagaatttctaaaatggaggaaataatgcaaagatggttcctttttcttaccttatactcttgaaattagttacgttggatcagagagatgtttgatcctacggacataattcaaagtagaagtcgaaaagatggtcatttaatgatgatgtacctcgaaactgcaaaactgccaaaatcaaaggacgtgcattttttcaaaagggattataacaaaaataccctttgtaatcattaaaaagtacttttttttagaaaaaaactttttaaggggcaattattatcccaaaattcggttaacacatcagaggaaaacacgtgtcaagctgggaagatacaaaccaaggcacgtaattataattacatttgaggtggaataactcgttaaaagcataattgatatagtttatttacaactcggctgactgaatagtcttatgcgagataaagatatacaaactgctgccttgcgcatcaacgagaaaccatgtaacttaaggtgtataagacggggcactaaccttgattacatggatgagatatactgacagtgaagacacttagcgtataacatgcagtatacaagttgagtataacagatgggtgaaccaaagcaagcgatagcgaggcgtccacctcgccataggaagacatacacacacaaaaaaaatcacctcgtcaccagaaactgcgattgtcagatagggtgttatgtttccagagtaaaagcgacgagatttacattatcaaccttggaaagaaataagaaaagctcgagctagctatcaaggttatcgctgctctattcccaacaagacatcccaaaacgatacgatttgcaacgtatttaatacacgtttattttgacacagtaaaagcggattaatcacagc

SEQ ID NO: 135160 - DNA, 773 bp, Cannabis sativa
tggtggtgttttatctgcatatttttttttctttttttcaatttatttaattaatatctatgaaaataaattatatattacaaaataaattattactattttgacaaattaaaatacatttttttaaacatcaatatacaaattttatctcttcaaaaaaaatatacaaattttatccatactcttaacaatatttcaaagtggcgatccaaggaccatgaacctataatactaagctccaataaactaaattatttattgaatctcatcaaccaaataatcatatttattaattctatgattactccactataaatataaaattaaactcttagtaattataaaattatatttactgagttttactgcaatatccattgatatagtcgatttcagtggttagccctctttgtgtcagttcataattagttttggtgaaattactatttacccttctaattacttatttttatttatccttaagtaccgttaattcactagcaaaagtataatcaagatccaatttaaatttttacacaacttttcagttccataattaacacttaaatagaatcaacatttgatccgttaggaaagtgagaattccataattgtagatcatgttccgagctatccatattattagattctcaaaacaactgttgtaagaatcatcttctcttaaaaactttaacgagtgaattaaaaaaactaataacatgaacatgagttcatgattactcaggatttaggccgatctattattgatcatc

SEQ ID NO: 135161 - DNA, 884 bp, Cannabis sativa
tttaatttacgatttggatttctcaagtggtttcttcattggtttcacggattttggttgcgatttagttgttccgttagttacaataaggatttctatgtgaaattccataaaaatgtaaaaaaaaaaaaatcctaaaaaaattattaaaatggtctttctttctattttaaaatagaatagtcattctactatatagtagaaacactattccattagaatgacattctaatactttaaaatgtaactaaacaaatgaatataatgaaaattgattcttttccattctatttcattttgaagagtactaagagcatctccaatagtaatattttggagaatgcttgatgaggtggaaagcttatgtggcaaaatatagagatgttatgccattggagataaatgaatgctattcttgaaattggcattgatgtcacacaatggcattggtgctatgtcttttttatacaatagaatattaaaagtgcaatatatatataatagtttaataaagaaaaaaacttatatatataataatatgtgatatcataattatagtatttttaaaaggtattataccattggagtgtttttaaaaataaaggtgccaaaaatgatgtagaagaaaaataaaataaaatattatattttggatgatgtggagatatagagcatcttcaaagaatgctacctttgagattagtgtatttgtacttaatattatgaaatttttacattaaaaatacaaaatgttaactttattaccaaaaaactactacacagttacccaaacatttatacccttttcttttaattttttacatttgtaccacatgcacacacaataaatgctttcttgattgacacgtgagattgatgtacca

SEQ ID NO: 135162 - DNA, 659 bp, Cannabis sativa
  modified_base (88)..(92): a, c, t, g, unknown or other
ttggatggtttcatgatggtttatgtgtttatatgatgaatgtatgtgttttacgaaaattttccatgaaaatattttatttggattnnnnntgaaaaattaagcaactttcgtttgtacggaattcgatttcgattaaaaacgagaaagttatgaaggtttgaaaattggatgtccatggggtcgaagcttggtgcacgcacgcaccaggagcttcggacaagaccccttacgcgcgccgacaagggacaccaatgcagtctgaagccgtgtgcattcagacacggaccctgctgtccgcccgagggaatcctgaacctgccgggttttcctgcacatgcaccctgcatcctttcactcccgggcacggaatgggctgcttgcagcctgtttcgtgggcagctgggagatttccccaaaaagtgcgatttttgtgattttttccacaaatttcggttttttcaattttcaaaccccaaaattaaaataaaatatacatttttaatatatgtaaacttaaatatcatttttaaattaataatattcattaatagattattatctttgatattttgaggtttaaatttaaaaattgattattttattttttaaaattatggttagatttaaaaatttgttaattttcttaatatttatat

SEQ ID NO: 135163 - DNA, 591 bp, Cannabis sativa
ggaaatagcttttgggaattatcatggttttggttttcttagtaatgtgtttttctgatagaaatatgtgtaggttcaaaatgagtaccttatgcacctaactgtagtgtttagaaaaacatcaaattaatacacactgtggccttaatttaatgggtgttaatataggattaaatattagattgatttaggtattacatcatgggagctgaaaccgagcatgcaacctagctacttcaaaatgttgctggcaaatctagaaccacgcaatatatagtgcttttgaagcaattctcaccaacaagtttctaataaccaattcgaaccaaatcctcatcccaccgctcacggcccattttagacacatatgagtattaaacataattcattcttaagagtgtgcttagaagtaaatataattactatatagtgtaattatcaaagtattaattacataatctattaattaatattttaaaatataagatacatttgaatatgaggtgataattatgtataaatttctaatatcatgtttgactaaatagttaattcattcattcaaaaaaaaaaaaaaaaagagttaataat

SEQ ID NO: 135164 - DNA, 1819 bp, Cannabis sativa
  modified_base (27)..(37): a, c, t, g, unknown or other
gtatttctctctctttctctctctctnnnnnnnnnnntctctctctctctctctcggtggtggaaaactagagcataccccaatcactcaagaatctttcaccattataatgagtaaattatgttttaagcattttgttcgacattagtaatagtatgtagtttgctttcgttatatctgtcgtatttgttggaactggtgttttttggtttgaaatggtagagatctggtagatctattttttgtcgaaatctgggttttctagatatcatcgacagtttgtcgatagaatatgtcgatattatgcgaaggaaggtcagggatgaccattatcgacatgatttcgataattttttgataacgtgtcgataaaaaagtaaattaaataacataatttatttgacaatttgtcgatagtatgtcgatattaagtcgaccatgtttgtcgacaatatatcgatgcaatgtcgatatattgtcgactttaagataaaaaaaatgtaaagaagcagttgacaggaaacaagtgaaaatttttaaacataaataaagttcattcaaacattaaaactgactagtaaacaatcataacataacaaattaaaattctttaccgtgttggtgagacttgcaatacttgcataaagatccaggcttcaccggtttaccattaaaatagcctaatttgcaacgacaacacccttcggggaaccctggtggtggagccggccatacatttgttttgtgaaattcttgttgaagttgtaggtacctgcactcgttcgccagccattctttttcaaaatggttatagtcatatagagatttttgcatttgaggtgtaattttggcataactaggctccttcttgatctcttcaagagttagaatttggtatttgttctttttagtagacatttagaactataagagaataacaatattgaagtataagagaagagcacttatgaattagaaagaggtttgcttttatagagctaaatacttgttgggaatgtaggaaaaattaattaacattaaatgtgtaattatacaagtgtaacgcgtgcaatgtgtatttatcgatacaatgtcgatattttgtcgataaaactcgaacaaaagaaattcagtctacacattatcgatacgatttcgatgttatgtcgatagcttatcgatagtctcaacagatagagtggtagttggaaagtgggaaaaaataattagcattaaatgtctaattgtacacgtgtctggcatgcagtttgcttttatagagcagaatacttgttgggaatataggaaaaattaattaacattaaatgtgtaattgtacaagtgaaacgcatggaatgtgtatttatcgatagaatatcgatacagtgtcgatagtttgtcgataaaactcgaagaaaagaatttcagtctacacattatcgatacgatatcgatgttatgtcgatagctggaaaggtgggaaaaattaattagcaataaatgtctaattgtacatgtgtctgacatgcaatgtgcattgtcgagtttatatcgatagtgtatcaatagtttgttgataggactacaaaatttcccaacttaattttgtcaatatggtatcgacgatatgtcaacatttcatcgattggactgtcacccgaattgtagattttttttatcgatagaatatcgatgggatatcgatagaatgtcgatatttaaatggttgttgttttattttctttattttttttagtattttttggtatttttccctaacttacctttttttgtttgaaattgcaggatcgactgtgtt

SEQ ID NO: 135165 - DNA, 825 bp, Cannabis sativa
tgggttctagtccagacctggtcttattccaattctgggtctgagatcgggtttggatcccggtctgagtcttagtcttggtctggatcccggtctgggtctgggtcaaggtataggtacaaatccaggttagagtcctagtttcaaacaatgactacgggttaggtcaaagccttagttccaaattcggatctcagtcttggatctcggtcttgttcttccagtcccaatcccggggggtgtcttcagctgggtccttaattttttgggttcgggtctgggttccgggttgtgtccctgtagtcaggtcctcagtttgtggtccaaggtcaggtcccgtgtctcgagtctagggtcaagttttgggtctccgtcccggttttaaggcctagtttcaggtccaagtgccttatctaggtcttgatccttggtccagatgtgggtccaggttcgcgtttggggcccaggtcccccatctaggtctggatcctaggtccaggtcaaggtccaagtttggctcccaagtttgggtccgagtctaggtcccagtatgggttcaagtttgattctgggtccgggtctcgatctgagtccaagtccctattcaggtccgggtcggggacacgacaaggtcccactcaaggtctagatctgagaccaggttctggtctcagttcggtccgagttaaggtcctaagtttggtctaggtttgggtttggatccgggtctgggtctgggtcttgggttccaatctcggtattggtattggtctaggctcgtgtccaggttagggtttagggtttagggttttgggtttagtattt

SEQ ID NO: 135166 - DNA, 514 bp, Cannabis sativa
aaagctcgcaccagggcatacaactctttatcataggtggggtaattaagtgcagccccacctagcttttcactaaagtatgcaaggggtctcccttcctgcataagaacaacaccaatacctatacaagaagcatcacattcaatgtcaaatgtgttagaaaattaagtaaagcaagtactagggcgtgagtaagcttgtgtttaagcagttgaaatgcctcctcttgtgcttcaccccattcaaaagcaacattctttttgataaccactgtaaacggtgctgcgatggtgctgaaatccttcacaaacctcctgtaaaaactagcaagtccatgaaaacttcgaacatgacctatagttgagggggttggccactctttgatggctttattcttttcttcatcaacctcaatacctgtagcactcacaacaaatcctaggaaaacaatcttatcggtgcaaaaagtgcatttactaaggttagcatgtagtttatgttttcgaagcacatc

SEQ ID NO: 135167 - DNA, 707 bp, Cannabis sativa
tggagtatatggtttgaacgtaatgctgagtaccatgataaaccatcaaagaaggctgctgcagtactggattttgcaacaaactaccttttgaaatatcaaactgctcaggcttcctctctgcacaatactggtactgctacatcaaatgcttcacgggtttcagtgtctcaggaaacaccattggcacaaccgactgctctgtggactgctccaccactgggtaaatttaaattgaattctgatgcagcatgtaacaaagctttgggtaaaattggtataggtgctgttgtgagagactcacatggatttatagttgctgctctatcgaaaccaatacaagggtgtttcaagcctgaagaaatggaagctgtagctcttgctcactctctgaaatgggctgtcaatcttggattatcaattgacttcatagagactgattctttattggtggttcaaggtttaaaagtggcacataagtgtaattctgcttttcattcgatatattgaaagatgtaaattatttagtatcctttttcccacgagcacaggtcacatatgttaggcgatctgctaatacttatgctgatgttttggctaagtttgctcttacggtggatattgatgtttcttggttggagaaattttcacctccacttatgactgttatgtaatattttcctattaatataatggtcttttctcaa

SEQ ID NO: 135168 - DNA, 2540 bp, Cannabis sativa
ttagtgcatgaaaactagtttatatctcaatgtgtctaatagaaaagtgatgcacgacagtctttgtttcgtccttgaaaagtttcacgatttttcgatatgtgtatggttagattttagcagaacactaacgagtgtaagatgatggaaaaaacttgttaaaatataccttgaaaagaagaatattttaaattttttaattagagggccattttaataaaaattaacttgaatccaatcttcgtattcatgtcttagtagtacaaattcttgtgactagtggcaaaaaatattctacgatgggtccgggccacctttcacaaaggggtaccactataagaaatgtctattagaaaattgacatgtccattagaaaattgatgcacaacattcttggcttcatcctcataaattttcacaatttttgagatgtgtagggtgagattttaacaaaacactaacgagtgtaagagtaaagaaagaacttgttaaaatttaccctgtaaataaggatattttgaattgtttaattaaggggccattttaacaaaattttacgcgaaagcaatcttcatattcaattcttagggtagaaattaatatctgccattacattcgttgattcgtattctctaaggttaactcgcgtcatcctctaaagtgtcagccgaattttgggtataacagaaggaacgaccattccaatgtaacagtagaaaaaaaaataatgatttttatcaattttttatgcattttaaattttatattattttcattcctattcacattcccctgaaccgtgaaccgtgaaccctcaacgccacacccctagaccctcaaacccttaaaccataaaacactaaaccctaaatcctaaacgctagaacccaaacaacaaaccccaacaccctgaactgtaacacctgaacacagaccctgaggtggcatttggttagaggtaatgaaatggaatggaaaagatataattttcattccattcttttgtttagtttctttttagagtattagaatgtcattccaacagaatgccctttcaaccattttggtggaatgaatattctttttcaaaattgaaggaacgacaattatcatgtaactagagaaaaaatttaatgatttttatcaaattttttatgcattatatattttattttattcaattctcattcccattctcctaaaccctaaatccagatccgtgaactttgaaccctgacccctaaacccctgatcccaaccctactcgtacccctagccccaaccctaccccaaaccctaacctctaacccctaaaccctaaccccaacagcaaccgtgaaccttaaaccctaaacctaaaccccaaatccaaaaccccaaaccccaattcccattctcggacccattcccactcccattcccattccaattccccttcttattcccattccaatgcccatccccatccccatctccgttattgcccttgccattcccattcccattgccttcgcattcccattcccattcccattcctcagcccactcctatttccattcccattcctggcccattggcattcctattcccattcccattcccattcccatttgcattcgcattcctattcccattcccattcccattccatagcccattcccatttctatacccattcccattcccattctcattcctattcacattctcattcccattcccattccttggcccattccgattcccattctcattccaattcccattcccatccccattcccaatcccattcccattccccgacccattcccattctcatatccatgcctatttgcattcccattcccattccctggcccattcccattcgtattcccattcccattcccattcctattcccattcccatttccattccccagcccattcccattcccattgcgattcccattcccattcctcgacccattcccatttccattctcgtgcccattcccattccttcgcccattcccattcctattcctattctcaatccccagtcccattgcacgacccacgcccattcccattccaatttctattcctattcccattcccattccaatttctattcctattcccattcccattccctagtccattcccataacgattccccaaaccccaaaaccccaaatgcaaaaacttcaaaaccccaaatcccaaaccctaaaacccaaatcccagaccccatcccctaaaccgtaaaaccttaaaaccacatacatcaaacggtaaaccccaaaccctaatcccaaaaacaacaaacctaaaaaccccaaacacaaaaacaccataccccaaatcccaaaccctaaaccctaacccaaagacaagaaacactaaaacccaaacaccaaaccccagacttaaaacctcataccccaattacttagtccaagatcctaaactctagaccctagtcataaaaccccaaaccctaaaccccaaaagccaaagactctaaacaccaaaacccaaaccgttaatcccaaa

SEQ ID NO: 135169 - DNA, 551 bp, Cannabis sativa
tatattatcgtagataggatcattggcaaaatgatctgattgataatcgtcatcaccctcctctgaattcaccggcgccgctggaatctctgcctctgcattctccgaaagctgcttcttttcactcttataaaggcttttgaacatcttatttacggacttagcattagatggcgatccttgatttttagccacgaagatcttctcagttttgctgtcattttccactttctcaaacatgttttgcaggacatataatgccaaccaaaagtggtatcaattctaaaaatctttgcctttatagtaactttgtattcctacaatcaattttttttttaatatttttaatttaatttacataatgtagcactaatgagaaataatacaacaataatagtaaagagaaaaagaaaaggaagaaaagtcacctgcattccatcatctcagtcagcctctaacagttctttaatgttcattcggttgacgaacatctcttcctcaagagaaaccttatacacattagagctttcaatatattgcaccccattgac

SEQ ID NO: 135170 - DNA, 546 bp, Cannabis sativa
ttttattctgataattatatttttgtttaaatatttaaattctataaaaaattttaccaaaagttgaatttaatttcattgaaaataaattttgaaactcaaaatatcgcaaaaacaagcttgcacaaagagtatgcattgcatactcttcatgcgcgcacatgggagcacatggggtgtattgaagcagcacacagcctacttgaggggcacaacttggtcagctggggcttaggacaacccttgtcctaaaaaactcggtcatgggcttgtttgaagccgtgtgaaggccgcgtgatgcttgtccgcgcgcgcacgtgtgcaacatgtttgagatacaaccttcaaaaaatcataactaattcaataaaaatataaattaagttctgtaaaagccaaaatttattaaattttcatctaatttccagaacaaatactttcagaatgaaattaaaaaaatttatcattgtaaaatcgtgatttccacacaatcatcaaatatgcacataaaccaacatgaacacatccaaatcaacacaataaaca

SEQ ID NO: 135171 - DNA, 1265 bp, Cannabis sativa
tttttaacgtactgtacagctcatagctaatcaacgagattaaagaatctgtgatttttcgagaaacccagcagcaaatccgggtaaccagttttacaggccctgtaaaaccggctagctagtttatcccagaaaacccaaaacattccaaaacctaaccaaatcgattctaaactttaccaaaccttccagacatgcatattacaccccaataaacatattcgaagcaataaaacaactacccaagctcagaatcaaaaaacaccattaaagagtcaagcttgagttttaaaactcaaagcttgctcaaactacagcccataaaaccagtccaattcaacatatttgaacataattcaacttctgaaaacaatatcaaacaataacagccactacagaactccaaaaacccaattcatgcaaaaaccataacttgaatctcaagaaaattaaaaaggaagttgctaggagcttaccttggcttagattctcttagatttgatagaaattcacaaggattgaagagaaaaatcaaaaccctagctggttctaggtgggttcgaaagagagagtttgagagagagaaagtgcttcttttttccaaatttcttatttttgaataaatgaaataaaagattggttttattaaaattaatctcagcccatttaattaaacaaaaaatcagattgaactcaataataagttcactaaaggacaaaagtcatttaggcaaaatgaccattttgccattcacacacgaaaagtcataaaaggtcacttaggggtattttggtaaattctaaaatctcgactattcctgatatttccaaggtctaactatactgcctcgctatactaaaaatactaagttgtgattctaatagccaaacaccgcgttccaatgttgccgggcacaacacatgcaaaattatgaaattctatatatgacatataaaatgcattatgaattcaaataaatcatcgtaaataaataatttaagattaatatacaaattcataattaaaccctaattatgtgtaattttcaaattaaagctaagcggtctttacaaagataaactctaagtttgatctaatattaaacttaataaaaatctgattatttagcgcaataataagtcactaggagacaaaaagacacaaatggcaaaaaaaccattttgcccccacttaagacaaaaattcactaaactatctaagggtaatttggtcaactctgaaatctcgactattcctgacattc

SEQ ID NO: 135172 - DNA, 1136 bp, Cannabis sativa
gtcctataaaatggacgcccagcgaaatacaagaagtcagggtaatattgttgagacgggaggcggtcagggaaattaaaacccccagaatccccgtggtcgcggtcgtggccgtggcagagttcagggtggtcgccctgtaaatccacccgaagctcctctggattgggagcagagatttgcagaaatgcaagatcgcatccgccagtaggatgaagaaattcagaggttgaggcagtagggtcctcctgccgtgcctcctcagcaagttgttcgggccgttgcggttccagcggtgccagcagaacaacctattgttggcaatcgtatggagtcgttgaacgaaaggttccgaaagcaagcacctcctgtgtttctgggaggtcctaatgtgatgaaggcggagcagtggctcacagtgattgaatgaattttaaattttattggagtggttggtaatgatcgggtcacctgcgccactttccagttccaagaggacgccttcgtgtggtgggagttgataaccctcactcgggatgtcacagttattacctgggaagaatttcaggagttgtttaactccaaatattacaatgaagccgtctgcagtgctaagcggaaagagttcattgagtcggtggaaaccgaggggatgtcggttactgagtatactacaaagtttgaccgcctggccaagctcgccgtgggtatcgtgccaactgactttagcaagaaagaaaagtatttggtcggtctaaatgtgaagatcaggcatgatctggtgatcaccaccaatgaagcaaccacatatactgaaatagttgaaaaagcttagagagccgagggtgctgtgaaattccttcagaagccctgagtgactccaaaggttggtggaacccccacttttcatactcctatgtgtggtagggatggtggtgactccaccattgatctaaaaaggaaggttacctcgacatctggtggttcagggcaaagtaaatggtttcgtggaaaccaaggtagaggtagacgccagggttactcttaccctgagtgcccacgttgcaagaaacatcacccgggagagtgcaaccggaagacatgctttttgggtggcattgttgggttttatgccc

SEQ ID NO: 135173 - DNA, 1222 bp, Cannabis sativa
  modified_base (522)..(539): a, c, t, g, unknown or other
atgaaatttctatatgtgacataataaaatgccttctgaatgccttctgaattcaaataaatcatcataaataattaattcaatattaaaaattaacttacctaataaagccctaattatctgttaattttcaaatcaaagctaagcggtctttacattatgcaacatcactttctatatgcattactcacctaaggatatcgatattgaattctttactgcctattaagtgcatctgaataaacagaagacaaatctctaattctatcaaaaatggaatagagataacacaattaagaactttcttcagtttcagtaactttctagtgctttcgaaagcaacaaagttgtttagcttcactgatggagcttaaattattatagatgtgtttttacatccttgtagaataattcctccacccccagagtaaccaccatatcgaataggatatgagttggtgtagatataaggattctaatatacacctttatcatcttacatataggtcactttcagagatnnnnnnnnnnnnnnnnnntaatgttccttgtttgattacatcctagatggctccaactcaacactaggagtctggttaagtttgtacacaaaagtacatttaacctcttactattggttctcagggacatcgtgttgtgacatattgtcttagtctgaaactataagttccttctagactaagtcatcagcatagcattctagtattaacatgaatgtaaaatacttgcttaagattaagtaatcattagagataccataaaaatttcatgagaactaggggttttgcccaagtcattcgaatagactttgcaaaattctcctatcttatcctcaaaattcttataagtttctatccatatgaatggttagatttactttctcaattgtatttaaaattcctatcatgatcataacatagtaatctatcacaggtatcatccaaataaagatgggtaagaattttaaagttcacccactcagataaggtactgtgatactatgtccaagaatttcattggtatctgttttctattactacagtgacatattaattggaacaattaaaggataaagaataatttctaataatttgctcatttgttcattatattatatccatgttgtaacgccctaacatttaggcatgcgacctgtaacaccctaactagcataggggtagtacgtgatttttaaacaagc

SEQ ID NO: 135174 - DNA, 517 bp, Cannabis sativa
agtataaaagaaataaaaatgggtttggacagtaaaaatgtaaaatttgccgtgtcccagtatttttgaaaacatttggtagaaaaacaatatttttgtaagtttttccttatatattggtgttgtatctcaaatgcatttttattccatgaatcatgacttctcatactagagaagtaatttgagtagcccatgcttccttattaagtttcaatacttaatttacttacataaagtactcaaattaacaatctctctcttcatttaacttcttcacctaacttcaacattacaaaaaaaaaaaagggggaatttacacccactaacgaaaataattttttttttttttttatacaaatgaccggtaacatttaattattgtaaaataacaatcattttataataatctattaatcctcaagaataccgagagatcattcacttctttttttttctttcttttttgaacgtccatttatgcacacattctctctcttcctctttttttttttttttt

SEQ ID NO: 135175 - DNA, 620 bp, Cannabis sativa
tgagcttcaagcagtaaggggaattctgacatgaaggtatccaaggagagaatttgtggaccatgtcagcttgggaaacagcataaggcatcacatcctcctatcaacagacttctaacctcacgtgtgttgaaattaatgcatgtggacttgatggggccaatgaatgaaaagttccagtggaaaaagatatgtaatggtcttggtggatgactattctcggttacctgggttgagttccttagagagaaatttgagacctttggattcttttcggccttaatactgagactacaaactgagaaagactccaaagttggaaaaatatttaggctaaggagtgatcatgggaaagaattcgagaattccatattctctgagttctgcaatggaatgggaatacgtcataaattttcagctctaaaaactcctcaacagaatggagtgatcatggctcgtgtcatgatgcaagccaaggacatttcaaaacatttctgggcagaagctgtaaatactgcctgctatgtgtgcaatagagttcatctccacacgggtacatctcagactgcctatgagctatggaaagggagaccaccaaatgttagccacatgcacatttt

SEQ ID NO: 135176 - DNA, 1045 bp, Cannabis sativa
tctagatcgtggtaaaataatttccaacactggcaactcacactggaaacacccttgccctctacactcacccagaggatgccttttacaattggggcattcggggtaagtgtatcgggtttcagaactaccctgacggttgcctcatccctagttccctcggaatctcttattctgacttgggccaccgggtgcagttagtgcctttcgtttcagatcagtgattgagccactaccacccctaccataaccagaggtaggaggagtaggagccccactaacaacctgagtacctcaagactccttagtgcactccattgcgccctcagctcacagtgtttttcccaccatgtcagcatagatggtgttgtcaccagtggtaatcataagatcatgtctcatctttgaattcaatccatccaggtatttttctttcttattgaaattggttggcacaattccagaggccaatcttgccaatcgatcaaacccagctgtgtattcagtaacactcatattctccttttgggtcaactgggtaaattcttttctttttgcacttctgaccgcttcattgtagtactttgcgttgaacaactcctagaacttttcccaagtcataacaattacatcataagtcaaggacaccatgtcccaccaagctagagcatcttcttgaaactagaatgtggcacaagccactctgtcattgccggtgacacccatgaattcaggattctagtaatttagccactgctcgactctcatcacatcgggatccaaaaagactggaggtgcctacttatggaaccttccatatagtggttccattcggttcactgcacagcaggggcatgagctacctgcatttctggagtaggcactgcaggagcaccctgctaccgctgctgcctcaagcatctgatttcttcctctttctcattaatttttgcttgcattgccgcaaacctatttgccccattcttgggcagcctgcggcgggttaacatcaccccaacctcgtgccctgcctctagggcctctg

SEQ ID NO: 135177 - DNA, 1477 bp, Cannabis sativa
aaggtggccaatcccctggtacgtattttgcaagcttttcacttttattttcatatctctgtgccgcccattggtaatgctgggggaataattttagcatggaaggatggtttttgttttgaatgtatcgcttgctctcgtaatcatatttcgggcattgtctattcggaccccccaaccaacccttggcttctctcgtgtgtgtatggtcctccttacaaccatgcaaagaagcatttttggagtgagatcatggtgttaggggatagatttggaggtccttggttgatatttggtgataccaactttgtccttaatccctctgagagggaggggtcagtgggtagagacccttttatccctttcatatctaacctggttgagtctcgtggcctaatcaatatgcatatcaaaggggacatgatgacttgggataaccaccggtcgggtgagggccatgtgaagtcagctttggataaaggacttatgaatgaagcttggcttcaccttttccccaaagctcttctctgctcgatccagacgagtacttctgatcatagaccgttatgtcttgatacggttgggactgtggctaagtttaagaagtgcttcaaatttgaggagagttggacgagggatgtaagaagtaatcttgttgtggctaacgcttgggattctgtgcgccatctctgggctcccgcccgagtttttaaaaagataggagctacaagaatggcactccttcagtggaggagaacacaatttgggaaaatggacgaggttatcaaagacttggaggtgaaacttgatagaattcagatgctgccggctggttctagagattggagtttggagtgtgacatcagacggaacctaaatgaagcaagaaccaggaaagctgtttactggaaacaaagggcaagaattgaatggcttaaggatggagacaaatgctccaaattcttctttctctcggctgctatgagaggaagaagaaatgccatagattgcattttgaacaaacataatgtttggttaaatgaccgggaatcaataggtcaggagttcttggattttttcaggggtatcttctctggacccaacaatgctaggcctctaaattgtggctacctatttagggaaaggatttctcatgaggaccaggttgggatggtcgggggcccatcccgagaagaaataagaagtactctttttgccatgagcaatcataaagccccagggcctgatgggatgtctgttttgtttttcaaacactactgggagtctgtagggaatgattttgtgatgctgtcgctgatttctttgcctcgggtagaatgcacaagggagtgaattccacgaatgttgtgctgattcctaaggtgcaaaacccgacgagaccgaatcaatttaggcccatttctctttgcaatgtgctgtataaggtcatctctaaaatcattgcaaatagaatcaa

SEQ ID NO: 135178 - DNA, 590 bp, Cannabis sativa
  modified_base (196)..(199): a, c, t, g, unknown or other
  modified_base (291)..(292): a, c, t, g, unknown or other
gttcgatcctagaagactcgacattggcctcaactatcggcatagtgagccttgtagaaaacccattaagaacaaacttaatagtttccgatctttcaaagtaaaattaaaaactttgaactcaactaaaatatttgattgtagaatatttaatatcagttcaaatattagtggatttgttttattattattttannnnatataaataatattttattattatattaaataaaaattaaaagttacccataaatttctcaaaaaccaagaatttcagttatataggcacannttatatagaatagatatatgttatttattaagtcttgcttcacgcagtgttagctaattttgagtgatataatttaaaatattattttttgatatgtattataaataaagtaataatattgaaattaaaaatataatttgttaattttaaaatgtagagaaagatgacaattttgtgacaaatattaaaaattattgaattaacaaaaaaaattgcatgtatttttatgagaagataaatgaaaaagataaaaaaaaattaataaattgtgtttgtaattgatgatatatttattttt

SEQ ID NO: 135179 - DNA, 772 bp, Cannabis sativa
  modified_base (630)..(638): a, c, t, g, unknown or other
ttgatgattgtatgaaaatcgcaatgtatgttgtaaaatattttttatttagttctagaaatatgtatactggaaattagacaaaaacttaatgaatttaggcttttacaaaacccaatttggattttgtatgaattagttatgattttttgaatttggatcaaaatatctaaaatcgggtgcacacgtgtgcgtgcgcggaccctaggcgtcactcggtcaacacgcctcttcagacacgagctgacccagttttctcagacactgccctgtctgaagggctgctcacgccgagcatcctcggcatcagaggctgcatacagccttgtttctcggtcaagattccccttccgcgcgcgtaggggtttgcattgcatacccctatgcaccaattttgttttcatcatatttttttattcaaaaatcgtttttcattgaaataaaattcaaattttggtaaaattttgtgtagaatctaaatttttaattaaaaatctaattattagaataaaattaatttttattaataattaattaaaattagttttagatgttagtaggctttgaattttaaaaatttgatttttcacaaaaatagcgttatgattaattttgaaattttagattatnnnnnnnnntttaattataagattagatattatatatttttattattaaaattggaatgatcttattttgatattaaaatattttttaaaaaaataatctagtttaaatttaaaaatttgctaaccatatcatctttttcaaa

SEQ ID NO: 135180 - DNA, 896 bp, Cannabis sativa
ccaaacccttatctaatcttcttgctaatggagtgccttttgagttttgcaaggactgccttgaagcctttcaaactcttaaggagaagttaatttcaccaccatttgtcactacaccagattgggaattaccttttgaaatcatgtgtgatgccagtgacttcgctattggtgcagtattgggacaaagagttgacaaggtatttcgaactatcactatgcaagcagaaccttgaatgaagcccaactgaattatgctactacacagaaggaaatgctatccatgtgtttacatgtgacaaattccaaccttacttgattggaaataaagtgatagtgtacacggaccattcaacaatcaagtatttgatgactaaaaatgatgcaaaaccaagactgatttgatgggttcttcttctacaagaatttgatttagaaatcaaagatgagaagggcacagagaatttggtagcagatcatctgtcaaggttggagcttaaagagagctaaaatacaaaagaggtccaaattaatgaagactttcctgatgaacagctgtttcttttagactcaaaagtaccttggattgcgaattatgtgaacttcttggctgccaatattatacctccagatttgacgagacaacaataaaagaaattttactcggaagtcaaacattactactgggaagagcctatcttctataagcattgtgctgatcagattttcagaagatgtgtgccagaagagaagatgttctctatcttaactcattgccatagcttacaatgtggaggacattttagtggaaacctaactgctgcaatggtactccaaagaggatttttatggccttctctatttaaagatgctcatcaatttttcaaggcatgtga

SEQ ID NO: 135181 - DNA, 948 bp, Cannabis sativa
  modified_base (918)..(922): a, c, t, g, unknown or other
aagaacatatattacatatttagaatacacagattttgggatttggacatcttgccatatctctgtgatatgatcccagactgatagggattgcttttatgcttcacgatgcaagccttagaattgctaagtgctgatgcgctgctcggattgtctactgctcggcttggaaaatattatccgtgcaggtgtatgttgagctctgttcgagacatctctttagccagatgtaaagaattaggtccacgtgtcaccagcatgtactgctacgtcatagtgcaaaaaatgggataacaaaaccactaaagcaaaaaatggactcaaagaaggtcctggaggcctattacaacatgagtgtcctccatgccttcactctccccaagaggcgcctcaccaatagaaggagggaagttaggatgctcagggttataacctttaactcttgaagtttctccagtaactggctgaccaccatttaaagtaaagtcagtttcttccaaagattctgcatcaaaatgcttttcacactgccaggtgaagtctggcacagatgtgtcatgaaattcactctagttgaacgactgggatctaccattggtgacccatgttgtataaatggcattaaaacataagtcattgtagtaggtgacatcatgcagagcctgatctttgaaagcagtcactttcttctccaagaccttgacctggtccctcaggtcatcacccacaacaacctgcttattcaaaggatcacgagaagaatcttcaagatcagaagctttcttccaagtagccaccaaaattttattcaaagtactttcttaagtttttggcaccattagccacttctcaaagcttagtcatctcactcttgagagaagcaactttttgttgcaaatattttaccaggatctagannnnntaccatgtatgtttcattaacatcct

SEQ ID NO: 135182 - DNA, 923 bp, Cannabis sativa
taattaacaaataaaccctcaatcttctctttcttctcaaataagcccttgcttagtgaaaatttataaacaagacatattcttattttgaatcctaattggttaattaaaaataattaattgagtctacaagacaatattatcctagacaatgtaaggactatgggcctacataactatgctcccaataagtagatccaaaatttaccaagtaaatttcctaacttattaattctttttgagtcaactatagattcaaaattaaacttttaattacatagaacattctatatgttccaaatatagatatattatgaattatccattgtttcaatccaaataatcaaagatcctttatagatgatttacatcgagtagcgacaaatttactgttctaccccttaatgtgttttatcctttgttgacctcacttttagccaacgacagtgagtctaaattgtaagcgaaaagtagtataatatatatatatatgtgatgtaatgaaataaataaagacaagagtttttatagaggttcggtcccgagcagttcgatagtagcctactccccttagttttaattaacttaagaacaaagaatacaatgattcctcttcttagacctgttacaataatatctctgaatatgaattcttagataaatcttctaaccccttgcccagtgatattagatcactatttataggtaagtttggaggaaagagtttcccttatgatcacaatagatataattggcaagattgcatattaaatacaaaatacactgatcaagggatttggacaacttgccatatccctatgatatgatcccagaattttaaggatttcttcaatgattgtaacgccccaatattctgccttattttacaaagtgctaattttgatgcattaattaaaaagatt

SEQ ID NO: 135183 - DNA, 1672 bp, Cannabis sativa
atttttggttgctcttttttgttctgataccatgtttgaatttgggataaggtgaacatggttctatctcaaaaccaattggcaatggcagaagtagctcattcctcttatatattctattatctttccacacattagcaatgtgggactctctaacataatctattgtaaaaaatttctaatttaatttaggataaatacttatttactactttatatttttaataatattcactgatttccttataatataaaatcatgaatacttatcaccataatataaattcaaatttgatgaatatcactaaactagttaaattgtatgtgttttaaattgaaatttaactagttaattatatttgtgtaaactcttttgtcaaaaatttatttttgcgcattcttaagttagataatgtgtttttttagttaaagtttattcatcccattttaaatttatataaatatatatagttatataattcagaagtttaattatagggtggagatgtaaaatgacccacaattttaaaaattaagatagtaaatatctctttttataaatatttagcaaaatagccatttggataaaaatttgatgatgaaattacaatcataaccttgtataattaaccctatatttctaccctcttttcattctctcgtgtccagaccatctcgcctcctactttgtaaatgtttgtttgtttgtttttttttttgaatcaaataaggtatgaattatcaggttgagtaaaacattaatggttacattgtgttttttttctttatctttaagttgcactgaagggatcttaatttccaaggaatttttacattacagtacatttatattccactatattactttaatagtgtagtatattgtttttatgtggcgtggtgcatgaagaacgaaagataaatatattcgagtatattactttaatagtatagtatattatttttatgttaggtggtatatgaagaatgaaagataaaatatattacagtatatttatattcgagtatattactttaatagtttggtatattattttaatgtggactggtatatgaagaacgaaagacaaagtatcttatagtatattcatattcgagtttattactttaataatgtggtatattattcttatgttggttggtatatgaagaacgaaaggaaaaaaaatgtggaatagtagtttaagtttgaggtatggttatattcattggggcatattctttttattttctatggtttatgaaaaaggaaaggaaaaaaaaattatggaatattaaactaaatttttggtacttttattaatattaaactaatattttggtatttgtatttctcactatgatactatattaatttttaaatgtcattatgtcaaaaaaaaaaaatgtgatatatctactttgaattgtggtatataagagtagtatatatttttatatgaataaaaaataaaaataaaaaaatagtatatgtcttttatgaatattgagggaaataataataaaaaaatattaattaattggtatattaatttaagagattggtatatccattttacgtgatttagtatagcatgaagaaaataaaaaattaagtgcatcactaatattagttttgtggtatatttatatttctgtaaggtatatcact

SEQ ID NO: 135184 - DNA, 1493 bp, Cannabis sativa
  modified_base (998)..(1006): a, c, t, g, unknown or other
actcattccgctcagatctctaatacttgttcctttttgtcgcagaataatatcaagatctgagcctggatctctttctctccttcaggttggttaccaccgtctgcactctgattggatacttaacttgctatgtgtgggcatggtactccatcactatggctcgaattggtgaagaacaatgaataaggtgcgaaattactatagaaagagtctctcatccactagttgttaacaaatgaaaactaagtttggtaggttgaaaagtgttggatgagaatgagaacatcatgttccttttatagtatttcaactaaggtttgggatttaatttaatgatatggattaaaaaaaaaataataataataggcaaaaattacaatctagtgcccggccacactaatgggcttcactggttacaattttgccagtttatttcaaccacttattcttcttttaataataccatattttctaatttcaatcctataaatgtcaaaactatttatttaataattataattaattatcaaatctaattgtcatttattttatttattgaatagacaatgcaaagtctcttaattaacaaataaacctaaaaacttattttcttcacaattaagccattgcttaaggaaaattcataaataagacatattctaattgtagaattataatcgattaattaaaaactaataatctgagtctgcaagcagtattatctcaactagtgtcgagaccatgggcctatataatcaagcttcaaataagtagatttagaatttacttagtaaattctctagcttattaatttctccttgcgccactatatattcggaattgcacttttaattatatagaatgctctacatgtaccaagatgtacattatgaactatccattgttacaatctaaatagtcaaagatcctctatagattatctacatcgaatatgaatgaatttaccgttttatccttcaatgtattttatcctnnnnnnnnntagctacctataaatgatatttccgtaaactaatataattacgaaaaataaggcctcaatcaattatctctatcaagccaagctcaaaggaaattatcgtttcacttctaaatacttatagaagctaaagattctatatctatgatttgcgctcccactcaattgaactaccatgtcctatatctgtatgtgttacctgaaccaattggtagactttaacgaagaaattgaagaacataaataatacaataaagattgaacctaaccatatcaggattaatatctatagacctaatatctactagtgatattgacttagaaatggtaagtttatgatatttttttcaagttcaatatcagtcacatccaatgtatacttcatacatctgacactggtatactttgcctatgtcttggaaagagtataacacttatccaatgtttaagtatattttatcgtcgattatcatgtcagtctaaatccagt

SEQ ID NO: 135185 - DNA, 524 bp, Cannabis sativa
attttttatgatatttggtttatattattttatttttcaacttcaaatttcaactccattcccattccccgattcccattcccgaatctctactgtgtattaccaccgattcatcgctgattttttccctccgtcttcaatttttcaccatactataaatatataattagatgcatatctataaatttcacactgtaacagtgttctttccaaaacaaataaaatcacacttgttaattacaatatttttcttattcaatttggtatagagaactaagaaagataactaataattaaactaaactaaattaattaataaagtgtcatatatatatatggtcgggtattccattataaacaaaacgtgggcccagtggagccttccacctagtttcaattacgacttcacattttaaattctattgccattttttattgttattgttttttctttgttttattaagtttttactgaagcaaatgaagcattaagtttgtagataaatccttttactgttcctttt

SEQ ID NO: 135186 - DNA, 527 bp, Cannabis sativa
ataatgacttgacatttaacgattagataactacagagttccagaaatataacttaagtattattaccgctaaaaattaaacttaaatttttatttacaaccgaaaattaaatttaagtacttttgcctcaaattactcttaatacaaatatattatttgtgatcttatgttttactcttttactcattttgactattttcaaaagtatttcgaccatgtattttttaaaaaattaaaataagcataaaaaataaataaaaaagaagttatatagagttaccttaatttagcattgaagaaatcagaaattgatgtagcagcaacatcagctaatatatccacaattaaatcattgggaagccaattaatattcttcattgaattaattggaagaccattatcattcactatcaattttaggtcacttttgctatttttctgtatttgctttgttgaagctatacttatttttgatgagtcattgttttttctcttgatcggtttcattattttgagccctacatta

SEQ ID NO: 135187 - DNA, 867 bp, Cannabis sativa
tcctcgagttcaaacctcgcctgattagactcagcgagataatgcggatatgacaagtctaatcgcattcgtacgactcgcattatgtgggaccaaggaacgggtttaacccggatgtatcatgatatatacaagtatccccacgatcctcctgcgaaaacacgaagatcgattctctaagttgcgagttggtcccgatgacccaacagcctcgataaaccgatatagactcgcatgtctaggttctatcagctcgtcatatgatgtccacaaaagcgactatgcaagaacgcagatatcttagactcaactaattctcgaatacactctaagcccacgagcttatgcaagaatgtgaacaaccaactcgcactagaagtcgcgtacgttgctgtatttagtgaatataaactgttcttcatttattaatgtttacgtttttagcttaattattgtaaattaatgtataaacggatcgacaatgaatatccttgtgtaaatgataggacacttgctttgtatataaatgagtgatctaccgtgaaatgggacagatacagaatctttgcaacaatggactaagcagcccgtgatctgaccaaaccactatacttcccttgtgttttatattttgtccagcctttttcttaagtatttgtgttcccagttcgagtactcgccgttctaggttgaatactcgcacttattcatcattttttgtaaaatttattctgttgttgtaaaattccttcaacaataatatgtataactgtgtatattgaattctttattcaaataattattttttatttttacgtaattatttattgttcatatatctagaaccatatttgattaaagttaaga

SEQ ID NO: 135188 - DNA, 584 bp, Cannabis sativa
  modified_base (42)..(43): a, c, t, g, unknown or other
ggtttcataaactatactgtcccagtctagtataacgtctannattctaagtcatccctacttcctatatgttgggcttccattcatagctaggtgcaaattatattatgtgcttcaagttgcactactagtgttggtgatctattgctctgagcatgtgaaaactgttcaaccaatcctttcagttgtgcttgatgttctgttaatgcccctatcagatcgttaacctgaaatgttattgggttctccaaaacatcaaccatttgtgggtcagcagaacaacacatccttagcccccacctttattggtcgttcccctcacattgattctaattgatcttctagttgcaattgcaagtttatcaaacgaagtcttatgaactcctaatataatttattctaaaatttcaagaaaggaacacagtccttcctagtttcaatttaagacaataaagaaatataaaacttattcatcttcttcttaaaaagtgtaatcaatcataagagatagagggtactcttgatgtctctaagcaccacctcagatgaggctcaaattctaagaaacatatttaataataaaa

SEQ ID NO: 135189 - DNA, 529 bp, Cannabis sativa
  modified_base (259)..(269): a, c, t, g, unknown or other
  modified_base (469)..(474): a, c, t, g, unknown or other
  modified_base (501)..(502): a, c, t, g, unknown or other
ggggaccatgggcctatataattaagcttccaataagtagctttagaatttaccaagtaaattttttaaattattaattcctccttacgctactatagattcaaaattgcactcttaattatatagaacgttctatatgtttcacgatatagatatgctataaattatctattattattataatcctaacaatcaatgatcatctatagatgatctacatccagtagggacaaatttaccgttacacctttcaatgtannnnnnnnnnnaaatacttagctacctgtaaatgatatttcagtaaactaaaataattaccgaaaggagtactcaactatttatctctattaaggcaagctcgaagaaaattattatttcacttatatgtacaaatagaagctatagattctgtatatatgattagcgcttgcactcaattaaactactatgtccttaatctgtatgtcannnnnngatccattggtcgactttaacgaacannttgaagaacataaataatacaattgaa

SEQ ID NO: 135190 - DNA, 651 bp, Cannabis sativa
acattggggacaatgttgggttgtaagtttggggtgggggaattagctcacaaagtacattattatgcactttcaattaaccttctcttgctatctattttataagtatgctatagtaataattttcttatctaatatatatatgaaaaaaaaatcagcaatgaaaaaaaaaaagtgtgcttgcaactaagtttggggtgttctccccattttagttcaaaaaaaaaaagagaataaacataggaagataagtctattccaataccaagtacttgtgagtataatgagttagggaagtgagttaaaaaaattcataaggaagaggctcggtttttgacaagtgaagttgttaggtgttgagctagctaaaatacatcctttaccgtacactaacccaagcccaatattacaagtttagtaaagtcctattgatcaaggggataagtttagactacattagtggagaggagtgcactaatccaacttattgagctttaatgaatgaaaaaaaaagttaaaggtagttgtaagttttggtgggatataattgtataaattgttgattaggtgactttggggaggtattaatgttatctaatgagaaaactttaaaggggtagtgttgaccgagattttcggaaactaataaaa

SEQ ID NO: 135191 - DNA, 681 bp, Cannabis sativa
  modified_base (389)..(390): a, c, t, g, unknown or other
  modified_base (455)..(463): a, c, t, g, unknown or other
  modified_base (517)..(533): a, c, t, g, unknown or other
ttcttcacaatcttccacactatgattgagtattgacttgaattgtgtgggtaagacactcactcactacagggcattcaaaattataaagaagaagcgagacgaatttgaattctagagaggctctttattttctcaattatctgacaaaatactctcatgaaggatatgataatgagagtcatcttattccttatataggattttatctaggttaggatttaaattatatggaattaaaacaaataattgcttaaaatcgggcagaccatatttgtggaccccacaagttttaattttgccattttattttacaacgtatcttttctttcacaaatgtcatattttcatttcaatcatatatatgtcaaatctatttatttaataannataattaattatcaaaaaaaaattaccatttaacttatttaataattagaccttacaaagtctcnnnnnnnnnaaataaaccctaaatcctcttttcttcttaattaagcccctgcttagtgaaaannnnnnnnnnnnnnnnngtctaatttagaattctaattgattaactaaacctaattaattgagtcttcaagataatattatctcaactagtacggggaccatgggcctacataatcaagctcccaataagtagttctagaatttaccaagtaaattctttatctt

SEQ ID NO: 135192 - DNA, 640 bp, Cannabis sativa
  modified_base (123)..(130): a, c, t, g, unknown or other
atctctttaacgtacaaatctgcatactgatccactgagaaggttgttttaactggtagaaagtgagcagactttgtaaatcggtcaaccactacccaaattaaatcaaacaaacccgtggtnnnnnnnnacccaaccacaaagtccattgtgatatcttcccatttccattcaagtagggttaaaggctgcaacaaccctgccggtctctgatatttagccttgatctgctgacaggttaaggatctcgatacgaattctaccacattcttcttcattctgctccaccagaagtaaggtttaagatcttgatacatcttggtggtgccaggatacagggaatacggagtggtatgagccttttcgagaatttcatttctaagttccacactattaggaacacagactctggtcttaaacaacaacatcccactatctggtaaagtctttggcttgaccagctaaaacctcttctctgacttttactagctctggatcagttagctgagcagctttaatacgttctaacagatcagattacagcgctatgttatgaagtttgcctacaacaaactcgatgcttgatctgaccatatcttctgctaactgtgatgaaatttgaaccatgctagctacttgc

SEQ ID NO: 135193 - DNA, 865 bp, Cannabis sativa
  modified_base (270)..(274): a, c, t, g, unknown or other
cccacttcaatccaaactgacgaaaaattgagtaacaaaactgtccaggaatttgctgctaccagaccaattgatacagcaaagggtcagcaacctgacagtcagcaatcagcaccggtatgttctagtcctcaaccacccgttccatttcctcaaagatttcagaaacagcagcaagataaaaaatttaggaagtttttggatgtgttgaaacaactccataccaatattcccttgctgtatcaactgggacatacaagtggaaattannnnnccaagtctattttccaaatatgaaattatcaccatgttaataacttttagcttcttatttttagtttattgagtttaaaatattatttctcaagtttagaattaaggttaagaattttgctcttgaattaatttgttactctgttttattttttatttgaaattattggaattgctcttagtttattttgcattatttagtaaaaagtccctgtggagacgaactttgattacttatcattgtattgcttgtttgtgattgtgtacacttgcacaattataaatcaatataaattttcacaacaagttttgggcgccgttgccgggaactttaagttctaaattttgttttatcaactaattgacattctaataattttttgtgctttaaatcttgttggttgttctttgaaatctcaggtatttctagtgtatgaaccaacaagaggactttgaacttgctcctaacgaccccgagattgaacgcacttttcgaagaagaagaagggttcaaaaggctaagggccgagacatcatggctgagaatattgatgatgatgggattgctcaacaaattgttaatcccatcata

SEQ ID NO: 135194 - DNA, 666 bp, Cannabis sativa
tgaggtaattgttgatcaagctccccttttacttcttggaactttaagatttgagagtttttgcatgtttgtgaattttggggctgtggttattgtttgtgtttgcttttgatatctgaagtttagttatgttttaaaatgatgatgcaagcaagtttttatggttgttagttggatttaatctattatggagttttagactcaaaacttggtttttatggtaaaataaggaattttgttgctgtgtttgtggtggttgttttctgttgtttgcagaagcttagttatgcatatttaagtagatttaagcaggttgtgatgcatgtttattagatttaaccaagcttgacttttgaactcaaagcttggagctcacatggtggtttttgttttagtgcatgaagctttgttttaatgctttggaatcgttatttggggtatttagaacaggtctggaaggtttgatagggtttgggtttgatttgaatgagatatgaatttttgaaaattcctgtactaaactggaatttcggttccgggaagccattagcaaccggtcgaccggttggggcttcaaggaaatttccagaaccggaatttcggttgtagaaccggtctaccagttgggacatttttgggaaacctagttcttccaatttttgtgtt

SEQ ID NO: 135195 - DNA, 601 bp, Cannabis sativa
  modified_base (413)..(418): a, c, t, g, unknown or other
acatccatatatgtgaatatagattatcttactttcaagtggatataggcatattttctctttgcaaagaatgatcttgtcaaaaccactatgaacaagatgaaaattccatagatatcaagaatgtggttgtggtcttttgatgacttaggtctaaatacaataaagagttcttagaatagtccaagaaaattctggtcacagaatacaaaactcataatccatacataaacatacagttttaatccatttatagaaaatggatattaataacttgtgaaagtcatattgtattgtccaatgtattctaagaaattgaaatataaaattcaatttggaatctaaaatttaaagtcaaagacttaaatttatactaaatatacatgagtaattattctagcttggaccaccannnnnnatctaactctaagtttaagttgctataagtaggcatatacaagtaggagattttaagattgaggatttatatcatttcggaatagaacttcgtgaatatagtcatatgcaccattcaatttcatagaagaaaatagaatgacatcataagcatatgatcataaaccatctatccaatgatata

SEQ ID NO: 135196 - DNA, 592 bp, Cannabis sativa
actaacaatattaaaaataaattacttttatataatcgggatcctgagttcaaaatagttacaactgatttaaaatacttaatacaatagttgtctcctagagaatatacaaaatacaataagttgtcccaaagatcgtatgctctagatctgactgccccgacatgtacaatcttcattcgctcgatccatgggtgcttagccttatccttgccattaccaacacatgcaaacattaactatgagtcgacagactcagtaagaaaactgatcataatcataaatataactcgaattacatttaggcgcccatacacccaactataaccctatagcaacaccctaggcggtactgagtctaaaatgtttatacgacaattcgaccataataatagcctatactcagtactctagtcatactctattggtaccgatgtgatagcattgagcagtatttcagcaaaacatacatctattggtatccaatataactctacgtgtattaataccgttatagatgttatctaataggcttaataaatatgtacactaaacatgtaaacacatatggatatcattatactaatcttac

SEQ ID NO: 135197 - DNA, 834 bp, Cannabis sativa
  modified_base (552)..(555): a, c, t, g, unknown or other
  modified_base (650)..(650): a, c, t, g, unknown or other
  modified_base (739)..(749): a, c, t, g, unknown or other
ctctcgagcatcatctcttgattttgtatgaaaatattgaccccttacaatgtacacttcatgaactttactccaagaacaatacgactcaactcataggatactccatgattcgcttcgttcacctttactagaatggtattcttcaaccattgaatgaaaatttaacgatgctcgtctgcaatcaattttttttatatgtatgatgtcttggaatccattaattgtaataactccttatagtcactacaaatcataaatgtgaaattagaatgaaaaggtaatgttgatctagttattgttcatcttgactaattaatgttaaataaaggaaaaactacctataacgtatgttatatcactactacaaaaataggttttcccgacgtttttaaatagtcgtttaaagtattcccgtcagtttctataaccgtcgcctatacgaccgtcataaaacgggcataataggcaacgggtcaaaaccgtcgctaatgtgggtttctcaacggttttaaaccgtcaggaatgtaaaaaaaaatacagatttttctnnnnttaatggcagaaaaatctgtatttccccccatttttttcctccattagctttataattttatctaaattaaaataaaacaactaataaattttgntacaataacaactaactttaaaacacattaaatttatataatgacgaaataaatatacataatgcataaaaaagtatataaataaatannnnnnnnnnnaccgagctcggagagagagaaagagacgaacgggaggtggtggtggtccgacgtatgcaatgaagagtagagggagaccgacggg

SEQ ID NO: 135198 - DNA, 721 bp, Cannabis sativa
  modified_base (361)..(363): a, c, t, g, unknown or other
attgcaactgtgttttgaattaatatcggtattagaataagatttgcataactacatttctaccttaccaaactctttatctgatcatttactttctctcatcattttagttttaactcattctaatttctaccattttctatttatactaatctttagtggtaatttgcctccctgtggatatgacatagcccgtttactactgcgaccacagtgtactaattaggcgacatcactgggttataattacgaaaaatgcccctggctcaccaacagggtcttagcatgtcatatatcatattaattcacatacaataaattatataataatataatttcataataatacacatttaactannnagggtttgctaatccattttcttaatcttagggtattacaattattctctcctcatagaaatttcgtcacaaaatttacctgaataactctagatatttctgccgcatatccgtctcaagttcccaggttgcctcttccactttactgttctttcataatacttttaccagtgcaattgtcttgtttctcaagactttctcccttctatcaagtacttgcaccggttgttcctcgtatgataaatctggatgtaattccaattcttcataactcggaatatgagacgaatctaaaacatactttcaaagcattgaaacatggaacaaatctgttggaatttattttactaggatctta

SEQ ID NO: 135199 - DNA, 615 bp, Cannabis sativa
ctcgacagttgcaagtatactctgttacttacgtaattaatgagttattcattaaaagtgatttcatcgacccatattccccttatcttgacacgtgtcctccactaaaatgttagccgaatttcgggtataacataatttatagttatttttttatgaatcaaatcaattataatttttttttattattaaaaaaaaaaatactacacaattaataattatttaaaatttaaaaaaactacaaaattatctaccaacctaacaatataataagttccttcactttcattcaatcgcttgaaaaataaaatcataactaggataaaggagaacaagtttactcctattgtcattcattttttttatttaagattataaattttttatctatcttattattaatatatatatatgtatacatctttattgttgtatcattccaaatatttatgaaggagaatgagaatatataaatatatgagtactccatgacatgtaaaccataaaggtagacttatggtaaattttttttgacacttattgattattaaagttgtctttttcaattgttatgaatttcttttactatatttaaatttatttttgaaataaaaa

SEQ ID NO: 135200 - DNA, 787 bp, Cannabis sativa
  modified_base (721)..(761): a, c, t, g, unknown or other
agggcacaaaacccaacagtaaatacttacctctaattgaattctccaacaacaacagctaccaaagtacaatagggatttttccctatgaaatgctatacgattggaagtgtcgatccctaattcattgggataaaatcagggaaaggaagtatttaagtcctgaaatagttcaaaggaccaatgaagcaatagacaaaaataaggctcagacgcttgctttgcaaagcaggcagaaaagttattttgatcctaagcgcaaagatattgcattttaggcaagagaacgtattttcctacgagtttcatcattgaaaggtataaggcactttggaaagaggggcaagttaagccctaggtttatagggaaattcaagatactcaagaaggtcaggcaagtagcgtatcggctagccttaccaccaccgttgtcggctatttataacagattccatatttctatgttgaggaaatatgtatcagacccgactcatgtcttgagttacgaagccttagaactacaattagatttatactatgaggaataaccagttcaaatcctcgataggaaggaaaaggttcttcggaacaagaccatagcattggtcaaagtactctggagaaatagcaaggtggagtaagccacctgggaactagagtccaacatgaagactcaatattcagagttgttcaagttaaatttgttgggttttgtgccctnnnnnnnnnnnnnnnnnnnnnnnnnnnnnnnnnnnnnnnnnaaagatcaaaaataacattttatgtt

SEQ ID NO: 135201 - DNA, 967 bp, Cannabis sativa
tagggcacaaaacccaacactctcttcctcactccctctcacacgcccatacaagcattctcaacacttgaaatttaccatcttgattcctattttgtatccttaaggaagctatatcggatcccacctatagtgatctgaatagtatttttcctcagtatcaatacaactaaaaggggagtaggtcattacccgctaacgaagggggtcgaacctttataaaattctgtgtgttctttgctttctattctaattgtgtaacacatggcaaacatcaaatttatacgaccttgatgtcagttaatcactttttgaagtcaacacaaaattcaaaaagatggacgaattttagtagaaattgagagggctttgtatacacatactttgtatctcgaaaagatttcataatataaattttcatcaacatcaacatgtaattattcaaatttcttaaagaaaattacaagagaaatattgtaatacatcaagaaaaaaataataataataacataaaactctaaaaaattataaagcaaaagagaaattattgtgctataaaaagtaaaataatataataataataagataaaatttgagaatatattagcatatgctaagttctaataaattatgtaatatttttttatttattatatattctatttttattattatataaagtttgactgcattttattagaaaaaataaaagagaattgttaaaaagtatgtttagtattttttttggtgtcatatgattattggtgtaattaagtatcgggtcatcgataactaatcgtgagtcactaacaatagaaaatgttagacactaataataattaatagcaaagttgaaaacaaacttatttgaccgcattttttaagttcattcattttttttattattattatttttacattttagaacacttttttttttggcttttttacagaattccacataaaa

SEQ ID NO: 135202 - DNA, 582 bp, Cannabis sativa
  modified_base (94)..(137): a, c, t, g, unknown or other
ttaatggatcaacgaaatctttttttatcactctcagcaccatttcttattactattattattattattactattgttgttgttgttgttgttnnnnnnnnnnnnnnnnnnnnnnnnnnnnnnnnnnnnnnnnnnnntgttgttgttgttgttgttgtatagttcctcaaaataaaaagatctctaaaagttgttctagttatgaaaagttagatgtctttcggaagggcatcccaaaagtctaacttgaccatccagaagggcgttcctaaatctctatcatgtccaccaaaaaggagtcttcaagaaagctagtcttcctccaaaaaggagttttggatggctagctattcctcctccatgagagttctggatagtcaactctagttattgcctttcctatccgagaagtggaccttaaatactaccaacacttatcatttcagaaagaatgaggtcagacgagttttcagaggtaattttgagagagaaagatttagaggtagagtgagaggtacagagaaaatagagagatttggtttaagtattgtatgaagaatcttcggtagatgaagaagattc

SEQ ID NO: 135203 - DNA, 623 bp, Cannabis sativa
tttttttttgaaattagcgtaagtcttcattaagcaaccaaaagttagacctcacggtcattacaaagaaggttctccggtaaagtggagaccggaatacatccatacatctggtgggtaaacgcccacttagccacattatgggctgcaaagttacattgtctactaacaaagaaaaaattacaactagtaaaagaggaagtggatctcaaacaaaaggagacgtagttctcaagggcccaatgagactccttcccattgaggacattgattactagtctcgagtcactttcaataataatatactttaagcctaaatcaattgccagagaaatggctgaacaacaggccgcagcttctccacataaagcatccgaaaagtccaactgagttgtatggatccgaatcacctcacccaggtggtttctagcaactacagctgtgcacatgctcgccagtccctctcgaacgtcacaattaagtttgatccaatcctcggggggtggattccaattttctggcaaggtcggagttggtgacggcactagagaagcatgtaaatctgcaaaagaagtgtaaataaggtcaatacattttggaacatccggggaaaggttattgtg

SEQ ID NO: 135204 - DNA, 706 bp, Cannabis sativa
  modified_base (657)..(657): a, c, t, g, unknown or other
gctcaacaaacatgaatcccaacccaatcatgcaatttctcactcaattcattaaaatcacaacaaaatccaagaacatgcaacttcacaaactcaacaatttaaaacatgcttttcttacaatattttcagcaagaaattcaactaaaattcagtaaggaaactagctcacttccaattcaaagctagactccaccagtctccaaatattaagctccaaaccaagcaaaattacaccaattttacaaaaaatcaaagtttagaagcaaagggagaagcaaactagaaactgacttccttttttccaaaaattcacttaatcaaatgtaaatcaataatggtcaaaagaccaaaatgcccctagggcccaaagcacacatattcaccctcacaaggttatttttgtcatttcatgcataaataaatcccaattaatttcagattatcacttatcaaataaaatgccaattaaatcaatctaattcgcattttgggcctatacccggttgtgactatatcgtgccaacttgtcagaacacacctgaaaagaaaacacaggcatactatataataatataatttcattaagtatgtaaataaattaatttcatcattttacccttctcgggtcacaattactaaaatgcccctagctcnccaacggggtcttaacatgttaaagttcatattaattcacatatactga

SEQ ID NO: 135205 - DNA, 750 bp, Cannabis sativa
aggatgttaatgaaacatacatggtagtaaatctacatcatggtaaaatatttccaacaaataaactactaagtaataaaagcttactgaaccgtggaacgagctgactgctgatgatgattgtacatgccgtgacgatcttcaaaagacaacctggcggctctgataccaaattgtagcaccctaactattataggagtgtaagcgtgatttttaacgtactgtgcacctcgttgctaatcaacgagattattaaaaatcgtgaataattaaaagtttgcttaatttttttaaaacataatatattacatttataaaattctgggatcccgtttacaaaatatagttacaaaaatttactattcatatacaaaatatttgtcgcctagcgactaaacagcaaaagccctgatgtctaaaggatcgtacgttccaggcctaaccgcccagacatgtacaatcttcacctgctcgctctcacggctcctcaaatttagcttttcctttacctacacatagcaatagcaatgtgagtcgacagactcagtaagaaaatcataacatataatatacaaataacttgggttataacctggcgcccatacacccgatcataaccctaatccccgcgtcccacatggtactgagtctaggacgtccatacgacaatactatcgaccataatgtcagcctatactcaatatactagtcatactctagccatattgatgtgacaacatcgatcagtat

SEQ ID NO: 135206 - DNA, 622 bp, Cannabis sativa
ggggggggggggggggtatgcattcgtcttaattttgtgattttttaactttcagaaatcggttttcaatgaaacaaaattcaaattttggtaaaattttgtatagaatctaaattttcaaataatatctaataataaaaaaaaattaattttaataaatttaaattagttttagatattagtagcctttgaatttgaaaaatttatttttccacaaacttgcctttatggttatttatgaaatttaattatttttttaattttttattaattttaattataagattagatatttacttattttattaataaaatttgaaatgatcttgacactaaaatattaataagacttaaagataatctagtgaaaattttaaattgctaaccatatcagattttcaaaaattattatttttaaaatagtttattaatttaaattataagattagaaaaatattagttttgacattttatcttattagatattaattaaaatttatatttttgtcaaaataacataatttttttgaaaagttgttaatttttgtttgaatagaaattttagggttttctaaccataaaattttcaaatttagagtattttattttatttaattttttt

SEQ ID NO: 135207 - DNA, 644 bp, Cannabis sativa
cgaacacgcaccgagacctgcactcggacttggaccctaactcggacacgatcgtgtacccagaactgcaccgagacttggacccagacctagacctaggaaccaatcacagacccagacgcggacctagataagtatatgaataggaacctagactcaaacctagacccggacctagactgggatcaaaaatcgggacctagatctagaccgagaccgtgacccagacccagacccagacctggacctgtacctgggacccgaactcggacctggaccagaagccagacccaaactgggatatggacgtaaatctagactcagaccaagactcagaccaggactcagaccccgacctagactcagacccatactcgaacccaaacactaaatcaaaatcgaaactaggactaggacccaaacccgaacatggacccagaccgagacctaggactcggaccttgaccttggccttggaaccccgacctagatcggaactcaggattccgacccatacttggagctagactcaaaccgagacctggacccaaccaagatcggaactctgacccaaactcgaacaaggacttgaaccccgatcgggtccgggactcagaccgagacctaggactcgaacctagatt

SEQ ID NO: 135208 - DNA, 513 bp, Cannabis sativa
ttcacagatgcagattatgcggggaacatggacactagaagatctacttcggcctactttttcttaatagggggaaattgtactagttggaaagtacaattacaaccagtattggcgttgtccactactgaatcttaatatatcgctactaatgaagctattaaagaggccctatggttaaaaggacttatggaggagctgaagttaatgaaaaaggagcctataatctactccgatagttaaagcatcatctatttgtgcaaaaacccaatttttcatgacaggacaaaacacattgagataaaatatcactttatcagggatagagtttcataaggacaaattgggatagacaaagtgcctactgaagtgaattcagcagacatgggcacaaagtttgtgtccctcaataaggttaagctttgcttaagcttattggggattgacacaggttggtaaaacccttaatgggttcaagctaagaccctcagttactcacaaacaacaacaaga

SEQ ID NO: 135209 - DNA, 683 bp, Cannabis sativa
gccaaaatggttgagattcgtgacggtcaaccaacgctagctgatgccccccgccagtacaatgttgaccccaccaaatctcctgcagatacacatattatgacacgggtattgggtgagaggtcacgccacttgagaggagtcggcccgttgccaagacttaaggcggggcaaaaagagcaactcccaggccggatgcatccaggcagaccagtgtcactcaagaggaatatgaggcaccgaagcgaagggtggaagaacaagaggcacggaacgagtggcaacaacagatgatgatgactcaaaattagatcatgagtgcgttccaacaacaaatgatccaattggtcggcgctgttccaggatttaacatgccgaatctgcctccgattccactgattccaccatttcagccttttggccatgcagctggttcctcctcacaggctacccctcccgctgatgacgaagatgatgctgtcgatttgtagttttttttgactttacagtgtagatattactgtttatgaattcagaatacttttacttagtttatgacgtttaatatatatagatatgtaataacattataaatgtcagttttataatatatttgatattatatttagtattatttcgatttttaatttaaatttaatttcaaaaatcaacttaatgatctt

SEQ ID NO: 135210 - DNA, 710 bp, Cannabis sativa
ttagttttatgcaaattaaattggatttcgagttgaattttagcttcgtagtagtttttctacacctttatatgaattcgaagcagcccatgttttgattaatcttggtcgtcttctcaggtgaagtcaccagaattaatagtggttctctttctcattgaatttttgtttcggttgcgttttcctgcgtagttgcacgatggttgaacgatagttgcccaggaagaatggatcctgagttgaaggtgtgtgtaagtggtatttgtattttttttttatttgggctgtatatttgtttatttggccaacttaaagtatttttgtaatattgttatttttttttgttaaaactgaaaaaaaccctaaaaaaatttaaaaacaattacatgaaattttctttaaaaaaaaaattatacatgatttgtaaaaaaaatatgaaaataaaatcaaaataaatattgaaatgaacaataaataatatgagaaaaaaaatattatgagtaatttttaaatatttaagttaatttttttaataattaggtgcgcttattattttatgttgtgcaaatagaactttccaaaaaatagaaatttttatttatatcccaaaaacttctaaagataccctattttagtaattttttattttatataaattttatatctttaattgtactaagtttttctaacttttttcttccaattcatat

SEQ ID NO: 135211 - DNA, 1231 bp, Cannabis sativa
cgcgaccagcccatgggctggtcgcgaccagcataaattcaaaaatatagggttctctagaaacttaggtggtcgcgaccaagaaaaagggtcgcgactagcccacttccttgtcgcgaccactagaacatggaattttctcttgtttctgtaaagtcccaggtcgcaaccagggtcgcgactaccaaaaagggtcgcgacccaggaacacagtggtcccagtcccaaaaaaattatttatttttttttattatttttttcacgttgttcacggttcaactgaaaaaatataatgtctggtacttcaccaaaaattgaaaatactgaaaacactaaaaacataaactaaaaacataacaaaaaaggctggaaaattaaagaaaacacttgggttgcctcccaagagcactgtctttatcgtcatctaaccggacgctgagttgttcgtttagagaggcgccagaataatggcggacttggcttggtcaatttgacctcccaagtagagctttaaacactgtccattaaccttgaaggttgctggaccttctccttttaattcaacagctccatagggaaacgccttgaccacggtgaacggacccgaccatcttgactttaacttaccaggaaacaatttcaaccttgaattgaaaagtaacacttgttccccaggttgaaactcctttctgactaagccttggtcatgccacttcttggtttgttccttgtaaatctttgcattctcataagcttcatttctgaactcctctaactcattcaattgcagcaatcttttctcccctggagcttttaagtccatgttaagagtcttcatagcccaaaaagccttatgttctagttccaccggcagatggcaagattttcgaaacaccaaccgatatggtgacgtcccaatcagtgttttaaatgttgttctgtatgcccatagtgcatcatctaactttcgtgaccagtcctttctcgatctatgcactgttttctccaaaatcatctttatctcacggttagaaatttcagcttggccattactttgtggatggtacggtagagcagttctatggcggacaccatatctcgagagaagtgcttcaaattgtttgtcatagaagtgactcccttcatcgcttatgatttctcggggagtaccaaaccgagtgaatatgttcttttgaaggaagaggagaactgttttaccgtcattggctgg

SEQ ID NO: 135212 - DNA, 1131 bp, Cannabis sativa
gacattgaccgcataccacttgtgcttttgcttcaagtccatttttgtatcgttgtttctttggtcttccggcagctctcttatgtttaggtgggaggactacaatatttcttattaaatctggtatattccatgatgttgcctcacctaatgggagtatactgtcttcatatgttgccataaaagcttctttcgtgtagtagtatgagcaatatttgtagcaagacaggttccttttgcttagtacagccattgcatgagagcaaggcatttcatcatattcaaatcgttggcagctgcatgttttattctccaagtttactatgtgagatctgttgttgtcgtgtacttggtataccagaaggtttgctgtttcaacctgtattaatcaagtaaacgattattaagtttacaacagagtaaatatgtttgaagcaatttttatttttctgtatacataattaccttgtactttaaactcatatctctttgtttctttaatgttttttcaggtatttttgccagtgttgttgtagttttttgggctctattcttgttttcccaataccatctttgcaccaatgaatgtaggcattctagtagagttgcgatgggtaggtctcttactgctttcaaggctgcattgactgattcggcaatatttgatgtcattgttttgtatctcctgttcatgccatatagtcttgtccacttttcgacaccaatttcattcaccaagtaatctcttattcttacatctatattgtccaagtcttgcatgctcttttcaaaatcttctatgttgtaagctttagatgcactattaaatgcaatcttgagctcatcacctccttttttgaatttcatttttatattcttcatcaaatggtaacaacataccccatgcattatatctggaaaggtctcttttactgcttttagtatactctcatgtctatctgatacgatgcattgaccttctctttcgccataagtttcctttattttgtgaagaaaccattcccaagagctgtcattttcggaatctactactgcaaatgcaagtgggaatatatgtctatttgcattttgtgcacttgctatcaacaaagtgcctccatgttggtttgt

SEQ ID NO: 135213 - DNA, 666 bp, Cannabis sativa
ctccttaggtttgaatttgaaaaacccctcgtaacgattcttttcgactctaaacgatggaatcgtccatttcgatatataaaaaacgctagatttgaaaattctgtaagaaaagaaatgtcacaatatttttttcatacatgtcaaagtgatggcaaagaaagaatatcttttacgtatccacctagtttgtcaaccttgttagaaatgatacaaagaaaagtgtctctgttcactacagagaaaccctcttccaacgaattatataatcattggagctataataatgaagaaaaaagaaaaaacctaagcaacaaatttataaaaagagtcaaggctctagacaaaactttaaatagtaaatcccttattctggatggactcgaaaaaagaactagattgtataatgaaaatacaaaaaaaacatatttaccgaaaatatatgatccttttttaaatggagcctaccgtggacaaattaaaaaattgttttcactttcaatccaaaatgaaatttccaaaaaaaaggacatagaaagaagttggataaataaaattcatagtctctttcttattataaattatttagaatttgaacaaaaaaaaaataaattagaaaattttgataaaaaattatttaaaaaagaaactctttttttcttgaac

SEQ ID NO: 135214 - DNA, 686 bp, Cannabis sativa
  modified_base (418)..(419): a, c, t, g, unknown or other
gaagagtaggtttgattggtgtgtgagagagagtttctcacagtttctcggtggattttctgtggagccaaacaggagaggagaggagagtagttggggcttgaaggttgttgtgattcgaaaaccaataagctaactaataacccactcttatatatttatttattttatattttaaatagttatatataattatttattaatataaataaattaaaaaatctacagatatttggaattacctatttataaatatatattttttaaaaaattttatttaaatttacagttttagttgctccagtagttacgctacagtagtatccatgcgagttgcgaattttggttgtcatttaagtttctatattggttgctttgtgggtttctgtgtgtatttttgtaaaaatgtaaaaaaaannaaaaaaaaaactttttttttggtgaagaatgttttaaagggtatcatcaatctcttattacaacctcttagttcaagctcttgactgtgccctccttgcgaggtggcccctgccatgtgaaacaaactttagaatcgtaaaattctggagcgtcacaaagtcttgtggtagtgtatttgttagagattttattacaatggaagaaaatcaagatattacaactctattgtaatacaatacaaggaccaacaaagagattaaataaat

SEQ ID NO: 135215 - DNA, 779 bp, Cannabis sativa
  modified_base (640)..(648): a, c, t, g, unknown or other
tcctcgtaaaatatttccaacaacgagaaagctacgatttatgaatcatgtttgtgtgcctatggatgacaatattaaaagagagatcttggatgagtctcatatgactccttactcagctcatacaggatcaacaaagatgtatcaagatctcaaggccatgttctggtggccaggtatgaagaatgatattgctgattatgttgtgaggtgtttaacttgttagcaagtgaaagttgaacaccagaggcctgcagggttgttgcagccactgaatcttctggaatggaaataggaagacattgccatggactctgtggttggatttcctaggacaacgggatagtaagactttgtgtgggtcatagtggataggtttataaagtcagcgcacttcttacctattcggacgaacttctccattgatcagtatgttgagttatatgttagagaaattgttcgtctccatggtgtcccaacgtccattgtttctgataggatccgaagttcacatcaagattttgggatagtctacatcgacccatgggtactcaattgaaattcagcacagctttttgttgggattttatgccctaaataaaaactattacaatacaatctgatttgttatcaatagaannnnnnnnntcatttatgtttacatgtacttttcatgtttatggtttaatgtatacgatttctgttgagtctggaacatacggttattcacaattatagtgatgtaaacacagtggaaggtaattgtgattatatgcttc

SEQ ID NO: 135216 - DNA, 854 bp, Cannabis sativa
acgggttatacttctacagcaaagttaagatcgcattcagaaagtaaatgtggaaagtaaaagtaaaagaaattgagaacttactcaatgatcgatgtctggattcattttacgcaaagctaaacgaacagttcttgtgaaaatttttcagcaaacttgaagctaaaaacctctctttttgctctgagcttgctcaataaagaaggttggtgaaaatgagtttgtgaacaatgttcaatcgtatttataggaaaaatagcgaaaacgggtaatcattttaaaaacctcagacgcctcggttcccccaaaagcgaatattggaaatcaaaagcaatcaagtgcaaccgtcatatgtggtgagagaaagtcagatttcgaagcattaattgcataaaagcatttattagccaaaactgaagagacgtctagtcagcctcacatcgagtcgcgaacagacgcacctaacacgttacccatcccaacgcaaggacagctcagatgaagtctacacgcaactttggaagtcccgtacagacttggggggcaaatgttgtcccaatttgtgcactctgacgtggcatcacatgatggtgacacgtggaatcaactatgggtatctgctcactaaacacaggccgaacagggcacctcatacatctgctcagatgaagtcctctagaccggggcagtgagcaatccgcacagcatgccaacacgtagcaaattcagctttcgcatcatgagtcatcaaaataaattcctataacttttggattagattacagacatatggcaagctatcgaaatcccacgattagtgtattctgtatttactatgcaatctttctacttat

SEQ ID NO: 135217 - DNA, 521 bp, Cannabis sativa
aaaaaaaaatatatagtaagtaatagttacattatagatgataaagaagaagagaaagagtacttgcactaacagtaaggtcagtgaggtaatcagataggtgaggaacatcttcaagaatgtaaccgttgtcacttgtgacgattttaggagttatcatttcagtagtggaattggaatttgaagtggttgttgggatgtagtgtcggtgattagtggtgtgatcttggtaagagttagagttggtgggatcaaaacaccgaaactttggtgttgaaagggaatcagagctagatatttattctttctaagcttaattaagttttcaagctttgaaagtatagggtgcatctaaatttctgctgcaactatgcatctatttatagcctttcatcaaatcctaattctatactaataaggaaattatttaaactaatcctatccgttatcaatcctaattctatactaattaataagaacttatttaatatatatataaataagatcttatttaaattaat

SEQ ID NO: 135218 - DNA, 645 bp, Cannabis sativa
aatacttctttgagaccaattgtttcagcaatagtaggtttaatagtctcttgatgcaatacgcatttgcctacatcactcttctatatatcataatttctagcctataaccaaccaaacctaaaaagtttctgttcaaataaaatacagatatatctatattgactttaaccgtgttgacacacggttttggcatttatattatactcataaattgtctttttgagtacttgtaactatatatattttaatgtcaaatgaatgctcaagcagatccttctaatattactatgattgcgattcaaaaaaagcttatgctagctaattctaagttctaatatgtttccatgcacttcctattataattgtaacgccggtatttaaaatttactaaacttaatggttaattttatagtattataactttataatcatatgggtcgggatcccaaatttcaaaatacaatttaaaagtatttttactaatgcaaagtttactagtatatatattttttttacacacaataggcaactaaattatatctcaaaatattgaaagaccgaaaccctccaggttgcactgcagcgatatgtacaatcactgtcgagctccatctcactgttcctccactttagcttttcctt

SEQ ID NO: 135219 - DNA, 1407 bp, Cannabis sativa
  modified_base (1153)..(1156): a, c, t, g, unknown or other
agaagaaatccaccttttccagccttgtattacacccgaacgagaacgatattcaaccaaatcattttttgaataacgatagcacaacgggagatcccgatcatgaactatataatcgttcgttgaatattgataaagataaatcccatctatttccaagatgcgagggagcaaatcacggcggagaggtggagccatactatgctcgtatggaagtatattgttctttgattgaggaagggattctgaattcgaagaggtcttctttcttttacccatgggtcttaaaaaaaaagaaatctatgagaaaaatgacaaagcatgagataataatatgtgcatatgcaatacatcgttcaggacaactctttaaacaattaaaaaaatatcatcgacaaaaatcatacgacagagctataaaacaaataaaagtacacaccatacgtaattgcgattaatatttcataatatagctaatatgctttatttatttatatatatgtataaaaataaatagagtctaattatgatttaaataaatacaataaatttttaaactacaacataatatatatatgtatgtatatatgtgcgaaacaaaaaatatgcatagtatagtatgtatatatatgtgtaaaaactgtttaggatatcaaaaaaaaaaaaaaacaaaaaacagagatcataataactcaatattaaaaacttatggtccatcaacatacaattcaatttaataaataaacatatgtcccttaacaatagagaatatgaccaattaaaatactctaatcagagaattttatctcagttaagcttatttaagataaaattagaagaaatttaccatgacaatatataatgtttaaagataaaaaaaaaactcaaaaaaaaaaaatcacaatgtgtatttattttacagacaaaataattatgaattaatagtgatatagagggccataccaatatactataagaaaattttcacaaatgacaatgtatttattttgcaagacaaaataattacgaattaaatatatgtatatatatgttgtatggataaaacaaacgttaaaattgcggaagaactaatcaaatttaactaactaaaataataataaactacgtataaataaataaacctataaatatnnnnatacttccaaaacttatacaaaatgcgaataaaaaaaactacagatacatattgtattagaaagatatagagttttgttaaaaataactgttaattatatgcagacgccagttagagattacaacactttaataaacttttgagaaaaaaaaaaagatgtttgcaacgataaaggaacactatatatattattgtataagctttcaaaaaatacgcttacataccctttcaaaacaaaaaaaaaaaaagga

SEQ ID NO: 135220 - DNA, 669 bp, Cannabis sativa
acgaccacaacacgggtcgttgtgcggaaacttgtgatatctttgacagcatctttcgttgaatgttatggtgggctctcttgcctgtgggattttcggctttctctcttctacggccaggattacttcttcttgctcgtgctgtactgtttgggcatacctctcccgagctttgcctgaatctctagttatgtgcgggcctctgacaacgacttgcagatgtccatctacaggtggtggtagtaagtcttggttgttatcgcccctctgattttgatcgtccttgacatacttcattacgtgtcggttgtttttccttatcatgaattcgatttctcgcttcaaattgttgcattcattggttttgtggccgtagtctccatgaaaatgaccaaaattggtcatgtctcttttgctgacatcattttttcatgggtgtgggcttcttgtacggggcttatgactgggtggccatataaacactttctacatcctccatcaagacagtaaatgcagaatacttagcaggattctctcggggagcttgtttggttttaccagtgacctttccctttttcccattcccttgcctattattgttgctgaaccgtttaccatttgaacttgaattgcttgggtaatggggaagttgggcggatgttccagtag

SEQ ID NO: 135221 - DNA, 897 bp, Cannabis sativa
  modified_base (209)..(209): a, c, t, g, unknown or other
  modified_base (715)..(730): a, c, t, g, unknown or other
cttacccggtattcccccttacggatcacgggactactgactgtcacacaacccgctgactgtaaagtcttaggcaaggaatcaatgtacgaactcgtacgtatagtattaacgagaaactatatgtggctaaaggagaataatgaggcacccgagaagaataacgcataccctaacttgcaacaaacaaactaagtgtaaaagtcgantcggcttgaagaacaagaatgcgaaatggtcatctcgctacgaggaagctccctatagtccacccatctaacagaagcaaggcttataaccctgacaagtcaacagatttccttatatctgcaatcgacataaaacatatcttgttgatctcggatataagactggttccagctcgccgttggggtcactacaatcaagtttctaccgagacatctccagaatcaattaaagaagtgtttaatacacaatacttctgacccagtaaaagcaggaaaattacagttgtatggcttcaaaatcatgtactacatttatattttgtagtcggatcccacgatttaagggataatgactgtaattacattttggtcagctttgtaattaactaccactatgcaattataaatagtggtagataagattagaaaaaggagaggagactcttatgcaagaggtcttgaaaaaacatactcaaaaatatgaataagattgactcgtggactannnnnnnnnnnnnnnncaaaaccacgtaaaaattcggtgttcatatttttatagttattttgtgttgaatcatattcgtgaggctcaaatttagttaacaaaaatctgcattaacacgtaatatttatatatggtcagatttctatattcattacctgatttgatttcctgaattaattgtca

SEQ ID NO: 135222 - DNA, 826 bp, Cannabis sativa
  modified_base (498)..(499): a, c, t, g, unknown or other
tggaaccatcaagtatgacttctcttgatgaattactagacaaggtatgcccgcctactgcttggcccacgagtggaactcgtaatcggggattgcgcggctgaccatttgcagtctcagaagtattcatcattggatcttcgtccatctcacccaggggaatgatgtttggcagttgttgatctacagtttggtaggctttttgtatcaacacggtagcctatcgactaggattttcaatctctagatggtgagcccttaatgcctccatctctctatccctccattcagcgaacatatgcctttgttcgtcgaacgcgagatttactgcagcgcgtagtttgtcttgatcatgatgtagggtattgttatgaccctgcatgagtctgagagcgtcacggagattttgtaactcagtggcatctctgatggtcgtctggctgttggttccaagtaaaaacgttgtgttgtgagtgccctggttgggtgcggaactgnnattcccagtctcttgcacaccatttgcagtctcagaagtattcatcattggatcttcgtccatctcacccaggggaatgatgtttggcggttgctgatctacagtttggtaggcttctcgtatcaacacggtagcctgccgactacgattttcgatctctgcatagtgagcccttaatgcctccatctctctatccctccattcagcgaagatatgcctttgttcgtcgaatgcgagatttactgcagcgcatagttcgtcttgatcatgatgtagggtattgttatgaccatgcatgagtctgagagcgtcacgaagattttgtaa

SEQ ID NO: 135223 - DNA, 559 bp, Cannabis sativa
gaaatggatttttgttaattgttgaagagggtttaaggatcgagacttgacttgggaagtgtggagagttgagctaacgtagtgcactggaatgtggtatgaggaaatgagatgagcgagttggaggagttggttgaggtggctttgagatagatatggaaccatcactactacaactgatgatggtgttgaggtggccgcatggatgaataataagattgatgagtttatttgcttgagttatgacattgagtttattttagggtatatatgcccaaggtcagatacgtcacagttgggctgcttctcaaagcttcatctatgttaaggggatgaagttagttcaattttttgtgtgtgaattttttccttccctgaaaaggctcaaaatctcattggtacaaacttacattaatttaaaatgtcagcacttcccttacaaacaaaataaacaataaaagtaaaataaaatgtcctgtaaagaaattaaggaatctgtcatgatcaattctgttatcccgtggtcctcatcctctgccaggtgtcatcattcagtgca

SEQ ID NO: 135224 - DNA, 781 bp, Cannabis sativa
ttctaaaaaaggaatgtctacttattagtaacctcctattacaggtcaaagagaaatgtagccatatggttacaatcatagtcacccatatatatatataagataacataacataaacacatttttttttttgaaaataagcgtagtaatgcattaagtaaaataaaataactagacctcccggtcattacaaagcaggttctccggtaaagaggagaccggaatacagccatacatttggtgggtaaacacccacttagccacattatgggcaacatatttacaacatctactaacattaatatagttacaactaataaaagagggagaggacctagtacaaaaggagacatagttctcaagtgcccaatgagactccttcccattgagagcattgatagctagtcttgagtcactctcaataataataaacttgaaacctaactcaatcgccacggaaatagctaaacagcagaccgctgcttctccacataaagtatccgagaaatccaaccaagacgtgtggatccgaatcaccctacccagatgatttctagaaataacacctgtgtacatgcttgccagtcccactctaacatcacaattcagtttaatccaatccttagggggtggattccagttttccgtcaaaatcggagtcgggcttggcacaagagaagaatgtaactctgacgtggcatcaatcgatggtgacacgtggattcgactccaggtatctgctcgcaagacacatcctgaacaggacacttcgtacattcgc

SEQ ID NO: 135225 - DNA, 517 bp, Cannabis sativa
aatttgacaaaactccttaaatcctactagatagcttaatttctcctacaaatatacgactatatacacacttgtctatatacatataacatcaagaaaaaaacataaaaaacatatatactattagatgtagttacataattgtgttctgtagctatagaacatatgttttattaccaatattattattccatatttaatttattaattaaataaaaaaaaattggtaattatataataaaaaatttcattttaatttttatttatttattttgtggggtccataagagataagagaaaagggaaagagtgaggaagaaatcaacaaggaaatattaattaatttattgtagataggtgtcaccaaaataattgaggtgatcggcctataaataccattatatatcatcatgaaaaaaaaacatagaaacacataataaatatatatatacatatctagaaaatgatgatgatgaagaggttaatggtagtatttgtggtggtgatgataacaatg

SEQ ID NO: 135226 - DNA, 935 bp, Cannabis sativa
gggacaataggtaagaaagtagttagcacgtagagttaagcgcattggcactcatgttgaatattataattgtgattagtttaagaactcggattaggattattacccgaaagtgagcggttatatggtctagggttattaccctagttattattgatatttaaatcctatgccatgctttatatattatttaaagaattatgcattcaaggcataatttggttggactcagcaattagaaccgagatgaactgttctaaggccttattgtaaataaatgtgtgagcataacacgtggttctatgccacatagatgtaaataggcgtgtgagcgtaacacgcaagtctatatcaaatagacattaagtgtaatggcattattactatatatgtgaaatgtatattgtgattattgatatttataatgtcttgctggacttggctcacgggtgctctattgtgtaggaaagggtaaatcagtctatgatcagccatgagtacgagagcttggtgatgcttgtacatgttcgggccacactagactaagtgggttgggtctatcagtgattgtattttgtaatctcaatttttgctgcttaggttggcacgtaaattaacttgtaatattttgtgaaggttttacgggattccatgtcatgtaactttttggtttgtttataaagttaaaaattgttacaagttatattttcattctgttacagttaaagcttaagttttcccgcttttatttttctagtaatcccagattagagggattagtgttttattaatggttttcgtagtgtgcctaattgttagggcatcatagtttggtatcaaagcgctaaggtttttaaacttctgcaaaccggctgaacatgtacaatcattgtcagagacaagctcggctcgtggtgcagtaagtgttgagagta

SEQ ID NO: 135227 - DNA, 1617 bp, Cannabis sativa
actatgtgccccaagaaagagacacgagataacaagaattcacacattttgaatttagcatatagcttgtgatcccgtaaccattgtaaaatcgttgtaagatgcaactcatgctcttcttttgagttagaatataacaagatgtcatcgataaacacgatcatacatctatccaggtaatccttgaacacccgattcataagatccatgaatgtcgtcggggcattggtgagtccaaaagacatcacaaggaatacataatgtccataccgagtacggaatgcagttttcagaatatcttcctctcaaattctcagctgatgatggcctagcgaagatcgatcttggagaagactgtcttcccctttagttgatcaaacagatcatcaattcgaggtaaaggatacttactcttgatggtaagcttgttaaactctcggtaatcaatacacattcgcagagacccgtccttctttttcacaaataataccggagcactcgaaggcgagtagctcggtctaatgaatcccagattcaataattcttgcaattgtatcttcaattccttcaatttcgcaggagccatttgatacggtgcttttgatactggatccgctcccggaaccaactcaagtacaaattcaatctctccggtaggtggcaatcctagtaaatcttctcgaaagacgtcaaggaactcgcacacaaatcttgtattctcaggtcctgatgtcacaagtttgttggtatccactgcagtgactatgaatcccagaaacctctgctcatcaggtccttagctttcaacagtgttattcttggtatgcgtgtcccctgaaccttacccacaaacaccgatgggttcacactatcaggctcaaacaccaccatcttccgcttatagtcgatcgttgccccatacttagatagaaaatccattcccaggattatgtcaaaataagacagttgcaattcaattagattggcagtcaattcacaactgttaatccagaaggacaaagaccgaatccacctagtggataggtctgccgagggtaacagggtaccaaactctgaagcataaatatcacatggcttatggaaactttctataactctactcgacacataagagtgagtagctctcgaatcaaacaacatagtataagaactaccatttatagacaactgacctgtcactactaacggactacggactagcatcagcgccagcttgagtcatagtaaaaagtcgccccgggttctgagtagcattcttcttgggttcctctttcttggcctgaggacaatctctaataaagtggcccaccatgccacactgaaaacatgtcttggcccgacactcacccggatggtgtttcttgcatttaggacactcgggataagatcgtaatgaggacccgcggccctgacggccacttctatttcctcggaactttttattaccccctgatactctggaagcctcaaccttccatttatgatcagggttgccaatgccggtccccttactgacattaccactagcaggagggttcgatgccgtgacgacatcctttgcagtctgctcttttgctacatgttgcttagcctcct

SEQ ID NO: 135228 - DNA, 565 bp, Cannabis sativa
agctcgggaaagagttagaaagatcatgtttattcactttgatctaaaataatttgcagaacaatgtatattgcctttgacattcagtagtatacaaattataattttttagatctggtaatgtgttatgctcataattttgcaaacaattgtttgagcataaatatgggtattggacatgaatacttatattttttgtagtgatattttatgtatggacaatgtttgatcttattaattaaaaaattataatgtctgttttttttttaaaaaaaattataattatatagttttttttaaaattaaaattttcatgtgattatatagcttttttaaaaataaaatatatgtcaggttttttttcaagaagtaatattttatagtaaattcaataaatataaatttatatatatcagattttttgaataaatattaattttttttaatagatatcaattgtttttttaaatatatatcaacttttttttttaaaaaaaaaatatataagttgaatatatttaatttaattttttaatcatgttttaaaaataatggtatttttgtt

SEQ ID NO: 135229 - DNA, 644 bp, Cannabis sativa
  modified_base (470)..(474): a, c, t, g, unknown or other
  modified_base (569)..(580): a, c, t, g, unknown or other
cagcgtcggtagcgaatttcgcgaaaatcgacgctgaaagggcttaaaaaccgcctctaaaggggggtttttgtagtagcagtacgctaaaaattaagtatttgtcttatcgcgagaattcgcatactaaggaaccccctgccatttgtgaggaatcctactgcaaaattttttaccttaggactacaattagattaattataactaattataaaagttataatgtgttaattttatttcattgttccttttactttgggctagtccatcttgtctttgggctgtaagctcttgtataaataccacattgtatcttatgtcaggattaagatcaacaagtgatattgacttagaaagatacaacggtaagattataatatatttactaaaatcaatatcggtcccaatccaatgtatactacatacatccgaaactagcatactttatcaatgttctggaaagaacatannnnntatctaaggtgtaagtataatttatcgctgattatcacatcagtgtaaatccaatgcacttaggactcagagacattgtcttttgaagcatatannnnnnnnnnnnttccactgtgttgacattactgtaattgtgaataactatatgtactggacttaacagattttgt

SEQ ID NO: 135230 - DNA, 537 bp, Cannabis sativa
ggttgttaataatatcttctatatctgataaaagtgtggtcttctttttaaagcgatagtcattttttctagaccaggtcaaccaaataatggtaaggaaaaggttgaaatcatccatattaagagtgtcaaaacccctaaaaatattccttaatgtcacaatatttatttttaacataaaagtgataaagtgagaaattcttccacacaaatttagctctggaatatcctaaaagggcatgagtaacagtctcctctctatttccacataaggagcagtgaggacttaaatagattaaaagcacacggcaaagcatggttaaaggatgtctaaacaaagtgtttgattttaaaagggattttgatagttcaaactgtcttccaccaagttttaaaacaatcacgcgaagaagaagaaggagaacctgaaacaggtatgaaattagccaaatgataagcagagtttaccgtgaagttgtagaaggatgatgcctccaaatgaggcaatcattgttggaatatattttaccatgacct

SEQ ID NO: 135231 - DNA, 618 bp, Cannabis sativa
atatcactatatatatataaatgcaatgcataaataaaactcacacaacatttaatgtatacacatctataaaatgtctctaataccaattgttagttttatgatactaaattaagtacgtagcggaagattttcgtattatcctattatcattgtatcatagcccctaggatctcttcatgggtgtacattaaataaaaataataagtttagagtatatacctctcgaaacctatcagagtatcctaaaaaatgctcgtatgttgtatcccttaatccagttgatgaggaatttgcaatttggactcacacaaatgtcttccaaatcgatccaccacacacaaagaatagtgtgggctattatgataaagtgtataaccttgttcttattgagttctcaacacatgagcaagaccaatagagagaaaaataaatttttttctctctatagaattcaaaatttactatgtaaagtgatgtactgatttctcaaatcagactcctatttatagtaattgaatttttttaattaaattattatttaattatttaaataaataaatatctataaccgaattcgattattgatatttatgaaagaatatctcaacaaccttg

SEQ ID NO: 135232 - DNA, 1452 bp, Cannabis sativa
agtggtcgagccattacctcccctactaaaacctaaggtaggaggagtaggagccccatcaaaaacctgagtccctcgagactattgggtgcactccactattccctcagcttgcagtgcctttcccaccatattagcataggtggtgttatcatcagtgatgatcatcaggtcatgtcttatcttcgaattcaacccgtctaggtatttttctttcttactaaaattgtttggcactattcctgaagccaatcttgccaatcgatcaaactgagttgtgtattcagtaacactcatattttgtttctgagtcagctgagtaaattcctttctttttgcacttctgactgcttcattatagtattttccattcaacaatttctggaacttttcctacgtcatcgtagtaacatgacaagtcaaggacaccatgtcccacaatactagagcatcttcttgaaatgggaatgtggcataggccactctgtcattgtcggtgatgcccataaaattcagaattctagtaataactgtttgccacggcttgacttttataacatcgggacctcccagaaagattggagttgcctgcttgcagaacctttcatacagtggttccatacgattcactacaacaactagtcctgcgtgcacagttggggtaggagctacttgcatttctggaacagggatcgcaggagcaccatgttgtctcaagcatcttatttcttcatcgtgctcattaattctagcctgcatttctgtaaacctattttcccattcttgggcagcttaggcagcctacggtgggttaagatctccccaaccgcgtgccctacctcagccacgaacatttgggggaatctgaactccctaaccaccactagatccgacctagttaccctgactcctagtgtttttcctagcatccacaatattagaacagcttgcgtaaccaagagctagtttggtgagatcgtgatcaagtaaaacttactagttgtcgcttatcaggctacaaacatgcttcctatcaagcttttttttttttttttaattcatactattaaaataaactactaaagtaataaaaacttactgaaccgtgagacgaactgatcgctaatgatgattgtatatgccatgacgatcttcggaagacaacatggtggctctgataccaaattgtagcaccctaactatcttaagcatgttaacgtgattttaaacttaactatgcagctcgttgctaatcaacgagtttattaaaaattgtgattaattaaaaaatttcttaattaattggaaatataaaataacctacatatataattttggaatctcgtttacaaaagtatttacaaaagtttcattgtgcatatacaaaattttgtcacctagtgactatacaaaataagccttgatgtgccaaagaccgtacgctccaagcct

SEQ ID NO: 135233 - DNA, 502 bp, Cannabis sativa
tccgattccacgctatctttcgccagctcgtgaaccttcttttgggagcttcattttgtactccacttccacacttgtagtgtctttgtttcccattttttctgtaacacacaaagactcactgcccttctcggaggtcaagtgaggatattctaactcattgaaaacaatatttctagcaatcacaacctttggtttacccttcttggaatgtagattccatatcccttggttcctaagtcttaacctaggaaagtttccttcacggatctaggttctagcttgtcaatggattggtgtacatatgtagtgcacccaaatattcttaagtgcgttaggctggaaattctattgtaccacatttcataaggtgttttaaggtctataactctatttgggcttctatttacaaggtaagttgcggttgctaaggcttccccccaaaatggtttttctaacccaaaactaaacagtaaacacctaactttgttcaacaaggttc

SEQ ID NO: 135234 - DNA, 1523 bp, Cannabis sativa
  modified_base (730)..(731): a, c, t, g, unknown or other
tacagggttgactgatatttttacgacgattatcccctgaaattatggggtctgattacatatcacgttaaataaatgcgattattatttgaatatcacacagctatgaatattctgcttttactgggctaaaataaaggtgcattaaatatgttgtaaaccgtattgttttggaatgtctcgctgggaatagagcaaaggcaatcttgatagcaagctggagttcgtcatatttcttttcaaggttgataatgcaaatctcgtcgcttttactttggaaacataacattctatctaacaaccgcagtttctgattacgagatgatctttttcttgtgcatgtcttcccatggcaaggtggacgcctcactatcacttgctttggttcacccatctgctatacttagttaatttgtatactgtacattatacgctaagtgtcttcacaatcaatatatctcatgcacataatcgaggttagtgcctcgtcttatacacctgaagttacacaatttctcgttgatgcgcaaggcaacaatttgtatattttgtctcgcataagactattcagtcagctgagttataaatatactctgttaattttgcttttaacgagttattcctcctcaaatgtaattatgattacgtgtctgagttcatattcttcctcgcttgacacgtgtcttcctctgatgtgctagccaaatttcgagtataacaattgcccctnnaaaagttcttttttaataaaaagtactttttaatgattacaaagggtatttttgtcataatcccttttgaaaaaatgtatgtcctctgattttggtggttttgcggttttgaggtacatcaacattaaatgaaaatctttccacttctactttgaattctatccgtaggatcaaacatctttctaatccgacgaaattgatatcaagagtataaagtaagaaaaaggaaccacatttgcactatttcctccattttagaaatccttagaaactcttaagcttctttgttaagaaagagcatcgagttttctctagaattcgcatgccatctctgaccttgacattttttctgcgagtttctcccgacttcatattttcgaagagatccttactgtattcaaaggttcacaggctgaagagttgtatatcgtcccaagccctaacttcaaacagtaagtaacttctcttcttaatatcttaaatgcttgttacgttacacttctgggtttaatcatttgtttctatcattgccatctcatttggttttattaatttttaaggttgaattgtgtttgggtcaacaatacggttcaggcaatatgtatgttttttcaaaaccctcaactcaccatcttcaggtttgataaaattctttctaccgattgggattgctttcttcttacagtaatatcccaatctggttcagaaatttatcgtcctgaagatttagaacttgagtttcctacagaatcagccatcccttataaacccatgttggaaatattttaccag

SEQ ID NO: 135235 - DNA, 709 bp, Cannabis sativa
gaaagaatatttgttgctccatattcccacttgtatatatattctcatgcaagtgaaatacattgacagaagtgttaagtactctagtcatctcatttgggcaaacccttttgtactgcgtctgatcactcttccatgagtgactacaaccactcgttctcctgaaatagacatgaaactctattgattcatttttattgaagcatacatttcctttttattgaagcatcattgataatcaatttccttcaatatttgcatttcgatttgggaataatggttggagatttgggattagtaaattggagaataccactcggagcttggttcgaaggtcttgttaagctttgtgagagaataaggtaaaatcgcaatatatgtttgttttaagagaaaaaaagaaaaaaaaattgaaaaaaatagtttcgcattcagtagcaatagaggaaggcatcttataatagaagaacaaacattttttttaaagataaaattaataaataatacaattatttcactatttaatttgagctagttttcatgaaaaaaaaaaacctagttattcccattttctatgtgttttaggctggaaaaggcatattatatataataacagaacatttcatatattaatggtaaatttattcaaatttaaaagaaaatatttttcattttcatttataatcatataggaaactaatttttatat

SEQ ID NO: 135236 - DNA, 726 bp, Cannabis sativa
agtatgaagttaacttggggggggggggatgctaaccaagaaactttcccttgtgatgacatcaatttttgacacgtgccaagagagatgacatcacagagttgagtagatcgagtcatagtagtagacctgggaggggtccctatctcggggcctacgttgactttgggagcttctggataggagttcagactttaataacttgatttcatctccctatctttaagtatattttgtaccatgaagacatggaacaataaaatccaggccccaagagataaaatccaagccccaacaatggtaaagttttacaacatcaatgcataaaatggagtgagcgataaatgtttcattcaatttttagctatttttaaagatatcttttcatttgacaattgcttcccagaatctacatatgatatgaaaaatactttaatttctataggattgaagtatgaaaagatccatgcatgttcgtacgattgcatattatattgtaaggaaaatgcggatatggattactccacgacttatggtttatctcgctataaaataaacaagagtaaggagaatggaaaacttatcccccaaaaagaaatgtgatacatgcctttgattttgttacttaaacgattatatcgtagtgcagaatattctgaaaattttattaggcatgagacgaagagagtgaaagtgtaacgccctaatgctaaggcacgctacagt

SEQ ID NO: 135237 - DNA, 1261 bp, Cannabis sativa
tcaactgctcttttgtctttatccatagacggttatgctgactgtgttggatagttcttgtcgattgtatgttatctttcttaactgtctttgtagggaaaatattaagtgttaagatacaacacatctcacggttctcctttatacatcaaaagcgaggtgagtaaacgttgaagttatttctactccttaagcatactcacgagtatgtggatcaatgagttgcaaactcttactcgtgagtatgtggatcaatgagctgaaagctcttactaacgagtatgtggatcagtgagttgcaagctcttactcacgagtatgtggaccaatgaagttgcaagctctttgtttactcattctgaacaactttcattgtgtattttatttatcccaagatggacttgttgtctcgccaatctcacttgttaatagttattattcacatctcccagccactcatgttattaagctctcaaaataaaagttgtaaaaatcattttctctaagaaactttaatgagtaaatcaaaaaacttaatgaatacaatgtatactcaggattcagtctgatatactaataattattgttgtgatatgaataactctttcatggtaaatgacatgttaatgaaagatattatatatcggtctactcttgcataattaaattatacacaacacatttactacatgtttatctacatatgtgattcgaatcaaaaacacacactagaagtatagtgtatggtaaaccgtatttaatagttccatattagagaatcatattattttaatacacttctgactagttttattcatattgtattcttacagattataccttctccatatgaataaagaatttttagatatttattataatatatttctataattaatatatttatttatcttataatggtatttcatatattctgcaatatattatacattaattacttgcttttagagtataaatcctaacacaaaagcaacataatttttttacaataatatgaagcattatttttttgttattttaaaacaacgttgtttttacattaatgttacgagaaagtaatatttttttcttaaaaaaaaaaacaaataaaaattagtaagaatagaacctgtaaaaatataaataaaataaaaatctgtaaaattcataaaattgcaaaaaaacttcctattttaagtatattatgtaaattttcttatataatagaggaaattacacttactatgggattttaaaagtt

SEQ ID NO: 135238 - DNA, 893 bp, Cannabis sativa
acatgcccaagcctaggttgcacaacaccctatgctatccaacacttgagtctgcctgataccgattcatacattgtaatcctaaagggcactatagcagatcccaactatagcgatctggatagtgattcactcggtataatacaacaaaaagggaagtaggtcattacctgctatcacaagggggcaaacctctataacaaatcctgttgtctattatttcttattcttatttgtacacacacatggcaaatatcaaatctatcgaccccgttgtcggttgatcactttttagggtcaacaatttggtgctttcattgagagctaatcatgatcttatcaaacgccatggtgaacacaagaagaactcctatgacaccatttgcgtcttcgggtctccctcaagacccacagattgcagacctagacactcaggttccaatcacaactaggatacccatgaatactacagatgtggtgaatcccttcaccacaacagggcgcaacaagtctggccaccacagctggccagcttgacgtgagcatcccggtggatccaagtggtaggcctatgcctttaacagtagatccaccattggcgcctcccactgaaggaaggacctaggggcgatagcctcctggaacagcaacttgacctcaaatccaattttacactagagaaataggcctgggaatgggcgagccagcaattggcgagcctcatctggacctaggagaagacattgagttggcttgactcagggaagttgtaggccgcgcatgtctgactgaagaactatgcgctgatgattgcgatgtatttgctcagtagagacgcaaatttctaagatggatggatgaccaagggtacatcctgttggaaattattttac

SEQ ID NO: 135239 - DNA, 786 bp, Cannabis sativa
acagttacagtgtaattacatggctagacaaacatgccaaattgtgtaattacctccaattacacacaaattcaattacattgtggcttttcaaacgcacccttaaaatacatataaaaattaatttgttttttattttactttatatatttacattacacacgcatcaaatactttatatttttctctatatcattaaaatattctatttttttaatatattatagagtaaataccattttaaatcctatattttataaaaattaccaattggaccctcaattttattaaataacaaaatagaccttatattttctaaaatgataaaaataagatcccgaactcaattttcaattattttattttttaatgtaactaattttaagacaaattttaacacgaacagatacagaaaatgtaactagttttgtcataatatctctaaatcagattattattaagttttatttggacaaaaaatcaattcagggtcatatttgtacaattttggaaaatataaggtcaattttatcatttaacaaaacaaaatatccaattaataacttttgcaaaatacaaaatccaaaatagtatttactctatattatatgaattaaagtaaaataaacaaaaacctcaaagaaaaattagtagtaaaaaatgagatggcaagagagaaaaagataaaagtgaaataaagtattattaaaaattattttaatagtagggcttatgctaaaaaatattgaaattccgtattttaatattcccagtttgattatttaa

SEQ ID NO: 135240 - DNA, 560 bp, Cannabis sativa
ttttttttccagaattagtggtgactttagatggtccccaaacatcactatgaaaaagataaaaaggtttggaagaatgataaatagttttagaataagatttacgttggcttttggccaataaacaactttcacattgaaaagacaaaggattcaattttttaaacaaagtgggaaacaagtgttttaaataagaaaaactaggatgacctagcctataatgccaaatcattatttgatcataaacagaagaagaactgatgctactaagcccatgagcaattttattcttagaaatatcatcttcaaaataatagagaccatttatcatcctagcaccgccaatcgtcttccctgaactttggtcctgaaaaagacaataagattcatggaagattacacaacaactagaatcccttgataatttactcacagacagaagattgcaggttagatgtaatatcccaataagcttaataattaataattagggtttatatttatattatgagttaaccaggtaatgagtgggatgataatccaactaatttagttcaaca

SEQ ID NO: 135241 - DNA, 633 bp, Cannabis sativa
agggtcctcctctaaggtataagcacagaaattagaaccaaagtctttagctatccttgctctcttaatcttctaggttcaatttctaaatcctcagtatgttcattactcttaattattggaagattgctagttaatgcgctctcactatttctcaatttaaatggaaatctatcttgaaaaaaaatcaatgtcataagattccattatcacatgcgcattaagatcatagaacttataggctttgctattgacaatataccctaaaaatacacattcataggctctacttgctagcttaattctcttaggatatggaatacgaacataagttaaacaaccacaagttctaaaatagaaaatatttggttgtctatttttcaaaatctcatagggagaaatttttctttttgatttaggtactctattaagcacatagcaaacagttaagagaatccctcctaaccaatgagaagcaacaccaaaattaagtaaaatggcaacaatagattcagtatatatgttctattctttctttagctttaccattcattttaggtgaatacggtgcaatcttatcatgtataattccatgtgggttataaaaatcaacaaaagcagtgaaatcatatt

SEQ ID NO: 135242 - DNA, 536 bp, Cannabis sativa
cgcctggggggcaacacttacacgttgcagtcaagttcgaattcaaggcatctaacaacggagccaagtacgaagctctaatcgctggagtaaaagtagcctgggagatgaaggctgaacacattgaaatctgcagtaattcacaactggtggtaaatcatgtatccggagaatacgaggctcccggagaaaagaagatagcatatctgagcaaaatccacgaccttctcgcacaattcaaatgctacggtcttagacaaattccaagagaagaaaatacaactgcagacacgttagctcaattggcaagcagcaatgtaagtgacaaggcaaacttggtccctatccagttccttgaagagcccagcataactggcatgaaagaaattaaaatgattgacacatccccaaactggatgacgccaatagcagcctacctaaactctagggaactcacggataaccgaaatgaagctcaaaaaatgagaaggaaggcagcacggtaccttgtcgtagtgggagagtttcaaagaact

SEQ ID NO: 135243 - DNA, 510 bp, Cannabis sativa
agaatgatattgacttgagtcctcttgtctaatagactcatgtatctttgcctcatgcattagcgcaatcatgtgcaatgcatgagttcttacagaggcactacttagtaaagaaaaattatgtggttctcacaaacaaacatcatattcagattatatttctatttaaagaaatatacatcattcaatttttcaattgctagtaaaagcattaagggagtttcgcataattagatattttttaaaaaataaataaagtaacataatgattatgcatgaataataaatatcaatttagaattattataaacgtgatgcatgagcgcatacaagtaaaactcataaaatcttgcttaagttaatccacgataaaactctttaacaattgatcgccgcttcaggaccggtatcgagtcaatttcattaagcctatgagacaattttcatctttattttgaaacttaaatatctcatattttcttttccaaatataaagtatcactttttgac

SEQ ID NO: 135244 - DNA, 623 bp, Cannabis sativa
  modified_base (558)..(565): a, c, t, g, unknown or other
ttttctgaaaaataattgaattttcattctagaattatatttgttggatagattgggaaaaattaagaaattcacttttttacagaactcaatttcaattttattataattagttatgatattttgaaaagttgaaagaaaaaaatcagaaatcgtgtacgccacacacgcgcgtggacaccgagttccactcgatcagatgcgtgttcggacactgcatgtctgaagatacacgcacggggttgtccgaattcccctatccgcgcgtggaaaggctacgtgcagcctccagcgccgtgttttctaggccagatcctccttgtgcgtgcgcggatggtatgcaatgcataccatccgccccaaatacattttttttttcaattttttcaatttttcatgtttttttaaggaattaatttcgaatttttttatgtaattttgttttttgattttttttttaaatttcaaatctaattatcagaattaaattaattaacatttttatattagtttaagatatcagtgaaatttgattttgaaaataggtaaaaatctatnnnnnnnncttaattaattatcttattttttaaaatttgattattttatcttattttcaaatttaa

SEQ ID NO: 135245 - DNA, 650 bp, Cannabis sativa
  modified_base (43)..(48): a, c, t, g, unknown or other
gggttcgcttcctacttgttttcagctgaagaacaggcatgtnnnnnntaattctatatgtcctttgtgtaacgcttcagatgaaacgatctaccaaaggtggggtgtgatttttttcatgtgtgctggcatagaactatggtggacgtgggtagcactttaaatgtcactttctgcaattggctgctgcttttgttcagtggtggtaggcaggaagagatggaggaagccgcggttgttagctggtcaatttggcgtgcccgtaacgactttgtttggcaacaaaggagacgtactgctgcaaatgtggttgcttcagcaagaactttgcttgatcaatataaatctgctcaaaaaagaaaggttctttctttgtctccgttgattgatggggaccgtgtgcttgagcgttggactgcacctgctataaataatattaaagttaatgttgatggcgctttgtttgagcgagaaggcctatttggttttggttgtgtggctcgagattccaacggtaatttggtagaagcttacacaatgggaaaggtggggcgggtgcaacctgaaatagctgaaattattggcatcgaggaagctttaagctggattgaccgtcattcgtggggacaagtgattttggaaactgatag

SEQ ID NO: 135246 - DNA, 715 bp, Cannabis sativa
  modified_base (228)..(243): a, c, t, g, unknown or other
tagatgtatagataatataattaaaaaattaaagaaattgagagaattaaggagaaaaaagaaagataattttaaagtatttatagactaccacgtcactttattgataatagtattaaaaattaaaaaaagaaatatgagattaattaattaattaaaaaaataaaaaattaagaaaattaaggagaaaaaagaaaaatgattttaaagtatttttagaccgccacnnnnnnnnnnnnnnnntctcctttatatatatatatatagatattaattactatcatttttatttatcaatagtttactattattatatatatgtatacaattttttttaagataggttataagtacctgaaattttttatgatatttattctttatttttagaaatttaaaagaacaatatatgtgttttgcaatagtttaaactctccaaaaatctacaagattcttatgttgagtgaagtgaacctcctctagaatccttagacttagtcatttttaggataggaggatctacaacagtttcggagagatcaatgactggttcagctggcgccttctctctggatggggtagtctcaccgcccttggacttcttggctggaagagatgagcccgagcctcctcccactctcttcttcagagccttaagcattttcagagacatgtctgcacgaaatgaaagtaacatggttagaaaaaagcatga

SEQ ID NO: 135247 - DNA, 680 bp, Cannabis sativa
  modified_base (386)..(394): a, c, t, g, unknown or other
atctcgctatgaggagacttcctatagctttatccaactaacaggagcgaggctcataaccttggcaagtcagaatatttctttatacccgcgaatcatgtaagacatacattgtcgacctcggaaagaagaatggtttcaacttgccattgggatcactacaatcaagtttctatcgagacatctttggattcaacaattaaagacgaagtttctgtcgagacatctccagattcaacaattaaagacgtgtttaatacacgatatttttgaccaaataaaagcgggaaaatcagagctatatgaatttcaaaatcatacaccacatttacattttgtgaaatgtaatcagatcccagtaaacatattttggtcagctttgtaannnnnnnnnactatgcaattataaatagtggaaaataatctcaaaaaagggatgaaaaaactcttatgaaagaggccctgaataaatactcagaaatctgaataagattgactcgtgaactatgcagaatttaactgcaaaaccacgtaaaaaactttgtgttcatattttattttgggagatttttaattatacacgtaatattagaattattagcatatatacctctgattatttaaattatatacataccgctaatgttgtaccgtatatataaaaaatgcatataattctt

SEQ ID NO: 135248 - DNA, 751 bp, Cannabis sativa
  modified_base (27)..(31): a, c, t, g, unknown or other
  modified_base (676)..(698): a, c, t, g, unknown or other
aaaatagattacattgaaatggagttnnnnntagggcataaaacctaacaagttcatgttcctgccaactttgtcaagagctggccaaccttagtaggtgatgatctgccttggtgatggccaacctttgtaggtggaggccagcctttagaggtggagctattttgagaacaactacttttattcgtagtaccgtcgtagatgcaccccattctagtaccttggtactagtattggattcaatttgtagtcatagcgtgcaaacttgtatgtcccaatttctagtgcttcagtgacgacatatggtccttcctgattcggcccaagtactcctactgatgcatcttttatgcttaggaatactcgtcgtaacaccatatctccaggcttaaatttcctatctttaaccgtggagttgtattgttttgtgactgtgtgctgatacctcacctttctaagctcagacctttctctaatctattcaatcccatctaaacactcagccaacaactgatggttggtttgctggtcatatgttagtctttgatgtgatggtggtgtgatctctacaggttatcatggcttcgtacccataggttagagcgaagggaccatggccaattaatcttttttctattgtagaataagcccatagtgttcggttttgtgccctaannnnnnnnnnnnnnnnnnnnnnnagatttactaattaatataagataagaaattgcttttatgttgcatggttcac

SEQ ID NO: 135249 - DNA, 3666 bp, Cannabis sativa
  modified_base (29)..(71): a, c, t, g, unknown or other
  modified_base (1274)..(1297): a, c, t, g, unknown or other
  modified_base (1539)..(1541): a, c, t, g, unknown or other
tcacaatttccataaacctcgttgattannnnnnnnnnnnnnnnnnnnnnnnnnnnnnnnnnnnnnnnnnnatgctagttagggtgttacatgcacattgatttttatgggctctgtcatgtttctaggcttatcacaaataaaagaaattacaaaatttacctgttgcaaattatttatataatctattaccaataggactatgattaaaattatatcataggaattgtccacaagttaatcatcgtgttaacccaaaatttggttggaggacacatgtcaatataatgggaatgtgaattggtacaatagctttttacggaataactcattaattacgtaactatcagagtatatttgtaacactgactgtaaggtcttaggcgagtattcaatgtacaaactggcacttagtgtattagcgagaaaccatatttcgctaaatatgaatagcgaggcactggagaaagttactattatacccaaaatttggctggaggacacgtgtcaagataaagggaatgtgaatcggtacaatatctttctatggaataatggaataactcattaactgcgtaactacgtaactatcagagtatatttgtaacccgctgactgtaaggtcttacgcgaggaatcaatgtacaaactggcacttattctattaacgagaaaccatatgtcgctaaaggtgaataacgaggcaccgaagaaaagtgatacataccttagcttgcaataagcaaactaagtgtaaaagtcggatcggctcaaagaacaagtatgcgagatgaccatctcgctatgaggagacttcctacatcttcatccaactaacaggagcgaggctaataaccttggcaagtcagaagatttctttatactcgcgattgacgtaagacatacattgttgacctcggaaagaagaatggtcccagctcgctattgggatcactacaatcaagtttctatcgagacatctcgagattcatcaattaaagacgtgtttaatacacaatatttttgacccagtaaaagcgagaaaatcacagctatacgattttcaaaatcatgtaccgcatttacatttcgtaatatgtaatcagatcccccgattttagggataatggctataaaaatattctggtcaactctgtaattaactgcccactatgtacttataaatagtggtgaacaatctcaaaaaagggagaaaaaaaactcatatgaaagaggccctacaaaaatactcagaaatttgaataagattgacnnnnnnnnnnnnnnnnnnnnnnnntgcaaaaccacataaaaaaaccttgtgttcaatattatttttctataacttttgctttttctttgttgaataatcatcctgaggctcaaatttggttaacaaaaatttgcgttaacagttacacataccaactataaaagtccttagcttgcaatgagaaaactaagtgtaaatgttggatcagatcaaagaacaagtatgccagatgaccatctccctatgggaagacttcctatagcttnnnccaactaacaggagcgaggctcacaacattggcgagtcagaagatttctttataaataaccgtgatcgacaccagaaatatattgttgacctcggaaggaaggaaggccccagctcactactgggatcactataatcaagtttctgtcgagacatttctggattcagcagttaaacacgggtttaatacatgatagtttcgacccagtaaaagtgggaaaatcacagctatacgattttcaaatcataaaccgcatatgcactacataatatgtaatcaagtcccatgattttagggattattgctgtaaaattatttcggtcaactctgtaattaactgccccctatgtaattataaatagttgcatacatgctcaaaatagggacaaaaaatctcatacgagagagaccacacgttcctggagaactcaacctgatgttggtcctagtacgcggacaacatgctcgaggagagctcagcgtgggaacggtcagaaccccgggaaaagggatgaagagctcaatcatggaggtgcccaatctgtgagagaaagaacttatgaaacagaaattcgctgcctgagacgccatctggaagaggcgcagcatggaaacgctgagttagaacgtgaggcagcctcggccagggccgcacaggggacaaatacccaaaatcaacctgaacatggagtaagaagaccacgaggctcacaaacctggagacaggaaaaggcctgggaagaacaaccaagggaaaatgagacaccccctgagaatcaggatgaacaaccagatgggagacaatcagaaactgatgaacaagaaatccctcatgaaaatgaggaggatgttgggactcaaccgagagaacagagatcacgtgctagaagtcaccaacattcttcccaaacccatagagcgaggactcgtacataccctgatgggggaaatgcgacaaactgctctcgggaggaaagaatagagcagaagaagcaagtgtgacttcgaggagatccagaacccatagtcgatcaactaaaagaggagaaagtactcaacgagctaatgattgagaaagtatgggaacaagtaaatcagcgagccacttaaagacaaagtcaatgagtaagatgcgatctatgagtaagacaacatctgccagcaattacttccaaccagatctacgagagcacttgaatcggaagaaacctaaccttcaccaacagcttggtccaaagcaagaggatccaattaaattgcagaaaaacgagctagaggacaaggtcatgagatctcaagtgggggaattagggaaattatctaaatacgactctgacaaggagcttgagccgtatcacccagatattatgaatgcccctttccctccaggattcaaaaacccgcacgtttcgtcttatgaggaaaccataaatttgatctcgcatttgaataactttaacacaataatgcgagcgagtaatgtggcgaacaatttacgctgtattttgttccctacctcacttgttagagaagtgagtagcttgtttaaaaaatttactcatcattcaataatttcctgggagcagctatctagggatttcaagaagcagtttcaggccgctagggacatgaaaccttaagcggcctcgctaaccaatataaagcagaagccccacgaaacacttaaggcgtactgaagttgttttagcacagctcctgctagggttagaaatttggatgacagtacacaacttacagcccttcaggtggggatctttactgatccattaaccgcagggggcaagttgtgggatgacttacagggacgtccggtaagaagcatcactgagttcaatgaaaacgctcaggtgtttttctagaaggaagaagcccgaaaggagatgaacttgttgaaaacagctcgagaaacaaacccaacaatgtttcaacaagtactgcttccacaagaattgataactcgggggcatctggtccgaagagaaaagacggaattaatgaaccgtcgaaggagagaaagaaacaaaagaagaatgacaaatacgtgccattgtatactatttataccgagcttaatgaaacccaggagaatatttacctcgcacat

SEQ ID NO: 135250 - DNA, 543 bp, Cannabis sativa
ctcctgacacaagggctggacctcttatttatgctggtgagattggacttggggttagcaactgtagtagtgatgaaccccatgctgacctgggggatgactctgaactcgtcaggctgagggaggtcgtagggtaagtacatggtcagataaatttccttcatcgtgaccaacaagaaacacgcactgctatgggcaatgctttcgcccagcaaagacacaaattccaagagtagatggatcagcaagctgggatccttcaagcccatcaagcatagctaaaactgctagaataaggagcctaacaacctcattagactgttcaacgagagggttaaatctcaagttgaagagccacccctcataagggatccccttcgacggaagaatgtccctatttcccacagagaaatcagcgtcctatggatcataggcaaacctcacgaccagggggacaaactatgtctaaaacaaggccaccctatcatcccattgatgattaaattttgctcgaatggtcatacgacatggcttgcccataga

SEQ ID NO: 135251 - DNA, 716 bp, Cannabis sativa
actatatatggtgctattttgcaaggaggctggacatcaaaagtttcaacaaaccgactctaaataatgtgcataatcaattgtgaattaacatatgtattatatctatttgtttcaagtatatagttgatttatttgatgagtgattttttataaaagtagtatttaattatataaatatatatttatataactatgtttccaaaaagtaaataaatttagttcaaaatcatttcaattattgatatttttaattttttctaaactttttagtttcttatattaatttctttttgtatttatgtcaaaattaagggtttcaattagaagataatagagcacagtaatcccattttgtttgaattatttagaattcagttttattttttttatttcttttgaaaatcatgaatcacaatcttaaataataataatgtatgactattttcctataattttttttggtatacatgtattatttattgttagtttatcattgttatagattattattatatatattattagtaaattatagtaaatatagcgattacaaatggtttaagatgatcattgagagacataaaaaatacctgaatatatcactaaatctaatgagaataaaggcgagtgatttacacttaaaaactagctatttatattaggctaattagcaatttttccccccgaactttgacatataccaaatcatgacc

SEQ ID NO: 135252 - DNA, 531 bp, Cannabis sativa
  modified_base (139)..(146): a, c, t, g, unknown or other
  modified_base (173)..(176): a, c, t, g, unknown or other
attgaaatttctaacttttttactatggggcggaatttttttcaaaaatactgtgtttttattcaaaaatattgtgtaagtttactgtgttaagtttttacggttgttctttaattagttgttccactgttgttttaannnnnnnntttgttattttacggttgttttataannnnacagtatttttgtaaaaaaaatttatcccacagtaaaattataaacttttgcataaaatcaaatatttttataaaatacccttatcttcccctattcctggtaattatgtatgtcttctcaatccattaatttctttatcattataaaatagagtaataatatacattaactgtatatatattttaagtgtgtggttcagattatttatacatgtgtaacttgttttttaaattcctctccttaattattatatatataaacaaatttatgtgttttcttttttttttttttaaaatcaaaatttatatatgggtaaattgcggcataaatacctaatgtttccgattttataca

SEQ ID NO: 135253 - DNA, 822 bp, Cannabis sativa
atttagggcaaaaaacccaacagacagctccttaaatgtccatgaagatggcctcaggcttctctattaggagagtgaagcaggtgtacttctcctccttattcttctgtggcatgggaaacgttttaaactttcccttcttgccactgttcctcccagagttgttggtgttgcacttgttttcagtatttttgtaactagaagtttgggcagagtcaatggtgtctgcctgtgcgcctggtgggtcatgaggctgctaaatgcctcgtgactgcctgttgttgacatgccccgcctgggcctatcatatggccttttcaagtttgataaagttgtcagctttatcaaggaactccttcatgttgttcgtagagattctatggatatctttccagaagtcactcaacgagagtgtgcccccactatggttgtatatcgaccttcttctgtaaggcctttgactttggtagccttggcaataaacctctggatgtaatccttcaaaggttccccttgttattatttaacttggacaaggccttctagctacgatggtacaagtctcgaggacaacaattgtgtgtaaaattctcgtgagaactcagcctaagagttaaaccttcatagggtgagtttaaagtaccattgttgagtcgtctctgacagtgtggctagaaatctgcagcaccacacatcaccagtaaccttctagagatcgagttgcatctcgaagttttgatgtgagccagtgggtcttctcgctcagtatacatcttccataccagcattttgaacttagaaaagggcaaggcatttatgtat

SEQ ID NO: 135254 - DNA, 580 bp, Cannabis sativa
tgtaacaactatagataaatatatgttacatgaaaagttatagggactaattagcaattgttattattgtctagttagtataaatatgtaatactattacacaaatgagaatcaatgaatgaaatgaaagaaaattaggattattcttattggagtttggcactgactcgaagagtgcaattcatacaattggtaattgtatcaatatataaattaaggctataaagaatattgaagcccaatcatattaaatgaggatttttttcattgtaagggttttgccaataatgttatgataagactcctctagaagacacaatgatcactttttttcaatattaaaggtgatcaattaatatggatatatttaacattattgacaagaagtcaaattatatataccaagaaaagaaggcatgtacaactttaaccaattattcaagagtaatattataactctctttaattttatgttgtgatttgtaagaattagtgatttgattttctattttgttaaataataaattaaattttatatatttttgagtaatttgcggcaaaacccccttaactatcaatt

SEQ ID NO: 135255 - DNA, 1367 bp, Cannabis sativa
  modified_base (1145)..(1148): a, c, t, g, unknown or other
agaaactcacctactgcttgattctagcaataagaaagttaaggccctattttcaatctcatcctatttgggtgtacactgaccaaccgttacgccaaaaattgaaaaagccggacgcctctgcacggttactcaagtgggcagtagaactgggtaagtatgaaattactttccatccccgaacagcaatcaaaggccaggccttcgcagactttgtggtagaatgcacaggcaaggaagaaagcatatccgaaggcaacctcgagccagtacaaataccacacccaagtaatagtgaagacaagccgacttggaaactacatgtggacgggtcgactatagatcaactgtccggcacaggaatcgcccttgtcacacctggggggcaacacctgcacgctacagtcaagtttggatttaaagcatccaacaacgaggctgaatatgagctttcatcgctggactaaaaccagcttgggagatgaaggccgaacatattgaaatctgcagtgattcacaggtggtagtaaatcacgtatttggagaatacgaggcttggagacaaaagatgatagcatatttgagcaaaatacacgatttgctcgcacagttcaaaagctacgctctcagacaaattccaagggaagaaaacacgactgttgacgcattagctcgtcttgcgagtagtaatgtaagtgatagagcgaatttggttcctatccagttcctcgaagaacctagcatcactggcacggaagagattgaaatgattgatactttcccaaactggatgacgccaatagaaccctaccccaacattggggaactcccagataatcgatatgaaaatcgaaagatgagacggaaggctgcacggtacatcatagtagagggaattatgtatagacgaggattctccatgccattgtttagatgtgttacccaagaagaagctacacgaattttgtctgaagtgcacgatggattttgtggaaaccacaccgccgggcaaagtttatctaagaaaattctaaggtaaggttatttctggccgaaaatgatcgaagattcgaaggtctacgttaaaaaatgtgataaataacagagattttaaaagatacctcgagctccgcccaacgagttannnnagatgcaaagtccttggccttttcccatttgggatattgacctgatcgtagacccgtaccccaaacttgggtccgagtccgagtctggatttgagtccaggaactggaatctgactaggacttagacccaggcccagactgggacgcagacccgaatcaaaactcggatcggactcaggacacgaacctgaaccccgacacggacttggacccaaaccc

SEQ ID NO: 135256 - DNA, 910 bp, Cannabis sativa
ttttttttttttttgcaacaaactcaattttttggatatttaatgctttttaaatataagtataaaattgagtgggagtttacaaaatcatgcaaattaaaactataaggtaagttaattacccttgcacacattaagggggagctaatctaatatatattgcttcaattttttcctttcccttttcaaaataatcagatatttgatatcatcaaaaaaggggagattgttaactctaactttttggtctccttatttttatgattaataaatatttaattattatttgttactaataatttgatgattttgtagcacaaataaaggtaaaataaatttttctaaggtaaaattaactctaagggcaaaatggtaattttactgaaattctcaaaagtgacccaaagtgaattccaagactcaaagaactcagacaagagtccatgaaagtttatctatatttcctagtcttgtataatgattttcaaatccatacttaaaaaagttttaagtacaaattttggctcattaacttgtgcgacaagttttctcaccaaatgatataaaatgaatttcaattgactttttaaatcacatatcatttaactaagagaacaaaattggaatttctgaaatcggataattgagtagagagttatggccattttagtgcaaaaaattagactttttgccactgtcaggaaatgtggttaaccggttctcctgaagccgatttaacggttggcaaacggtgagccggattgcccagtggtagtctcttttttcgtgtccaatggctatattacacccgaacactatataaactcgatatttactcaaaaatttaatttggctgagcatttaaatcatacacctaacatattcaagtgagtttaatgagctcccaagt

SEQ ID NO: 135257 - DNA, 705 bp, Cannabis sativa
tggataaagcgcttggcaatgatgattggctaagactctttcctagggtggtagttcaatctcttgccacctgcaattctgatcataggcctctctttatttagtctgctttccaagaatccaggagcagacgtccttttcgtttcgaggcctggtggactagggacccccgtagctccttaattgtggaacatgcgtggggatctgtttcgcatgattgggccccggccagagtttataagagaatgggtgcatcgcgccttgctctgctcaattggaaccgggagcaatacggcaagttggatacgtgcatttctaagctacaagaacagttacaagttatccaatgtatgtctgcgggttctagatcttgggctcaggaggtggagataaggaataatcttaatgaggccctaagacggaagtcaatttactggcagcagagatcccgtgttatgtggatcaaggatggtgataaatgttccaagttctttttcctctcggctacaattcggaatagaaggaactcagtggagagcatcctgagtacggatggggtttggttaactgatcgagatgccattggaaaagaattcactgtttttttggggaatattttcaaaaacccgcctcaggggtctttggaaagtttagatcacctgatttgggaccacctctccccctcggaacaagcagggctggagg

SEQ ID NO: 135258 - DNA, 544 bp, Cannabis sativa
ttaggttaaatttatttggtattaataaaataatgaaaaaataaataataatgaaaaaataaattataaataccctacataagtggccggccatggttaaggataatttattacattcgagagcttgaatatggctgagtgtattgtgttgggactataatttttttagaaagaaacatgttttttaaatttcttataaagtaacttgttaaataaattttattttttctttttgcttcacgaagtaacttggcacctgtaattttcttggagaataaattttattaaagcattaattcattatgtaggagagtagaatgaaagtagctactactcaaattacaaagtgattggtgtacactcagtcatatttaaaagtaaggtaccaggttactttcaagagcaatacaaaaccctaaaattgaactagcaggataattttttcaagacatgattttttttttttggttaaaaattgtagtcacagcacaacaaactcaactatattcaaaagtaaggtaccaggttactttcagaagcaata

SEQ ID NO: 135259 - DNA, 784 bp, Cannabis sativa
attgtagtggatactatttggagggtgcgcaatgagaaggtccataataattgtccagttcattttaacaaatgcattgataatatttgtaattcttatgcagatatgtatgataccttgctccaaagtcctaccccatctttaaaggaagcttggtcccctcctcctcaggattggattaagctgaattgtgatgtaaaagtgggtttggattagtatgtgtattgcggttgtggcaagcaaccatcttggcagagtaattagagttcagacagctcgggagaacttttcggatgttctttgtggtgaagcggcggcctgctctttggaagtgacgattgctctggatatcggctctaagtatgtaatagtagagagtgatttgagtgtggttatcgacgccatcaatgggaaggggtctcgttgggaaatcgataactacatctccttttgtactaagtcatcccactcttttagtagttgttgtttttcttttatcagtagatcttgtaactttgccataattgtggctaggtgggctttctcccatcagacttttgggtctctcccggttgactctgtcccggaaacccttttttgtaatgaccgagaggtctaactatttatgattctatgatataaacaccttttatcaaaaaaaaaaaaaactagacttaataattaattctcctctatacttaattatttatttattaaatttaatacatttaattaaattgaaaattcaatatctaagtttattttgatcatgatacttaaatat

SEQ ID NO: 135260 - DNA, 591 bp, Cannabis sativa
  modified_base (126)..(128): a, c, t, g, unknown or other
  modified_base (540)..(544): a, c, t, g, unknown or other
aaacgatgttttgtgttgatttggatggtttcatgatggttaatgtgattatatgataaatgtatgtgttttacaaaattttccatgaaaatatttttttctttatgaaaatattttatttggatnnnttgtgaaaaattaagcaattttcgtttttacggaactcaattcggatgaaaaacaaagaagttatggatgtttgaaaaatcgggtccattaggtgtcgagggtggtgctcatgcgcactagaccctcggacaaggaggtgctgcgcatgcggatttcagacaccattttgtcttaatgctcggccagcttgcctaggttcggacatcagacacgcagcaccagatgctgcacacgccgacgattctcggcgctccaccctgctgcacaaccattccgcgcgcggatgaggttgcgtgcatcctcttcgtgggcaacatgggtgatttcaccaaaaaatccaaatttcatgggatttttttccaatttcaaattttctcaattttcaaaccctaaaattaaaataaaatattnnnnntaatatatttaaacttaaatatctttttttttaaattaataatattt

SEQ ID NO: 135261 - DNA, 730 bp, Cannabis sativa
  modified_base (270)..(272): a, c, t, g, unknown or other
ctctttctcactttctttattatttcctaaataagtttatatatatatattataatttcttagttaatttttgtatttaaaattatatgtcgaaatattttttttaattttttataacagtatttattatagttacaatattattcttgtaagtttttgtgaaaaaatttaaattgtttacagtaccgaaaataaatttgaaattttttgaacacacataataaactaaaatatcaggaacttcagtactgtaaactattcgaaattttnnnaaaatttacaagaataatattgtaactataacgaatattacagtgaaaaaaaaaaattttaaaaaatttcgacatgtgatttcgaatgtaaaatttaactgaaaaattgtaataaaaatttgtaattgactctcctctaactattattattattattattatttcatatagatagttttgttaaatatattattttatataaatagagtatttagcttaaggatttatagaccactcataattaatcataacaaaacgcatcatcaatcatcacatgcaaatgtttttttttctcttcttaaatcttcttttctatctatctttttaacttttatggagttttctttttcattaattaatttaatctcttatatatataggatataattaaagaaaataaaaattatttgatatgattacatgatctcttaactagtgtcacacaaaaattttattat

SEQ ID NO: 135262 - DNA, 1092 bp, Cannabis sativa
atacgaatcgattacgattcctagcatacgatggcgtctgatcacagcagctttgcaccctttctagtctataaaagccagcctttttccttcactgggctactttcaccaattttccattttcccccaagaactccttcgggaaaaattacagaaaccatagatttttcactgctatttctccgtcgttgccaatccacgttctaccgtcgatcgtcatcaacttccagttcataacctttgtgtaagttttctgggtaccttatacttttgttattcacttgcatgttagggtagagcttttggttaagtgcttgatttctggaaaatgattttggcgaagactgtcgtatggtgtataattttttttttcttttatttgtgttctgccgctctctttctctttcgttttgcaatcaagccatccgctgagagactatccaggatatgggacggtttttcgtacccatgttctatttcttttatttttgtttctttttcctctactttcgctgcttttacgatatttgcacctgatgtttgcctaggagaatccctggaatttccatttttggcaaacatccagaggggccctcttttcagcggttaggggacccacattcctctcttcgtaactgctggattttcctttttcaaaatctcattatccttcgagaaatgtctgtctctacacggagctaaatcctccaacaaaggagcggttaccctagccaccctggaagaagtgatgaagggacccatcgtccaagagaagtacacgtgttgatccaaccgttgggaggcgcatgagcttcactcaaccttaacctgtgcccatcagttcgagaagatcgtgactgtggccgggatcaagccttttgcctctagggtcttccaccacttgttgcgagatgaggagatgcccaaccgtaactacggtggttttggagcttggagcccgactcaccttatgtctggagctatgctaccactctaggattactttataaactttttagtttttgttggccttgcgccttaccaacttattccccaagcataccgcctgcttttaggcttgtttatttttta

SEQ ID NO: 135263 - DNA, 518 bp, Cannabis sativa
caatctccacccttctgtccaaccttccgactcaactcgctaggataaaaatccaagtttaagcagctggagctgaaataagaagaaaacaaacatggttaatagatccataattaataaaccaaagggataataattctctaaaacacatgaggttatagcataaatagattatagcataaatagaaaatagcataaatagaaataccttgtttctttgccaaaaacttaagacactggggtttccagtggcccttttcgttgcaatataaggactttcctttttgctttgcatcttgattagcagccttttccttattagcccttttaatagctttaagaggcttcttgctattcttccaattcttctttttactgggttttgaagcaaaggcaaagtttgcctcagccttagccataccattagcagtgtaagaactaggagctttagttcctcctttctgtggtcctccaatcaaattttcaaatgtctgaaggttgttgattaactcgtggaa

SEQ ID NO: 135264 - DNA, 800 bp, Cannabis sativa
ggtattccataactatgaattcctggtcttccacaaaaattgaccaaatactagttcttttaatattatttaaacttgttttataaaattattaattagattatttattttattaaataataaagaacacatattctttaaaatggtataaataaaatcttgagtttaattttaataatttttttaatataagcaacttaaagataattcatagcagtaataaatataaaaaacataactagttttgtcataacatctctaaatcgagttattattaaattttattttgataaaaaaatcagttcatattactattttaaaaaatataggatcgaatttgtcatgtaacaaaacagaaaaggggaattctatctgcaccccataaaattataattacaccccattatgaaaaaaaaatacaaatttaaatcatttttataaatcacacttactgtttttttaaaaaaatttcctcacattattttatattaatttcaatacttattttgattttattttcttaattttttctaactcatgtatatatattttttatttttttttaagaaaattttatataattttttttttgtcataatatttaaaatataatttaattttgtttgatgggtatattttttaggaatatgaattggaagaaaaaaattaaaaaaacttaatacaactaaaaatataaattttttataaaataaaatctattaaaatgagatgtctttaaaaaattttggggtgtaaataaaatttcccaatagaaaatgaggaaattacatttagtatgg

SEQ ID NO: 135265 - DNA, 791 bp, Cannabis sativa
  modified_base (53)..(58): a, c, t, g, unknown or other
aaaatgtaaaaccttgggaggggctttaatcttccacaacatcttccaaacannnnnntccatggatgagttccaactaccattgaccgactataagtgattataagagcttttgacagtgagaaaaccagttggatccctgttccaaaaccaactatcactcacaagattaacactcaaaggcacttgtttgatgagttcaacatcacgagaatcaaacaagtcctccataaactccaagtcccattgtcaaaatagagtttgtattgaagaaactgacaaaaattatagtattacaaacattaattattggatgcttctacaatacaccccattaaaatgggtgtactgatgcaattcctaactgtttcggtatttataagaattttttagtctaaattttttcatagttgtgtatgttatagttatttaagacaacctgcaaaattttgaaaattcggaatagtttacaatatagaaatcaatgtttaaactatttattttacacgcgtataaaataaaaaagttacgcgtgcaacaaactctttgaacactgttttcgacgtgttaaatttttccgaatttctcaaatttttgtcagatgttttaaataactataatctatatatgaccataaaaaaaattggactaaatacttttttagataccgaaatagataagagtgcatcgatacacctattttaagagggtgtattgtagaattttccttaattatttatggggtaagttgaaaaatgcctcttttattcatcaattaatcaaatttacct

SEQ ID NO: 135266 - DNA, 786 bp, Cannabis sativa
agtagccaagactatggctatggaatggtggctagagatgaacatggttttatgttggaagctacttctcggctttgtcatgggaatatacgcccggagttagcggaggcaattggagttcgtgaggctctaagctggattaaaaataaacattggccgcaggtgactttagagactgattgtttggtggtggtacaagctattcgtaatccaactcatatgacatctttctttagtgatgtaattaaagagtgtcaaaatttgcttgtgaatttaagtggtgttactatttcttttgtaaaacggtcagcaaatttagtagctcatgcgattgctaaagctgctatttcttaccctgatcgtgttttcagtatggggtatgtcccaactgaactgcttccttatttagttgctgaatttgaagtttaataaaagtttgattactttctttaaaaaaaaatgaagttgagagtgatattaaaattattataaattatgttgggagcttttttaaggatgtctcttagtggagacaatttaataagatattcattaaggtagaaaacgaaattatttggttgaaatttttttttccagaccaacacattgttggactttcatcaacaaattggtcattacattaaattaaaataatatataatcaaatttgtaagagatattattaaggagcaatataatttttttattgtgtataaatgttcagttttgaaaagaaaatagtaacaatgttggattaaaaatcctttgtgggcacatatgtataat

SEQ ID NO: 135267 - DNA, 1003 bp, Cannabis sativa
  modified_base (752)..(769): a, c, t, g, unknown or other
aactctaggagtattatttgacttatacgtgaagtatgttatttttgtaatttttgctcggcgacaacgaaaaatgcaatagatgctagtttgatcacatgggtaagtttagagccttatttcttagtgggatatattttggagaaaatagaataccgaggttgagcggggttatggaatttgaccattttaccgctagttttgaaaaatgcctaagtaataggtttaggagtattttagtaaaatgtcaaatgaagagataggtggtcgcctaggtttatgacacctagccattattattcagcaagattaaattaattaatcttttgtcacttaggggaaaaaacaaagaaaaaaaaattaaaagaaaaaaacatttttctcttggaagctctttctctcgctttcggctgagacaaaactagaggaaaccagttggtttcttgctattttttggaattaaagttaaggattcaagtagctttgaggtaaggtaaaccctagaacctttaattatgtgtttttgaagctttgagttagtttgagtatgtgattttgtgatataggggctgttagggttacaatagattttatgttaattttaggttgattctaagttctggttattggttttgctaagttatgatgaaattgcataagtttgagcttagaaatctaagctttgatcgttaatggtataatttgatccagtgattttttctgtgaattactggttggaatatattgtgtannnnnnnnnnnnnnnnnntggaaggtttggttgcatttggtggagttttgagcaaaatatagaatttttaggtgaactagtataaaccgggtaactggttttaccagtacctgtaaaaccggttagccggttttggcagggatccccgaatattctattttctcaattctcgtccatttcagtgccatagttgggtgtttccctatttcctgagttagagtaatccctagagagtataacagaacctagagt

SEQ ID NO: 135268 - DNA, 509 bp, Cannabis sativa
aatatgtggtattataattttaataagaaaaagaataattgaaaatgcttaaataataatatattttttataaactacaaaagtaaataatattttaaaatttatttttaaaatatatttcacgccgaacctatgaaaatttaccatcgttgatgcaaaatttaaataattaataaatatataattaaaaaattattaaaattataataccacatgcatattcataaatcaataataaaatatgctgcaaatgctaaaatataaaaaagtgaggacttacaattctctctagctattatatgtgttcgctagtatttatctttttttttttcttattattaatgtatatgaatataataaattaaagtattaaaatattaatattaatataattaataaaaaaatattaatataattatttttgtcaaagtaataaaattaaaaaaaaaattatttgaatttaacacaaaaatataaattaaagtaagtaaaataaataataaaaatgt

SEQ ID NO: 135269 - DNA, 744 bp, Cannabis sativa
gagtttgtctaacttttacaaatagaactatacacaaccagcatttcattatgatatgaacaaaatgctataaatctaatcaattttaaaaaacccaaatgtaaaaaaagataataatatatcataaaaatgttaccttggattgagcagagttggagaatgactcatttctgattttcctaagttacttgctcaccacttaccaccttacgatctgttttttgaatgaaaataaagcattggactctgattagatgagtaacaatctctgattgaagccctttgctgaaaaatccccaaattatcttcttcttttttaagaaaataaagtaagtattacagaagaacattttgtggatacagaatagaattaatgtaagacattgcataccaaatggtcaaagtaataagcgagatgcagatgtagacagagaagagcatcacgattaaattagggtttatgagaagaaaatgaggttttatttgaggttctctcaaactaactcttttgacaagttttattttttttattattattatttcacaaatacataaaaataattaaaaaaaaaaatatatgatttatataattttaaatacgattttcaagattttatttactattaatgtgatattttgatgtatttttatattgtccgattgtaaatttattgttattttcaaattacttttatatagtatttttgttgttttataaaatattgtaaaaatattaaaaaaaaa

SEQ ID NO: 135270 - DNA, 571 bp, Cannabis sativa
  modified_base (57)..(61): a, c, t, g, unknown or other
ttttctggccattctataggttcactaagaaccctaagtaatttgttatgagcaagnnnnnctctaatcttcttccttcaaattttacaatcccctgatccatcatactggtcaacatccactctaatattactcatgttaatcaaattgaacaagataataaaagcaagcatgtaacaagatatattttatgttagagttttcctgtttatcaatttcttgatagttgcaaattggtttcttcaatgttttaatgatttttcttgtttcttgactttatttctaggtgttgttgaatcttcttgcttccccgagctctgataccactgtaggaaattaagcatgcccaaaatgcccgtacaccaacacctcaaagtacaaaaaaccaaggtcaaaaaggaccttccctcttgtgcggatcaagagtaattttccccctcaaaaccctgccttttatggcagtataaaactctctttatgtagcagaaaaccctagctgcataaacgctccttcctcttgatggaaattattttactaggatctatttactatcatgtatgttggattaac

SEQ ID NO: 135271 - DNA, 524 bp, Cannabis sativa
atttttcatgaaaatgatataggttacccataacgtgagtaatcgtctatgaatgatataaaatattattgaccattccaagatgccgtaaggaatggcccataaatatatgtatgaatcaattctaagacttctgaagctctattggtacctaatctcttagttttggtctgttttccctttatacaatctacatagacattgaactttgtgaagtcaagagactctaaaatgtcatcaaacacaagatgctcaattctatctcttgagatatgacctaagcgtttgtgccataatgacgctgcattttttatttaatttgcttttagtacctcgtgattccacatgcaaagtttcattataggttcaattatttctatcaaataaagattgtcatatgcattcaaataacaagttccaataacatttgaatttaaagacaaaataaactaattgttttcaaatgaacaacaatatccaaatttgtccaacaaggaaatagaaactaaatttcatctaaaaga

SEQ ID NO: 135272 - DNA, 632 bp, Cannabis sativa
attttcagttatggacacacaaattcagataagaaaaatcttatccatcttttcaaaaaaaaatttctttctaaatttcatctctaggctatttctctactaggattaagatagataataagaatattaccattagtttaatattaccaactagaagatatatcaagcaaagtcttttatcttaagtgtcaatctcaataggaaaagccaacgttagaaaaaatattaaagttaattctgactatatggattagcattatatctctctattagtatacaactcctatccatccaagactaaatggcatcagagcagcatgtaaacaacaaaatacaaattatataattatagagcatcatgaaaatagtatagtataatgtatgttgtgaaaactaccattaatatttttcttttaaataaaaggtttaaatcaaattttgacaactgattaagaataataaaaaaaacaagattaaaatagaaatattataaaaattgttttagaatttgtattttgcaaaacttataaattagacatttttttttttgttaaataacaaaataaatcctgtattttttaaaatgatacaaataggactttgaactcaatttttaacattttttttttata

SEQ ID NO: 135273 - DNA, 1627 bp, Cannabis sativa
  modified_base (791)..(791): a, c, t, g, unknown or other
atcacacacgtagcgtccctatagtttagggcattacagaacccctttatgatagcccataagttatatttttgccattattttgcttctttaatgaagcaaacttgtctttcttcaataataccattttttgttctagttatttaaatagtaattctatctatttaataattataattaattatcaaaaaattactatttaaatatatttattaattagaccttccaaggtctcttaattaataaataaatcttgaattctcttttcttctcaattatgcgcttccttggtaaaattcacaaataagacaaaatctttatttagaatcctaattgattaaataaatcaattaattgagactaaaaaataatattattccagttagtgcggggaccatgggcctatgtaaccaagctctcaataagtagttctagaattaccaagtaaattctctatcttattaattcctcctgactccactatagattcggaattgcactcttgattacataaaacgctctattcaccaagaataaacacgctataaattatctattgtttcaatctaaataatcaaagatcctttatagataatttacatcgagtaggggataaatttaccgttttatccttcaatatattttatccttaaaatacttagcttattataaatgatatttttagtaaactaatataattactaaaataagagcttttccatttatgtctgttaagccaagctctaagaaaatcattgtttcacttttaaatagttatagaagctatagantccatatctatgattagcgctctcactcaattttactactgtgtttccaagatgtaagtattgagttgatcctttggtaagcctatcacgaacaagtcaaagaaaacatgcagtacagttaagccagaaactaaccatcttaagattaagatctttgagatcaactaagtgacattgacttagaaaagatattacggtaagttttatatctttttcactgtcaatatcagtccagttcgatgtatagccaatacatttgatactagtatactttgctaatttcatggaaaggacattccacatatcactgtgtaagtaaactttatcgttgattattacgtcagtgtaaatctagtgctctgataaatcataggactaaatagtttgaagcatataatcacaattactttctatactgcaattgtgaataactatatattcaggatttaataaaacttatatattaaacttataattatgaacaaagcatatgacaaggtcaagatagaatttctgatctttattgaaagtaaataagattgtaataaaattgagttttatttagggcttaaaacatgaaatccacgatctttgaagacatttctctaaaaaaaacatgaaacccacgatcttcaactgttgtccaatattcagccacgtttttgttctattttttttttctacaattttctatttaaatggtgattattaatttttcctcttctccatctgtaacgccctaatgctaaggcacgctacagtgctttttcaattgttgtgcaatctttgctaatcaaaaaattttctcgaaaaacgtgtcaaattagaactttttc

SEQ ID NO: 135274 - DNA, 643 bp, Cannabis sativa
tccagttcaaaagaaacaacaacaagattctaagggttgtttcttttgtaaccaacctggacatgtgaagaaagattgtgccaaatatcacacatggcgtgtaaaaaaaggtatcaatcttgctttgatatgttctgaaattaatttaattaatttctgtatcgagaaacatttggtggatagattctggtgctactactcacataagggtttctatgcatggttgtctgagctaccgaaagccaagtgatagtgaaagacacatctttgtgggcgatagacaatcagtggaagtggaagcaattgacgttttagattgctattgggaactagtttttatttggatttgaaagacacttttgttgtgtcgtcttttagacagaatttagtttttgtttctttgttggacaaatttggatattgttgttcatttagaaacaatcagtttactttgtctttaaattcaaatgttattggaactagttatttaaatgcttatgacaatctttatttgctaaaaccaattgtatcctataatgaaaccttggatgtagaatcacgaggtattgaacgcaaattaaataaagaaaattcagtgtcattaaggcattaacgcttaggtcatatctcaagaggtagaatt

SEQ ID NO: 135275 - DNA, 903 bp, Cannabis sativa
tatacgtaactggttgtaccttaattcgaatttgctcttcttattgtgttttttaaaaaatatattccttattggaaaccagtaatcaaccaaaatgcaactgtatataacgtagatctattattcatgaggttttttaaaaaaaattcacatcatacattgttttggattcggtgtgagctcaagatctgtttgttacagatctacatttcatgaatctggatttcgatattagggggagttgttttgatcgaataaaacacaaaataaatgtgtaatttcagtttcttcacaatttttttagttttttttcgtcattttctgtttagatcattacaggtcttcttttccaattgatttcgccggaattaatggtgatatttctctcgttttggtttcattttggttgtgttgctgatttgaacgattgaggtctgttcttcttgatcgttcgttccgtgcgactgaaggtttagagcatgtggtatttttataaatatttggatgtgggctgtataaatgttcaaagagccagtctatagtatatttgtaattttttttccttttttgtattttcttgtttttttccttttattcatctattatgtcaattgtcaaatatatgatagtttggttatttttaaagatattttcttgttggttataagagaattaatagttctcaattacttcacaaattcaaagcatggagaaagaaacaccacaaagatgaggacatttaaaattattgcattctaattattataagacaatatatatctattctatataaagtgtgtctatataacagagtttttggttttatgaaaaattcgtgggtgactttttatttatattaaaaataaaaaaatttattaataaaaataaaatggtttatgagaa

SEQ ID NO: 135276 - DNA, 710 bp, Cannabis sativa
ttaattaaaaatgaaaaagacaaatataccccttaaatttctataaatagaaaataattacatgttctaataatgacaattttgtcaaattaaaacatttcgattaccttttcctagttatgtaaacaaaataatatgattctggttttctttctggacagtttagtaaatatcataataaaatattgtttccgattattttctattttaaaccgatacatttctctcattgattattctgattccaattacagtttagtaaacacgtcattatagttatcccgtacggatgatgttaattaactaccatcaccacctatatctaatctcttttttctacctccatttctcatctcttatgtcattcgtaaaaattaaaaaaataaaaagaaaaaattataaggtgatagttttttttttttttttttaaaaaaaaataataatttagaaccttaacatactaaaaaaatcaactaaaacattaatctatgcaatttcaagagaagaatgaaatgagtcatggaaacaaattacaagagtttttatttttcctctttgtggagccaaatcacctgtctcgagtacctgtcccattccttgtcccagccagttatattttgccaactcaatcaaaattacacctgtacaattaacagattattctataagttaactatgtttcatttgtgttctcaaaaaaaaaaaaaaaa

SEQ ID NO: 135277 - DNA, 682 bp, Cannabis sativa
aaaacaaataacgaatgacaattatgattttaaacgcagttaagaattattctctacctccaacaatcaatcaagaacaacaatgataaataatatattttattctagaatttaactattaaccccataaataatcatttatcttaatctccctattacaattaattacgacaaagtgctcaataattaaatctttttactaagtaatagatccatgaagcaaacaatctatttaatctaggaaaagtattaaattttagagttttttgcggttaaactctcccaattattattttactagcacttaacccttcaagctcaaatcttgacgataaaaccctctaaactactaatctgttagcaaatttaaggtgtcatctatttctcttagttaaatgcaaacctaaattatttatgtatacattattatacacatgacacatttatattagtacacataatataattataaaaaaaaaattaaaaaatattttgaaataaaaaaaataaaaaaaaaataccattaacaatttattttcattttctctctcacactaaaaccttttttttaatgaatttattttcatatctctctctctctcctcacggctaagtagggttgttcatcaaaccgcctgcagtgtactgttgagttttgtgccctaaataaaactcctttcaa

SEQ ID NO: 135278 - DNA, 695 bp, Cannabis sativa
ggtttggcaattgagaaaagtaatcctagacatagaaacttgtcttcaaggatgtgagtttttgtgtttttatgatgtttcggttaattgaatttcattgggtgttttataacttattgtagtacgtgaagctttaatctttttgttgttttcttttgaaatttagtgatggagatagagataaagacaaatacaatcccagccccaagcgtagaaagttctctgggaggtgagtttgtttatgacattgttgttgctttaatctctattttcattgattgtatattatactatcatgacgtcgtcttcggaaattaatggtggtggtgggactttgactgtaatggatcacaagcttcgatccatagccagtgaccgaaccgaagtcacacctcgtcgaacgaatgccctttctctacgttcgagttctgaaagcaaagcccatagctaattcctctgtttacgccaaactcactcgatcaaaaccaaaaaacagagcttgctttcaacaaagacggacttaactcaaccaatctccaagtctccgtttggacttggacagaagaagaaatcaagaaagaaacaacaaaaaacaacaaaagctccggtgtcgtttgatcttcaagagatccccaagcgtgtgccaccagatagtcccctcgctccccaatggtacactctcgaatcggagactt

SEQ ID NO: 135279 - DNA, 1343 bp, Cannabis sativa
aaaatattactgttccaaacagtttcttaaacaaacacaaacataaacctaaaaacaaaacaacatgacataaaaatacacataaagttcaaaaaaatgtaaactaggtttccaacatgttgttctattacataaaactatggcatccttcctggatgctccgaagtagactcgtacccacccaactccttcttctttgcatgaacaaacagatcaacacacaacttcttccgagtgaatgcaatgtccaacttcttaggaatcttatcaatcaatccatgcatgaagaaatgagcatactttatgataaaaacaccacaatcactacatcacaaaaataaacccatagcaattgtcagataacaaaaaaataaaccaataacatagaatcataaaatataaaaaaaaacaaagatagttacctatcctcttgttgtggcaaattatcaaccacgacaatatcaaacgcatcagtatcttttttaccttgccagtgcttactactcctgtcaatatcttttctcccctcatagaaattaacatgtgacagtaagataggaattattacagcaaatgcacgaacaaaactctctgagttgttcttgtgtacctcccaaacctctcatagaattcaacacttttaagcatctcatcttaatgtcaagaatacacaatatccaatgagcaagaacaatcacgttaacaggcattagtacgaaatcaagctcagcccagggtttattgcataacatataaaaacccgctatgtatgcagctgccttagaatccttcttaatcgaatcaacattttcaccacttgcaacaaactcattatataaatcaaaaatttgagaagcaaagaagcaatcagtagtattaccagaaattttcacagactggtcatactttaacttctttctcaaatagtagaaacaaacatcaatatgctgcaataaacataaaacaatccaaagttataaacaaatatacagaaaaagtatacaataaacaaaaaaaaatatataataacacactaaccgagcatgacaagttcttcccaacagtaagcaaatcatagaaccacatcttatcatcaatttgacaaaccacaaaatccaatggaaccttaagcttcctatgacattctttaaacttcttcactttgtttttatcattaaacccaatcttaaaccactgatcaaaagatttagcttgcacatcatcaatcacattgaaaaagccaaatccaaaagcacatgatccaggacgtccaccttttggtttaccaatactacctgaaccaaattctgtggcatacggactgttgtatacagaactaggtt

SEQ ID NO: 135280 - DNA, 1147 bp, Cannabis sativa
ggaggatcacactatatgattctcaaataataaccgcattaacactacgtgttatgtaatcaaaccccacgattttagcggatgatagttgtaacaaaattacagtcaactttgtaattaactccctagtatgtgattataaatagtgacaagtaagatcaaaaaatgggacgaaaaaattcatacataaaaggccctgagaaaactatcagaaatctgaataagattgacttgtggactatgtagaattttaactacaaaaccaggtaaaaaatcatgtgtgttcatatatttttcattttaaatcttttaattttttttagagattgtcactattaggctcaaattttgttaacgaaaatctacgttaacacaatataatttattttggattagttagtatattaaattatttaatattttttctcataactaataataaaataaaaacaacctaatgttgttttatgtcgcgaacaacaaattaaaataaataaaacaaaaaacaacaaacacaagggaagaaaaaaattatatataaaaaaatatttagttttgttttattatgtgtacttgcataacaaataaattgtaactatgtgcacttacatatcaaataaattttgcaacaataaactattacattttgatgatattaatgccatattatacgtcttataataattcaaagttatcatagagtatccaattttaatgagaccgagggtaatcgacatcattcagatattttttaccgcaaaacttttcatctatttaatatgcgttttttttatttgacaaaatttattattcaattttttatttgacaaaatttttcattttattactattattattgcatgtgatattttattgttcactattatactttatgtaatacatccatcaatatatcataacaaataaaaatttcacactttccaccacaataattataaactttaaaattttataatataagaattgtgccttagtaatatatctttaaaaaaaattaaattattatttagaaaaaaaaaaagaagtttaaattattaaattaatttgaaagcttaaattaaataaaaaaaatgatcatgttttttcaaataattgaacttaagtaattgtacttgatgaaaaaaaa

SEQ ID NO: 135281 - DNA, 1386 bp, Cannabis sativa
cattcatagctttcctccatacttcttgttgttgagttgcttcaaaacattctggctccataagtactaagttgcatgtctaatagatttctgatactggtcttgttcgccatactggtgagtctggcaagaactcaatagcttgaactggttcttgtgtggttggttgagtaagaacttcattttgatcagttttttgtcttggtggtagaggaatatcaactatctttctttcaacttcttatgtctcccaattgtattcagcatcttcgtcaaattttacgtctcagctgattattagcttgtttgtttctaagctatagactcgataaccttttgattgagtactatagcctaagaagattcttttctcagtcttctcatcaagctttcctcttttctcttttggaatgtgactgtagcatatgcaactgaagactttgagataatttgttgatggctcacgtccgctccaagcttcgatcggcgtcttactctgcacggctttggttggacatcagttcagcaagtagactgcagtgcttactgcctctacccaaaatcattatgggagacctttctctagtagcatggctcctactgcctccataacagtcttgtctttccttttagatacaccattttgttctgctgtgtatccaacagtgagttggtgctgcatcccttcatcttcacagaacttgttgaattcattagaagtgtattatttgcctctgtcacttctaactatcttgatgtagtgaccgctttgttttttaacacgggatttgaattttttaaaaatatcaaagacttgaaacttttgtttcataaaataaacacatgtcattctagtaaagtcatcattgaagttaatgaagtacctattttggtcatttgatgaagtgtgcattgccctgcagacgtcagaaaggactagctccagtggctttttggctctccaagctttgccagatgggaaaggttgtcgatgttatttcccgagcatgcatccttcccaaactgtgttgatcaccttaattgttgggaggtctcgcatcatattcttctgcttgaggatctttagcccgtggaaggtaaagtgatcgagccttctatgccataaccatgactcatctgtttgtgcttgcattgccacactacttgtgtatctccattgtataggaaagcctttattttctttcatttttacctttgcaatttgaaaagatttatcttgcttatcatagatagtgcaagaatttccttccaaatgcaaagagtaccatttttcaatcatttgacctacgctaagtaggttttgatcaatgttgggtaccaagagtacatcattgatgtatctcttgccctttttagtgtcaatgg

SEQ ID NO: 135282 - DNA, 1299 bp, Cannabis sativa
tcacgtaatacgcctaaattagttagggtgttacacacaaagagatttcttaccacatcttcatcccaggcccgagtatccatctgaagtacaactaacagttttattaacaaggccaagatgccttgtttcaacaaagccattagtgttatgagagagcgaagggtcatcaagaattgagacattcaccccattagcaatagttctttgagctctcgagtatatcaggcttctgacttccatgatgctttgccaaataaaacttaggttatctcccaactcagctgagaataaactaccctgtgcatagtactttgccttgtaaatcctactgaccaacaaactgtcattcactaaaagttgccagaattgtttccctagaagagccaaattaaagtctctcaaacatctaaaacccaatccccatgcatgcttatgacgacacaacctatccccacctcatccagtttatacccttcccactactagaagccgaatgctaccaaaatttagccatacgtcattttaactccttacaagtttccaaagggaaaagaaaaacattcatggcataatttggcaaggcttgagctacagttttcaacaagacctccttccctgcacgagacaataaacgaccctcccaaccttgaatcctcttacgaagcttgtccttaagaaacctgaggatagcattcttgttcctcccaaccgaacatggaaggcccagatagtacccattttcatcagcttcatagatttccaacgaagcataaataacatcctgaagatgacaatttgtattgttgctcaagaacacagaggacttagcaaaattaattctttgacccgaagcctatgagtgtgcaaaagctccttaacattgtgtgcttcttcctcagtagcttacaataaatataactatcatccgcaaaaagcatatgagaaatgactggcacacctgagcaatcgtacaacccatgagcaaaccacattgctcataacttcgcagcaaactagagaagccttcagcacataaaataaaaagataaggcgataacggatcaccttgacgcaaaccccgttgagcaccaataggtcccaactccttcccaccatgcaagatagtatacgagaccgaacaaacacattgcctaactaagtttatccatcgcccatcaaagcccatccttgccatcatagcacaaagataaccccattcaagtttatcataggttttactaacatcaagtttgagagccatatagccatccctccctcttcgttttcttttcaaat

SEQ ID NO: 135283 - DNA, 522 bp, Cannabis sativa
aggctgctatcatatattggatctaaaaataaaaattagtgcaaactctttcacccttcactgttaaggtaaggaactctcaatttctgctttaaagaaaaactatcatttcatttaaactttcatatatccctgctcttatgtccgttttcagtaatttaggtactgttttaaagataatttaatggtctacatttttcatgaagaaatatttttctaattctgattattttgatgtcaaaaatcatgttttatactgactgtcgaattacagtttttttttaaatttctttccgatattgccttagtaaaagtgcgatatctctctcgatatctattattttccagcgattcttatactgttagaaagataattcaataatccatattttctgtgaagaaacctttccttaattcggagttcttaccagtcaaaagttagtatcttttctcggttaggatatttcattttaagttttgtttcagaaaaagtgtcttcagtaaaaattcaatatctctctc

SEQ ID NO: 135284 - DNA, 1031 bp, Cannabis sativa
  modified_base (621)..(628): a, c, t, g, unknown or other
cacaagatgagtgttggacggagtatcaaaggaaaaacaagcaaatatgccgagcaagagtactcaacagattaaaaaacggctatgtctaaagaaaagtcagaactcaagaagtcacaaaagttttcttgagttagggaaaaaaatttcataaagcttagaataagcaagatggaagagagacacaatccggttcaaagacaagctctatggctgtaaactcgcatgaagacatgataaagaagagttgcagaagtttctaaaccctaaggtttcctaagcatttttctacaacatagttgcattcaaagtgtaaacatgcaaagaaaagcataaagaaaatcggaaacttactcaaagattcgaatgtctaggttcaaacaacgtcaagcaaaccagcagtcgtatgaaggcacttcggcaactttgaagccaaaaaactctctttttgctctggagtttacttcacagcaaagggtgataaaatgagttatgtgtcaatgctatgggtatttataggcaaatcacaaaaagaggtaactgcatcaaaggaacctcggacgcctcagcttcccgcctcaaaaatgaatatgggcaatcaaaagtaatcgagtgcaaccnnnnnnnntggagagagaaaatcagatttcgaaatattaattgtcagagcatttattagctgaaaatcgaagtgacaccaaataaacttcacatcgagtctcaaacggtcatgctcgacacgtgtccccatccaaaggtagagctagctcggaagaagtctacacgcaacctcagaggttcctaacagacttggggggcaaatgtatcccaaattttgcactctgacgtggcatcacgagaatgctgacacgtggagtccacttggagcgtctgctcgggaggatagaccgagcaggatgcctcgctggcacatcctgggtaatatattcaccgatccatgtagagcactcaacacttagcgaattcaactttcgcatcatgagtcatcagctcaatccctacaactcagg

SEQ ID NO: 135285 - DNA, 773 bp, Cannabis sativa
attagaattctcttcttctataataaatttttaaataattaattatttttaaataatattaaatttatttttttataactagaagaactaagtatatgttttctaattgagtttgaagttgcttcattttctgggagagcttgactttgtttttttgactttgatttagttttcggagtaaatgactccttattaaaaaaagatggaggagtttggccttattttttagaaaatacactcaacctattttacttttgactttttaaatatttaaataaaaaaactaaataattaagtgtaatcattttaaattaaagttataagtataataaaattttaattatgaaattatatgtatacaattttaaaatataaaaaattttgctataaaaattttaataatttaagggcaaaaaaattgctaaaagatccttatttaataataaattacaaaaattaattaataattattattaatttaatcttaaaatataactaatcttcagtaaagttttataaggaaataaattattaggtgattattaggttataagttaataatttttatttttatttaatttctaaattaatcacaaccattcaatgataatctaatagctaaaaaaaatgtaaccatgatggttacatatttaatgtaaccattgaacctccttcgtaatgtaacgggacaacgttggattctcatcttgatcgaataaaaggttcctagaatgtttgtcatttttgatgagctgactactctattcaatgga

SEQ ID NO: 135286 - DNA, 1271 bp, Cannabis sativa
  modified_base (33)..(40): a, c, t, g, unknown or other
acttaagaacaaggagaaaggttccttttcttnnnnnnnntacaacagtatctctgaatatgaattcttagataatatctctagggtaaaatctcgacttaactgtttgcggccctctacccagtgaacatgcatcactatttaaagggttgtgaacttgaagaggaagtgtttcccttcttgttacaatggatataagcggaaagattgcatgataaatgcagaatacactgatcgtgggatatggacagattgccatatctctgtaatcttaatccccaagttatagggatttctttaatgactcaatgcgaaagataaattcgctaagtgttggttgctttgtgcggattactgatcgctctgcttcgggcatggctacgaggcatcctgttcagactgtgccctctgagcagatactcaaagttaattccacgtgtcaccatcatgtgatgccacgtcagagtgcaaaaatttggataacatttgccccccaagtctgtacgggacttccgaagttgcgtgtagacttcgttcgagctgcttttgcctttggattgggacacgtgtcgggcgcgtttgtccgagagtcgatttgaagctgattgggcgtcccttcagtttttggctaataaatgctctgacaattaatattttgaaatcagattttctcttaccacggttgacggctgcacttgattatttttgatttcccatatttgcttttaagggggaaccgaggcgtctgaggttcttttgaaatgattacctcttttcgtgacttgcatataaatatcaacaagccttggcacataaactcattttagccatctttctttgctaagtgagttcagagcgaaaagagatgttttgggcttcaagtttgctgaagttccttcattgaaactgctcgttggtaagttttcgatatatgactcttgagtaagttttcgatatcctttatgcttatttttctatgtttacatttcgaatgcaccttcgactatactgtagaaaatacataggaaaccctaggttcgaaaactctgtgattcttctttgtcatggtttcacgcgattttacagtccataatgcttcctttttgaactgcgtaatgcctgtctttcatcttgcttattctaagattcatgaaatttttttccctaagtcgagaaactttcaaacttcctgagttttgacttttcttagaacattctaattctttaatttgttgagtactcctggtcgacatatttgcttgtttatcgtt

SEQ ID NO: 135287 - DNA, 524 bp, Cannabis sativa
aatgtgagaggtatgaataaaaaggataagcaactagctattcttgatgtttttagattgaataaaattagtttcccaactttatttgaaataaagattaaacaggataaagttggtgatagtatggagaataattttcttaattggaatttctattctagtgatgaaattgcttgaagaattctggtgctctggcagaaaagttttgttcatgttaatgtcattgataaagatagctagttgattcatccaaagtaaggttttttgggcaaaagagcaccttctttgtcactgcagtatatggcagcaagtgcttagagactcgaaaagctctttaggaaaagctagctggttttgggaagataaatgagtcgtggatcatctttggtgacttcaatgcaatgtttagcttccaagacagatgtaaagaccgcttagtttaatttggaaattagcagtaaatcacgtttaattatgaaattatttatagctatttaaattattattatactgttattattgaa

SEQ ID NO: 135288 - DNA, 666 bp, Cannabis sativa
  modified_base (205)..(205): a, c, t, g, unknown or other
ggtttcctgggtttttaaccccagtagccgcggccattttatggcagctcattgtatttttttcgggttttgttttggccataacttttgactcgggacttcgtttggaaattcatttatatcgttggaaagctctttctgagctctatttgaatatctataatttaaatgccagttttatattttgtgaaaatggatttagggnttaaccctatacttgtgtatcccgtgattgtgactaggattaccgacacttggttaggagtacccggggatttagaatctccatatttgcgggacatcaggtaagaagttagcacgtagagttatgtgtaatggcacttatatggaatatgatatatatgtatatatgagtaactagaaactaggattagagttattactctaaagtgagcgatttattggcctagggttattatcctagtgaactgttaatatgccatgaaataagtatgtatattgagattatagattgtgcgtttaaatcataaataagctagactcggtaaattagtacctcgagttactcatatataaaatatacaagttaataatttgtatgtatatatgagtagctatatgtatgtatattttacaatcctagtgaataatttgtaacaggtatattttacaatcttctttcat

SEQ ID NO: 135289 - DNA, 500 bp, Cannabis sativa
aatggtcattttgccccaatgatattttgtcctttagtggactaagtgaattgaatatgtgttatatgtggattctttgtggctgaaataaaagttattatttacatttatcaattatattcaaaagttagaaaaaatcaaagaaaatcaaaacagtttcctctctagcctctctctcttttggcctccttgtgtagcaaggatctttggctttttcttggtgattctagctaaattcatcaaggtttttgtgatctctaagtgctggtaaggtttctatacctttccctcttgaatttgttgaaaatgatgaacaagatgagtgttgcatggttgttttgttgtgatacttgctgctgtatgttgttgttaacttctgtagctaaaacattatttaaaatgttgattcaagcatgatagggttggtgattagttggatttatcaagagatgaaaattttactcaaagctatggtttttcaaagtgaaattgtgagtttt

SEQ ID NO: 135290 - DNA, 838 bp, Cannabis sativa
  modified_base (811)..(812): a, c, t, g, unknown or other
aagagaattaagattatacaatatgaataaaataagttggtagtgtattaaagtaaggaatctttaatatggaattaccaagtacgacttactatgcactatactctagcacgtgtgattttgatgcagatcacatatgtggattgacatgtagtaaaggtgttgtatataatttgactatacatgactggaccaatatgtaataatatctttcattaacatgtcatttaccatgaaagagttatttatatcacaatgatgatcattagtagatcatcttgaatcatgagtatgcatgaactcttatttgggttcattgagttctttgattcactcattaaagtttctcagagaagatgattcttgcaacttctattttgagagaataatatgagtggctgagaacatgttatacaataatagaaaccatgcttttcgaaagaatcaaatattagttcctttatagtgttaattctgggagtgctaacagttggattcaaatctatacttagattatagattaactattcacattgaatcaatgccacataaggaatcaagagataattagaaggataacgataattttgaccaactctaattttgaactaataattagaggacgaactacttatattgattatatcaatggattataagtaagaattctataaatataattttatattgtcaaaagtgaaattttcatatttatattggagtattaatagaattaataaacctaattattctattgaagagttcaataataatcaagtgttttgttgacatcgcttttagccaacgacanngagtcttttttataagcgataaacga

SEQ ID NO: 135291 - DNA, 629 bp, Cannabis sativa
tttttgacgtggtgaacagagtcacacaagattaacaaagcagcaaactacagtcggcggtggaacctcctcggaccaggatagcttattgtctaaccgaaatgcatgctttgccaaaccatgagctgcggaaatctaatcgcgagccacataggacaaaactgtctccgaaaatttagacaataaagctataacaacttcaaacagagcctcatcccattgaaatacaccttcgcataaataatacttgtcaccaaatctggaaaaatatcacaacaccaaaccaaaaaacaaaattatattagaatgacaatcttcaaaaaataaataaataaatttaaaaagcaaccttagaaattaacgcataactacatatcactagctcaacaatattaaaaactaaagaccaacaaaattctaagtataactagccaaaggtaaaacctttggctagtaataacatactaccaccttaatttaaaattacgtaaaatcaatattatacagattatatttaaaattaaacttatcggtgaattgtcagtaattgaagtctttctacaaaataacagaaaaataaaattatattaccacacaatataaacgatggtaaatcaatccaaaataaa

SEQ ID NO: 135292 - DNA, 1039 bp, Cannabis sativa
ttaatttttcactatagtatttatgcttatgattgcagaatatagtttttatatgctattgcatatcgtagaaaaaaaaaaatttaaaagtatattagtttaagtttatggtatattcatattggtctaaggtatattgtttgtatgtgatatgatatatcgtgaagtatagaaagaaaagaaaaactattaaatattaattgaaatttttagtttcttttatatatttatttgactatagaattgttgtggtatattcatattactctaaggtataatatttatatgttatattatatatcatgaaggaaagaaataaaaaataaaattaaaagaatacatatcagtaaaaaaaaataaaaaaatgacataataactcatattactctaaggtataatatttgtatgttatattcatattactctaaggtatttttatataatatcttttatataatgaaagatattttaggtattaaaaagtaaaaaaggacatttgtttaattagtttaaaaaagagacattaactatcactaaagttagaaatagggttatttactaacatttctcatgataaaattatattttaaaacttttgtcttcaatacaaaattaaagacgttattttcaaattatagcctcattttgggtcatctatttagatgattttgtagagtaaaaatcactttatggttatctcgtaaggtaatttgaaaattatatatatttgataggaaagccaaattaagatgctaattattggtagttaactttgtatatatacaatattaattgagagattatttgtgtattttttattttaagtttgtcttattattttttttatatagtcgaaaatagttttaaaggttttgttataattttgtacgagttcacaaatttagttatgatttttcatacggttaaaactagtttcacagggtttgaaattgatttttacacttataatttattttttagattttttgttgtgcattgtgtattgttttgattatatttttttgtgtgtgtgtgtttt

SEQ ID NO: 135293 - DNA, 922 bp, Cannabis sativa
  modified_base (376)..(377): a, c, t, g, unknown or other
tggagttaaagcaatgcttgattaccgctccagtactaactcttccttcagataaggaaaagtttgtggtgtattgtgatgcctcgagatagggtcttggatgtgtgcttatgcaaactggaaaggtaatagcttatgcttctcgacagttaaaggtgtacgaatagaggtaccctactcacgatctagaactcgtagcagtggtatttgcactaaagatttggtggtactatctatatggggagaaatgtgagatatacactgatcacaagagtctgaaatatttctttacctagaaggacttgaatatgagacagagacgttggctagagttgatgaaggattatgactgtgagatcctttatcatcctggtanngccaatgtagttgctgatgccttgagtagaaaagatcagagtcggttgagcattgtgaagcgaatctctcaacaactagcaaatgagatgactcgagctaaaattgagttagttgtggggtcgttggctaatattgccctgcaatccactcttttagagcgaatcaaagaagtacaaatgcaagatccagaattagtaaaaacccgagctagggtttcggctgggaaggctagtgatttctcagtggataaaacgggaatgttgagattcgggaatcgagtttgtgtgcctatggatgagagcatcaagaaagagatcatgaatgagtctcatacgtctccttattcagttcatccagggtcattgaagatgtataaagacctgaaagtcatgttttggtggccaggtatgaagaacgacattgctgagtatgttgcaaagtgccttacttgtcaacaagttaaggctgaacatcagcaactggcagggttgctgcagccactgaacttaccagagtggaaatgggaggacattgctatggactt

SEQ ID NO: 135294 - DNA, 509 bp, Cannabis sativa
ccaaaggaaacccattcaaagatccaagcattttgcaacatcaaccttaaaaccacccacacacccaaattatcacagaatgcacaaataacacatatctataacataaatcaaactccagaaacttgtttttgacatgtttcaaaattaggaatccgaggatccgaaacaacacctgcatcatttctaacctatttttaaaactgtaatcatgatctagaaactggtttttcatatgagaattattttgaaacctcaaacctcaaaaccacccatacacaccaaaaaccagttcctataaataaaacaaagattataactgctcaaacacaacaataatttcttcatgcaaaataaaatccctacaagtttataattgatacaatattttcaacagaaattacatggcttttcagattacacaataaacccacaatttattacagcacattgactctaaaacccgaaattactaaatcatcaaaaaaaatcatacccaaaaaccagtt

SEQ ID NO: 135295 - DNA, 918 bp, Cannabis sativa
gggcataaaacccaacaggtttgtcttcaatgtggttcgactgaggctcttgtactggcttcgggttgccttttgaaatgcttttttctttgcccgtgcactcaactacaaagtctaataaagcctgtcctttgattgttgtttagggttgaaagattatttcgtattgacctaattccactgcccatttgagtaaccgtccagaagcgttgggtttttgtaatacttggcatagtggttggtcggtgtatacccgaacaggatgagcttgaaagtaaggccttaactttcttgttgctaagattaggcagtaagtaagcttttttattagtagatatcgtctttcagcttcaacgagtcttttgctgatgtaatagactggatgctggaattgttttcttccctgatcagcacgacactcacagcaagttttgtaatagctaggtatattcctaatttttctccgtccagaggttttgagagtacatgaggttttgcaagttgtctttttagttcttaaaaggcattcttgcattcctctgtccattcaaatttcttatttcctcgaaggatgttgaagaaaggaacacgcttgtctgttgatttggaaacaaatctactggtgcgtctatcggaccagttaagctttggacctctttagtttttgttggcaatttcctatctaggagggcttgaattttcaatagattggctttgatacctcgggcattgataataaaaccaagaaacttaccttagctgactccaaatgagcactttaagggattgagtttcatgttgtatttttttgaagattttaaagcattcgtccaggtcatctatatgccccccagccttcctggatttgacgagaatgtcatccacatatacttccatatttcgtccgatctgatcttt

SEQ ID NO: 135296 - DNA, 879 bp, Cannabis sativa
  modified_base (436)..(458): a, c, t, g, unknown or other
  modified_base (514)..(537): a, c, t, g, unknown or other
  modified_base (622)..(631): a, c, t, g, unknown or other
  modified_base (659)..(665): a, c, t, g, unknown or other
cacgacgctcttccgatctgtactcgtgtataagagccattcattccgtgggtgcaagggcccaatggaggcttgaagcgaggacgttacaaattatccatgaaattgttggatttgataacatcccacgaaaaataagtgcggttaatatttgaaaatcacacagttgtgattggtccgcttttactgggtcaatgtaaacgtgtattaaatacattgaaaatcgtatcgttctgggacatctttttgggaacatagcaacaataaccctggtagcgagctagagctttttctacatctttccaaggttaataatgtaagtcttgtcgcttctgcgcttgaagacataatgctccatttgacaactgtagttcttgacgacaaggtgaacttcaatgaccaacatcatttgaatgtctaattaataaatatattnnnnnnnnnnnnnnnnnnnnnnntaatttttagttattaaataataagaattgccaaattggaaaattggcatttttgnnnnnnnnnnnnnnnnnnnnnnnnaaatggcaaaattgcaaagtgggacccaatccaatacccatggccggccacttagtgtagtttttaccatttatttttctattannnnnnnnnnaattaaatctaacctaaacctaggtggnnnnnnntaaataggtagtgatggcttaaggaaaaagatgatgatacatcacattccttcagtaaaattttaagcctccttcctatagcaaaaaccgaaaccacactaagtgaacaatccaatcaataagaaggagaatcgggctcaagaaggcgagaaagagatccaggtttagatcttcataatgctctgctacggaaaggaattaagggctagagatc

SEQ ID NO: 135297 - DNA, 539 bp, Cannabis sativa
gggaactggggcataacaagagaacatgcagcagaaggcgtagaagggaataaaaacaacaacagaacaacagtggaaaaacaaaaaaaaaacgacacatacatttgagaatgagatattgatgaatttaaatttctgaaatacatagagattaaagtttttatttgaaaaacattgattacattgggatttgatgatactttaaattggttattaaaagaaatttgatactaaattgaatatatacatatatatatatgaagtttattactgaaacagtttgttttttattaatgaaatgcatatttgtattcaaaaaagttaataacattactgaattgttattaagcacttgaaaaagtatcttaacaactgggaaaaaaaaacagaaacaaaatacataaaaagatgagatgtgaaatgaaaagactaacaaatttaacgtaacaacttgtttatacataaaaaaaagaaaaaaaaaacatacataaataacgattacatattttccacaaaaaacttaaaaacataaaagaaca

SEQ ID NO: 135298 - DNA, 529 bp, Cannabis sativa
  modified_base (484)..(485): a, c, t, g, unknown or other
tcacgtaatacgcctatggtagttagggtgttacacacaggcttcagaaagtccgtgtcccagtttcctcggacaaggctagtctgaagccgcgtgaatgctgagtgaagctcctcgtgcgcgtgcacatgtgcaacctagtttcacatattttttgtccaaattcttaaaatcataactaaatcataaaatatccaaattgagttctgtaaaagcctaaattcattaattttttgtctactttcctgtaaaatattttcagaacaaaaaacaatatattttacaacataaattgtgatttccatacaatcatcaaatatgcacacaaaccattatgaaaccatccaaattaacacaaacatcattttagatcaatatttcgagaaagtatatcattaccttggctctgaggccagttgtcgaattataattttaccaggatctagatttactaccatgtaggttatttaacatcctaaatatnnatttctaaaacaatgtaatttaacacacatataaagtttaagaa

SEQ ID NO: 135299 - DNA, 508 bp, Cannabis sativa
tagactgttaaaaactctatttttcggcatgttaaacttttccgaattttttaaaattttgctggatatcttaaataactacaacgtatatgactattaaaaaaatagagtaaaaaaaatctcttgaatactaaaacaaataggaaatatatcggtgtaccaatttaattatgggtgcactataatttttttttaataatataaataataaaaagaatactttatttttttctatctaacaaataataataaagaatatttttgagtgtattttttagtattatggttagaacaaaaagagaatataatattatattgaggttttttttttatttttacactttaaagaatttttttggtatttttattgaaatctatatagcaactcacataacaacttaaatcgcaaccaaaatgtacatagcaactcatataaaaatcaccggagtaaccactaaaataacctaacctgtaaatttgaaaaaaaaaaaattaaaaattggcatat

SEQ ID NO: 135300 - DNA, 1578 bp, Cannabis sativa
gctcattaacgcccgaaccatgtaaaaactcttctctaattttcttacagctctataatcttataatattttattggttgccgaaaacttcggtcaacaagtaaaaatgtcaattttgatctttaataattttaactatttaaataatttatattaaacttgcaaaatataaaaataagaaaaatgataaaataataatgaaaaatcaatttgttgaaatagatatgttttgtattctaaaattgatataataaaaaagtaacaaaacaatttttttaaaaaaattatgataaaaaatgctcaaatgtatagtaatgtaagtgtgtcaccttttacaaataaattttttaacttttgaacaaattaaaattaaagagaaaacatttcagttgtaataaaatattttttacttgaacaaataacaatataaaaatcaagaatattaaaataaactgttaaactaaattaatttcctaaatatatgtaaaattaaaaaatagtataaacaatttaattattaaaagataaataacttattgaataagacattaatcaatcactcataaaataaaaaatatttcttagacaaaaaaaaaaaaagtaaaataataaaaatactatttataacctacatggataatacttaaaatgtctctaaacaatgtgagacttttagcttctatatgtaatttatttttcaaataaaataagagaatgtgtcacaaaataggaagaaaaaaaatagaatgctacctaaacttttattgtgcattcctttatatatataatttgatttagtttcccattcttttagttatactttttgtataaatagaagttcaccctattcgaataaatgagaaattctcatttagtttctctttctctcttcttcttcttctttttttctccttatatattttatattattctatattattttaggataatgcttcagtagaggtattaaaaacgactttatgtagaatcattttttttaatacgtgttattattttattttatgtccattaaatattatttacttatttttttaattttacatatatataattatatgttaaaaatactattattttctttttaaaaaaactatcattcacttctctttttttcttctccctctctctctaaaagttcttaaaagttgtttatcaaagaatataaactataaacaaaattaagagctttgattattttttttaaaagaaaaatagaaaatgagattcagaaattctctaatggcgaagtcaaagaacaatgcaatttttctttttgtacatatctctcttcttagatctatccacacaaaaaataatttttaggttgatatgagtgtttttgacaaataattataaaaaaataaataaggaaataaaattaaatatggacataaaataaaagaatgacacctattaaaaaaataactctacataaattcattttcaatacatctattcaggctcgaccctaggcataggcgagctaggcctgtgcttagggcccacctagcccaggggcctaattttttttttcctttttaaaattacatatttttt

SEQ ID NO: 135301 - DNA, 828 bp, Cannabis sativa
ttaactgttggatcaatattgtgtttttcgagatgaaatctaagcccttaattggtgagcactccttaactgttgcaatcccccacgcgatttggggttttgggtaaaaaattaaaattgagtctttcataaaaaaaattaaaaaatactccataaattctcaaataggtaagaattttagaatatgtgtattggtaccacaaaatttattaatttttttgtcttgaatttttagcgattatttcacaaatacacaaaaacagcaaaaaaaattacaaaaatgcggtttcattgaattttaaacattttcatgatttttttttattttatttacagaaaatacagtatttttatgttgtactcatgttaattttttgttatctgtatgttattttgatgttatttagatgttattttcatgttacttttgtatagttttcttgttattttcgtgttgtttctatgaaaaactgtaaaaatgtaaaaaaaaaattttaaaaaaaaaaattttaaacataaaatattaaacataaaatataattttttttttttttataaaatatggtgccttatataattattttgtttaagtacatatttatttttatataaacatttattatgtatacatacatagataaaatggatgataaagaaagggaaatttgaaaaactatactttaaaaactctaatattttatttttaaaccaatacatttcaaaataaaaacatatatgatccttttataaaaaacccaagaataaccctcaacccaaccgaaccctcaaccccctcaccacatagtacgagccgacccagccccctca

SEQ ID NO: 135302 - DNA, 961 bp, Cannabis sativa
  modified_base (129)..(135): a, c, t, g, unknown or other
  modified_base (919)..(926): a, c, t, g, unknown or other
aggaaaagtacataacataaataactacgttattactcgctagttgtaagaaattaggttacataacacattcatataaacttttcaattataactgacaaacaaaaccaaacataaataacacattcnnnnnnngaaaagtcattccaattctaccaacattctaattaactaaacactatcctagttagttaattacaacttttacaacttaaacaactgaataacatgaaccaaactaaaacaagaatttgagtaattgataaattaatatgaattaattgtgagaaacctagttagttacattgtgtaattagtaactaaaactcatctcatttttggctggaaaaaattagcaaatagaaaaaagtaaaaggaaaaattgaaatgaaatagattggtaatttagtttttggtatggtatggtaggactattctcatatttgatattacattatttctttgtatttattttagctattttttaataaataaataatagtattggataataatgatgacaaaaaaatagggaaaagttgaagaagattgggaaggttctaacttttcttggtttgaaagaaaaagaaagaaagaagaagtatttatgataataataaataataatgttgtgtttgcacatgtgattttgtgggagatgagtacggagtgtgtactattagtgtggctttggtttagttttgtttttggttcctatttatgagtttatgagttatgataggcacttattccaatgtggatatttctgtgaatttcatacaactactcctctcatctctcataaacattaatcttcaaccttactccctcaattggcacctgttaaaaattatgttaaatttagtataagatgtagtataaggagaatctcaattgactcaaaacatgttcgtgttannnnnnnnattatcaatgtcaatgttcatatttgaaaggttct

SEQ ID NO: 135303 - DNA, 521 bp, Cannabis sativa
atatgaaatctaaatttcaatttttgacctgctagcagcttggccagttcttcctcaatattttttcccttgtactttcccctaactcattttttctgataactacttgaacctgcattacccattctacaaatacaagctacgaataattaattaatcttactattgacgaaagaggcatgtatttcattaaatcaacagtggcatctatattacaatcattgaaagtctacaagtcatcataatcatcatcatcatcatcattgacatctacattattttcattatcactatcactagtgtcttcatcatcattataaacaatgaagccatctaaatcttcacggttagactgctcatgacgacccatgttaccgggcacttgaattgggtcaacatcatcacgaacatattatacatcatccaactgtggaagttgaacgactaaagaaattcctgaagagtttctttcttgtatagttgttgtctcatcatcatcctcatccaaaaagtcccagaca

SEQ ID NO: 135304 - DNA, 1058 bp, Cannabis sativa
acagttggtatcagagcggattatatatctatgctttgatttattttgaattatatatatacgtatacgatcggttcttagtttatgtattttatatatatgtattcgtattcatccgatcatatatatatttatttacgtatatatatattcatattcataatatatacttttatatatatttagattcataatgtatataattatatatatacgtacgggttcttcatttataatataaattatatatatttatattcataatatatatacttttatattatataatcccgattatatatattcatacttaatttatttttatatatacatatatatacacatttatattcaaattcatatatatacattcatatatacttacatatattcatatacataaaatttattcatatatattcatatgtatatatatacacctttcatatatgtatttatatatgattatatatatttttgttatatatatatattttaattttacattggattgataattttatgtgatatatattgtatacgtatatatataaacataaagttttaagttccgtttttcattataagaatttttttttttggtgtttatttcgaatctttattacaatatcacattcatataatattatagagtgatttcgtgcatgaatatgatttgaattaacatcaaaatatgaagaaaaaaaattttgaagaacacgtttggaccaatccattttcattgaaattaaaatcgactttttacgtgatttagatgcataaaacccacacggatctctttatttttcatttggatcattttggaattaaaaacacgtaatttgatcgtcaaaattctcttttccggtcgggtttgggtcgggtccgtcagcccatgtggctgaaaatgggtcaaaattgactcggctggaggttgaagatacagccaaatgacatgtcgtttttccttgtggaaaacagcgtgtcgtttttaatggtttgtggcagccttcattgctccaaacgacgtgtcgtttttcgttgttgtgggtagcctt

SEQ ID NO: 135305 - DNA, 638 bp, Cannabis sativa
taacattaattttttcttagagataaactctataccgcgttggtccacaatccccatcatgtacttctgacaaaagtcgcgcagcttgttcttgtgtgacacacctgagtaggggcatggagaatcctcttctatacataactccctctataatgatgtaccgtgcatccttactcctcattttccaagcttcatttctgttatctgggagctccccagtgttaaggtaggctgctattggtgtcatccagtttggagatgtatcaatcatttcaatctcttccgtgccggtgatgctaggtttttcgagaaactggataggaatcagatttgccttatcattaacgttgctacttgcaagtcgagctaatgcatcagcagtcgtgttttcttcccttggaattcgcttgagagcatagcttttgaattgtgcgagcagatcgtgtattttgctcagttatgctatcatcttctcccctcgagcctcatactctccggatacatgatttaccactaactgagagtcactatagatctcaatgtgttcggctttcatttcccgggctagttttaggttgacgattagagcttcatattcagcttcattattggatgccttaaatccaaatttgatcgca

SEQ ID NO: 135306 - DNA, 516 bp, Cannabis sativa
tggtattgatttgtattaattgatcgtgtaaagttataatatattttcaatacattcgaccccaacaccaactacgggtctgggttcaggtcgggatcccgtatttgggtctgggtccctggtcttggtcttggtgcgggtttgggtcccgagtccctggtctaggtgtcgggtccgagtctaggtccgagtttgggtctaggtccgggtttgggttcgggtccgagtccagggtctaggtgtggggtccggatttgggtcacgggtttgggtccgagtccgggtttgggtcctggttcgggtctgagtccgggttcgggttcgggtctgggtctgggtttgggtctgggtctgggtctgggtctaggtttgggtccaggtcccggtgcatgttcgagtcggagattggtattgaccctaaatcctttgaaaatattataatacaagctaatacggaccatttgttatatattaaataatacaacatacattgtattaaaaaatttggtcgtaata

SEQ ID NO: 135307 - DNA, 533 bp, Cannabis sativa
tatttagggcataaaaccaaccaggaagctctagcgcctctcctccggccaagaagcttaagggcggtgaggggcctcatagaagagaccttctagagaggttattgacctttctgatgagctgactgctgcaaacccttctacccccaaatctgccaagtccaaggagtctggaccaccaacgaatgggtctgaactggtcaggagcattcctgagcgggtgcaggcaccaactccacctgtgcccgtaatgccagaggccaaaaagggaaaggagatgctggcccactatatgaactggctggttcttgaagtcagtgagcaactggctggtgctaatagtaactcatctttggatgtgttggtgggcggagtcctgaaggagctcaccagggtaagtcttttttaatactttccttctaactttcatcacttagctccatgtgctgaccttttcctttatgcaagcctgtttgaagttggcttatacttactcccgggctaaatctgctacttccaagagtgcggctctg

SEQ ID NO: 135308 - DNA, 894 bp, Cannabis sativa
  modified_base (845)..(845): a, c, t, g, unknown or other
taaaaatataaagttcaaattagtatgtttcttttatagtagttgatttgaactttgaattcaatatatatatttgtctcattcatgcaattagctaaaatatagtaatataaaaaaattaaaaaaaaaaagcattagtggtcggtttggacggggtataacccgaccaaatcaaccaatttcatttgacgggttactattttcttttttcttaattggatgagttgcacttagacttttgtaactcgatttttacattaggttgaataaaatgtattataaaccaactaaatcgatcgatgtctaaccctaatgggtacgggtctgagtgcggggtctaggcccgaaacctgattgggtcttgttcttaaaatattgaagtattttttaaaaaataaaaataaaaattatttttagaaaatattaactaaacacgacttgtattttgaaaattttaaaattgtttcttattctcattttttaaaatatttttttaaaacaaaatataaaaaatatattttttcgtaatattcagtattatatgtcaaattatataaaatattatttataaataatattataagaatcaataatatttaataaagctccctacaaaaaaaagtataattaatgaagttaaaacaaattttattagattgagttttggaaaaatgaattaaaaatataaattaatttataaaatgtatttgtatttactttacatacattttaaaaacatttcatcatatatatatataatgtgattatgtaacagaattattaacttaacggtgttttttaattttctacgttaactttaacagaatatctcaattacttaacanaatattatttattaattttataattttattatatatatttaaaataaaa

SEQ ID NO: 135309 - DNA, 1087 bp, Cannabis sativa
aaccagtaaatacaaactcattcgcctacttatatacactcctctaactcattcgaaccagtaaatacaaactcattcgaaccagtaaatacaaactctaactgcatacctccacagctctaacgcgacgatcaccaatatgagtcgatcttcattctctgatttaaagagaagtctaagcatgactagagcttcattttctgatctaaggaggaggactctaagtacaaggaggtcatccttttctgatgatgtaccaacaactgtaagtacaaggaggtcgtccttctccgatgtaccaacaaggaggtcgtctttctccgatatgccaagatctcaaagtatgagatatgcagcgacatcaccaaagtttactgatgttcaaaggccaagaggccaaaagaagaaaggcgctctaaaagaaatgaaaggagctcttaataagatcttcaaaggtctttttaagagtaaaaaaaaacacctttccgagaatgcggagatgggaattccaagagcgcccgcaaattcagaggcaagtgatcacgatcctatccccgataatataacggaagaagaagagagtttcgttacacctaggaatagctttgaatttgttattcctaggaatcttgagattgaagagcatccattttggaaaaaaatgtaataataaatatattttttattataatatatatatatttatgttgtttctgttattataataaattttattaatatatatatatttatgtttcttttttttttttgctttctgaaacagtgttcatttatgcattatcaataaacaataaagatttaagatttatttattatttattttggtttttggttctaattctaattcctttttaattttttttttttttgtgattttcttgcaaatttggtggagccgctaaaaagaagaaatgataattctttgttcaagttatatgtgggttaccattacaatccaagttcttttgaaatgagatagactttattttgaatatttatctattaaagtgatgttaactctagaaattataaaatgcagcctttatgtttggttttatatttgtgt

SEQ ID NO: 135310 - DNA, 1268 bp, Cannabis sativa
ttcagttgataaaatatgtcaaattatagcttgacccaaaatgttatatttttctccccttatcgtattgataaacaatgagaatagagagtagacagtgagtgaaatagagccataagaagagtgttgctagtatttctaatcatgtatactgtttaagtgttgtaattaactaattatcaagttgttaagacatacatatatttatctttaaaaaaaggactcagaaattttgtatagattgtgcaactaattgcattgttaggaacttgttttgaatgtgatgatcatgataatcaatattgggatcaagacccacgagtttttgttttttcttctcagagttatataattttgcttgtattattgttttgtttattttttttgggaattttgttagaatgttttttttttatttgagaatggaaatgggttaaatatgtattggtgtattcactttataagtttgattttcccattttgaaatgttttggactattttgtttgtgtgttgtagttgtggtagaatgtatatacgttttagtttatagtcaaaaaagtgcttttttagtgttatttctgttatagtttagttttacagaatctttatgttgctttttatttgggatttttgggtgttttatttctagtagaatgtatatacgtgttagtttatagtcaaaaaaatgcttctttagtgttatttttgttatagtttagtttacagtatctttatgttgatttatgtgtttatttatttttgtaggagtgggagcaatattttaaacctgagagtcgtgttaagggtaagatgattttcttccctaatacattggagaacaaagtgattgcaaatatcaatgctaagttgagccctgaacaaattaggctttttcgtaaatcatgttttggtcatttgttagacatgaaaccaattttatatcaacctcagttaatacataatgctctgcttagggaggtacatcaaaaaaatgagaaggagatgtggtttaagtttgggtgtgaaaattttaggtttagtttggctgagtttgcggtcataactggtttactgtgtaatggtgataatgatatgaaaaagtatgcaaaaagggagaatgcatttgttgataagtattttttcgagcagcaagtcactcatggtgcggttgaacaaagatttatgtttagtgagttcaagagtgatgagtatgctgttaaaatggcaattttgtaccttcttaccaatgggttgatttgtagtcctg

SEQ ID NO: 135311 - DNA, 1175 bp, Cannabis sativa
aagatgtgaaatatggtgggaatttttttacttggaataatagacaacaaggagatgatagaatatactctaagattgatagagttatggcaaatcctagttggctgaatctatacccgattgctgaggcactatttttgcaggagggactcttcgatcacacccctgtaatattgacggtttacccatcacttccaagtggtaggaaaccgtttaaatattttcgaatgtggtcgagttctcctaattaccaaaggcaagttggggatagttggaagggatcggttgtgggaactaaaatgtatcaactagtcactaaactgaagcgtctcaaaccagttttggcagcaattaacaagtctggttttgctgatatacagggagaagaaatgagggtgaaggagctattgattgagtgtcaacaaagactgaacctggacccgttgaatgaaacattaatgcagcaagagaaagcagttcgtgagcagtacgctgggaaacataaagcactaatctcttttctgcaacaaaaatccaaggccatttggatgaaaaatggggattccaacacatcagttttccattcgagtatcaaggaccgaacaaggcaaaatagaattctatccattgtcaatgctcaaggtgaaagagtagatgaacaagagaagattactcaggctttcctagattactacaaagatctattggggacaagcatggtaggcaggacgaaggttaaaaattcagtcatgaaggagggtccattgataacacctacacatgttgcaaacttgatggcagatttttccaatgaggaaataaaagaagctatgtttagtattccaggggtgaagagtccggggccagatggttctgggagttacttttttcaagataactgggatctggttgggggtgaaacttgtgaagcaatagcctccttcttgaagtcaggtaatctgctaaaagaaattaactcaactgtcattaccttgattcctaaaattaaatgcccgaatatggtgagtgattttcggcctatatcttgttgtaatgtgctatataaggtggctaccaagttgatttgttctagacttaaacacatcttgcctgaattagtctctctaaaccagggaggatttattaaaggcaggtatatagctcataacatcatg

SEQ ID NO: 135312 - DNA, 1008 bp, Cannabis sativa
aggaatgtctccaatttccatcttctgaaacttctctaggaagttctttaatcttttcagctttgccaaaattttatgtagccccattctagagatccttttattcaaattcaagagaacttaagacttatagtttgactggtccatccaataattgaaaaatatgaaaggtttgacacccatcttcctcaaatccaaatttttgataacatattaacaatggtcagagcacgtgtcccactgaaaaagtgcttatgtgttgggaaaatgatccacccaactctcatttttaaaggccttattgtgtttcgaataaatttgaactcatggatcatgtttattagaccatgtgtacgtaatttgttgcataacacatcagatgattaacttgacccaatgtgagacaattttgagcatctaaaactacagaaccagacaccaactgcccacctgatctatcatttgtatggaacataacattgaaatctcacaaaatgagccaagggagattcaaatgaccaaagttaattctcatgctaaatgagataaatttttaactaattaaagaaaagagacaaacatgcttctttagctaccttgtttaaataaaggataaggataagataaaattcagtatgttgcatgtcgaacactattaaaaaaattacaaaagatattagatatggaatcatctatgacttttacaaaaagaattaaaataagtttaaagtgttccaagtatgtcattaggcatatctaatgaaattaattttctcactatggtttgttttgtaaatgatttaatttattgtacctaactatacttaataagtaaatttttatgaaatttcttatgtaagtatataactatggaaggttatctatgaaactaaaacccaagtgataatgaaagattcatctttaggggcgaaagtgaaacatatacagatgaggctagctataaggatattcaactatgattaaagactagttattttggatttggaa

SEQ ID NO: 135313 - DNA, 1109 bp, Cannabis sativa
cccacatatagtgatctaaatagtattatctctcggtatcaatactactaaaagaggagtaggtcattacccgctaactaagggggctgaatctctataaaattctgtgttcttttacactctagttcttatgtgtaacacatggcaagcatcaacattaatacgactccgctgtcggttggccaaatctgaggtcaacagtttggtactttcattcagagcgagttgatatcatatctaatcaaacgtcatggttaacatgaggagaactccgactacaccgtctgcatcattagatctccctcaagatcctttgactatagatcttgatgtccatgtttcagtcacgactagaatttccatgaacgctgcagatgtggtcaatcctaccaacttggtaggcaccacaaatctggccactacagctggctagggtgacacaaacatcctggtggatctgaacaatcagcccttgtctccaagggaggaccctccactagcacctcccactgaaggaaggacctatggggaactgcccctaggaaatgaccttgtcctcgatactatgctggagagacatgaccaagaataggcaagtctgctgttagcaagccccatgtagacttgggagaagatctcgagttagccaggcttagagagaccttctgccaagccgaccaaactgaagagccatgcgctgctgattacaatgcattcgcttaatagagaagtaaattcttgagatggatggatgactaagagtacatcctccgattctcaccaagcagagcttgattgctgcaacagagaagccagtgacctgatacggtggttcaatcaaagaattactaggagaggctaggatctcatcaaagatccactctaagaaagactagttgttccgtgcggctgtgttgctgctttgaacgatcgaggattgttgtttttcattgttttgttccgtgcggctgaaagtttagaggaggtggtatttttgtaaatatttgtttgtggtctgtataattgttcaaagggccaacccagagtatttttgtattttttttgtatttttttgtattttactgtttttttcccaagaaaaaaaaaaa

SEQ ID NO: 135314 - DNA, 1023 bp, Cannabis sativa
  modified_base (371)..(382): a, c, t, g, unknown or other
ctaatggcccctaactctcacaccaggcccaaaggagaggaatttaacaattaaataaataaatattattcattgaataagcccaatacaaattgtgctaaatgaaactatgttatgttatttttattctagcaacctagtccatttaattaattaaacttaaatgggctttctatatgcatctaagcccaaaagcaaacatataggctcacacacaggtcaaacgatttggatgggccctaccatgtttctaggtttacacatatgaaagaaattaccaaatttacttgtttcaaattatttataagatctattgataattggactatgattaaaatcaaatcattagatttgtcaacaagttaatcatnnnnnnnnnnnncaaataaataataggtttgtaaataaaatttaaataaataaatcaacaaacataacaaacatgtaacagataactggaaagtaggtaaagatatttctattttaaaatatctctcaactagatttgacatttaggttgttagaaaaaaaatttaaagaaatatttaaattttaactaatgtcctaaatatcctaaattctaactgaaattcaaatataaaactaattttcaaatttgtagtttattttaaaaatataaattaattaactatctaataagataatataatatcttaatttaaaatttagatatttttaatattatatttctaatcatataatttaataaattatgtatagcaaaataaacaatttgaaaaataagatatttgatggttagcatattgttatcccaatttttgcactctgacgtggcatcatatgatggtgacacgtggaatcaactttgagtatatgctcagaaagtacagtccgaacaggatgcctcataggcatgcctggagcaaagtcatcagcaatccgcgcagagcgatcaacccatagtgaattcagctttcgcatcatgagtcatcaaagaaatccctataacttggggatcagatcacagagatatggcaagct

SEQ ID NO: 135315 - DNA, 629 bp, Cannabis sativa
tttagagcattactttattttcagccccaagatcttcatgttcgtatctttggccataagccctctattttttttaacactactagtatttgatcatattgcttttttatcatggattgtgtgaccgaccaggcggtctttaaccctggctatcttcttatggccttgacaagtaagggtatggatttactttgccaagccgaagtacgcatacacgacttagaggtaggtttagtagcttatactaagtgttaaaatttttctgcataagttctttatgctagttcaatgtgttgtacagtatggatgcccccaagtgaccatgcagacaagtctcttggtcacttgttattcactaagtttcacagactttgcatgggtactctcttgcaagggtaccatagtacgcatgtggaactaagagaataactttgaaaagttaatctgtgagcatgttgttcatagacaaaataaacagaatacaaatattgcaattattcattaattggtctttgttgctatacaacttagataaattgaatcaacaagcctatactacacaaatttagcttctagatgtcaagtggctacccctgcttgcctactgaagtagaggccactattgaaga

SEQ ID NO: 135316 - DNA, 1129 bp, Cannabis sativa
  modified_base (182)..(186): a, c, t, g, unknown or other
  modified_base (686)..(694): a, c, t, g, unknown or other
  modified_base (924)..(924): a, c, t, g, unknown or other
acaatcagtacatttcaattaatcctaaattcaatttgtgcttttcaaatgtagttccagccaaaactttggtgaatggatcagctaagctatcttcaatgtccacattctccaccagtacatcccctctttccacatattctctgatgatgtgatattttctctctatgtgtttgcttctnnnnnggcttcgaggctctttactgttgggtatggctctagtgttatcacaaagtaaaactagtggtttttctattccaggaacaaaaccaagtcctgtgaagaactttctaagccagacaagttccttagcagcctctgcgacagctatgtattcgacctccgtggtagagggtgacgttgcagtttttttagcacttctccaaacaactgctttacccccaagagtaaacaccatcccagatgtagattttctgtcatcaagagaagcctgaaaatctgaatcggtatagcctatgggattcaaagcaccacccttatagactaacacaaatttcctcgtacttttcaagtacttcagaatatggttaattgcatttcaatgttcctctcctggatttgtcttatacctgctcacagttcctactgcatagcaaatgtcagatctagtgcataacattgcatacattagacttccaagtgctgaagcataaggaacccttctnnnnnnnnntatctcttgaggattagtgggacgctgttccttagatagacagataccaaatctagaaggtatttgcgcccctttggtgtttttcattgagaatctctctaaaaccttatcaatgtaggctatttgagagagaccaagggattcgttctttcagtttttgataatcttaaaccgaagaacataagaagcttcacccaaatccttcatttcgaattgagtgtcaagccatnccttgatgtgagtcattttcttaatattgttactaatgatcaaaatgtcatcaacataaaggatcaggaatactaccacttgattatccttgagttggtaaacacaaggttcattttcattttggttaaggctgtaggtcttgattatttcattaaacctcttattccaggagccagaagcttgcttaagtccataaatggacct

SEQ ID NO: 135317 - DNA, 977 bp, Cannabis sativa
aaaaaaaaaaaaaaaaaaaaaaaaaaagctttaaaaggtaaaaaagaaaaaactaaaaaaaaaaaaaaattaacaagagttttgttcttaattttagtgttttttttttttttttgaaatctaattttagtgttgaaagaaaatggactttgtaatggtgggggttttttgttttctagttagtatgaaatttggacaggaatatagtattatagagatctttaaagccgtctgaactattgatcatttcatttataataataaacgtaatatttgattttactttcttgttaaactatgatgatcatttcttttttaactttaatataagaacttcacctttagaagctccgtggatggatatacattatggggaattctacagaggacacactatttttacctcatgctattggaaaagaaactaaaccagtcaaaagttaaaacaattatttgtacattaattttgtttgagcattggacggaattatttcatttgttgaaattatatttttttgtttttctcattaaatgatattatattattagctttattcggaatgcactgatgtttgtggaagtggagaggaatgtgagagtttgttgggctcaggttgtttattgggcttttgggccacttaagaatttttatacagaaagcaccatttttttaaaaaaaattacaatactaaataatttttttttttttttattattttttttttttacatttgtatggttttctatagaaataacatacaacaacaaaactacataaaacttacaagaaaataacatcaccacaataaaaaataacatacagataacaaaaaactaacaacaaattaacaagagtacaatataaaaagaccgtatttttttcaaaataaaatgataaaaatcgtaaaaatatttgaaattccatacaaccgtatttttgtaatttttttgttatttttatgtatttgtaaaataat

SEQ ID NO: 135318 - DNA, 857 bp, Cannabis sativa
tccttgtttacaaagggtgctgatacttgaagtttcttgtttcaatttaataggtgaggagataatattgatgaatgatgctacaaaaagtaaagacacattctactctatcatttaaaatgtttcactaaaatacaatttttcctatttatctctaacttttacattagaatttgactaaaataatttaggagtttttacaaaaatactaaattttggacaaaaatttacaattttactgtcacacgcaattttttttacaaaaatattatcttttgtggtgattcaatcactctccacaaacataacaaacacacaaaaattaaagatgaacaaagagaattaaaactagaaatgcacagcaagaaaatgataaaacagagtgtgaacactttgcattacaaggttcgatcacatactagaaacttggatctactccttgggtggaacgatcacatactaaaaacctggatctactccttgggtggaactgccttgaggcttttgcctttattgattaaagatgatgctcaaagttgatacatgatagtgacaaaacatgaacaaaataaagtcttgctcctactgaaatggctctctcgagagacaagagtttgaacaaactcaagccctttacaatgacacacactctcacttttctatgtagctactcaatagcaacattagtcttcatatatagacccaatacaagtgtattcgaaccaacaaagttaacagaatttaactaacaaattctaaccccacatatttttataaaataatcttaaaacaacaaaatagaacaattaaaacaacagtggaataactaaaaaacaactgtagaacaatagtgaaaa

SEQ ID NO: 135319 - DNA, 2046 bp, Cannabis sativa
  modified_base (489)..(493): a, c, t, g, unknown or other
  modified_base (772)..(774): a, c, t, g, unknown or other
  modified_base (835)..(835): a, c, t, g, unknown or other
  modified_base (1190)..(1193): a, c, t, g, unknown or other
tattttatacgcttgtaaaatagaatgtttgaacattgttttctatattgtaaattatttcgaattttttaaaattttgtagaatatcttaaatagctacaacatacatgaaaatgaaaaaaaatatatattaaatttttttttctggatgccgaaacatgtagagggttcatcagtacatcccttttaagggagtacattgtagaatcaccctatattatatatatataattttaataatattattaaaggtaaatattattttggaccctgtattttgcaaaagttatgaattggatcctctattttattaaatgacaaaatggatcttatatttttaaaataataaaaataggaccctgagctcaattttcaacaattttattttttaatgtaatcaactttaagtaatttttaacacgaacagatacagaaaatataaccagttttgtcataacatctctagatcagattattattaagttttannnnnacaaaaaatcaattcagggtcctagttgtataattttagaaaatacaatgtctattttgtcatttaacaaaacagaaggtccaatttataatttttacaaaacacagggtctaaaatagtatttaccctatgggcccgtttggtacgcaagactggattggattagacaggctaatttgtccaatccagtgtttgggcatgttagaagtctggataacaaatccagctaatctcatctgtctgagattatttatcccatccagcagggtgggataaatnnncccatgcaggtgagatttttttttatcgttttttttttaattttgattttattaatatatnttaaatttaataagaatttaaatgaaagaattaccactcatttgtttataaattttttttattaaaatttatttattaaaattagtgaaaatgtataattttgaattactatacaatagttttcaaaatttaaaatattattaattaaacaatagttatataaattgattctaaaagaaacaatatgacaataaaattatatattatatttgaattactaaaaaaattaatatttatattaaattagtgtttaagataaacaattttatattattcaagtatttttattttattattttatttatttattaaataaaaaatatgataaacaattttattatatatttatgatatnnnnttgattatatagaatatattattttattttattatttaattattttatgttttgtgctacgaattatttatttttattatatgttttaatttcaatttattattatatatttttattttaatttaagttttttttttcttaaaggaaataaataaaatagtccatctgttcttaaaccaaacacaagattactttcagcataatctaatcttatccagtccagtcaatttaatctaatccagtacaatcctgcgtaccaaacaaaagaggcctattagtattaattttaacaaaacatattttttagggagaaaattaggtattaaaacatattcttacacattatttattgtatacaagctttgaatcatatataaaaatggtatacatttgaatatctcaccctatataataaaacaatggtatgatagaagtttataaatgtttttgaaattgttcttttgtgatgggtcttgaatcattcatgtctatatgaagagctatcttcaaagagattgcaagagtgattacaaagtaccgtaaaaaaatattgaatttatgtgtttatctataaagaatttaattgttatttttaatgaatttaagttgacaaatggttgttattttgattcatgttttatagaattagtatgcactattgctatttaattcctgttttatttgtattaaaatatatacattattgtgttttgagtaaacacaaatttagttaaatatatatatatatatactacatgcgacttacgtggcaagccacgtaaatattagttttattttaagttcttgtggtttttgtttaagaatttagtgactaattgtaaattatgttata

SEQ ID NO: 135320 - DNA, 524 bp, Cannabis sativa
ctattatttccctcaatcataatctagtcaaaacgatgataatcgtttcctattattttccctcgatcaaaatcgagtcacaacgataatattcgtttcctattattttcccttgatcataatcaagtctcaacaattacataccgggatcttgatcataatcaagactgcaaaattcaaaacgttaaccatatacggagcttaatacttttcttacctcagtccagtagttaagtatgcgagccgacctcagtggaactacgctcgacgatccgggtcctatgtcacgataataaagctcaataaacaacttattctaaactttggaataaccctaacttcgcaatcagacatattccaactctccactagttcaaaatagcttatatgttactaaagtactcaaatctaggctctcaaaaacaccccgaacaaaactggttttgaggctaaaaaccaaagttttcttcccctgctaccaaaactggttgatcggtttcacaggtgctgtgaaaccggttaac

SEQ ID NO: 135321 - DNA, 512 bp, Cannabis sativa
  modified_base (346)..(346): a, c, t, g, unknown or other
tcgtttggaatgggctgaccaattaaaaattgcagaagatgtagtgctttaattgagtgatcacaatgaaagaaactttgttattgtgttatgcaaacatttcattttttaaagttgttctagaagcatttgtgcttatactttttttataactttgtttcaacaaagttatatgtattctgtatgacttatgtagttgtttattacattatttttctttcaagtttttatggcgtttataattatttaaatttagtttatcttgttcatttattatagatttaattatttctttttacatttctctaatattataacaaaatataatttatatacatattgtttnttaagaaaatatagattattttttttttaatttggagcacaagtacagatttaattatgtttttatgtttacttttcttacatatgtattatattatggaagagatttcaatggttacatttttattataaccatcatggttacatttttttaagccattggatta

SEQ ID NO: 135322 - DNA, 1578 bp, Cannabis sativa
  modified_base (919)..(925): a, c, t, g, unknown or other
gagagagagagagggagtgaagagagagaagctatttcttcttaattttctaattttggttaaagtaaaataaaacctaatgtttatctaatttaactaaaataatattcagattataatacacataaaatcccactagaagacaaaaatatcttatggaaaaaagactaatttgcccttgcttacccctaaagcaacccttccacctaggggtagtttggtcaaatcaaaaatctcgactaaacctgacattcccaatgtctaactatatttccgtgctatattaaaaatactaaaatgtgattctaatagccaaacgccgcgttcgaatgttgtcgggcacaaaacatgctaaaatataaaatttcatatatggcatataaaatgcattctgaattcaaagaaagctctgtaaaatgataattcataactaatatgcaagtttcataattaaacactatttatctgctaatttccaaattaaagttgttatcccaatttttgcactctgacgtggcatcgcttgatggtgacacgtggaatctactttgagtatctgctcggagggtacagtccgaacaggatgcctcgtaggcatgcccgaaacaaagcaatcagcaatccgtgcagagcaaccaacacttagcaaattcagctttcgcattgtgagtcatcaaagaaatccctataacttggggatcagattacagagatatggcaagctgtccaaattccacgatcagtgtattctgcatttatcatgtaatctttctgcttatatccattgtaacgagaagggaaacacttcctctccaagttcacagccctataaatagtgatgcacactcactggacaaagggtcgagattttaccctagagatattatctgagcattcatattcagagatactgttgtannnnnnntaagaaaaggaacctttctccttattcttaggtcaatacaaataacgagaattaggctattaccgaactgctcggagctgaacctctataaaattcttgtgtctttacattgctttactatatatcgattgctataaattacttatcgcttacaaaataagactcaatgtcgttgactaaaagctaggtcaacaaaagttaagcagtatttataattatcccccctgtaaaaggattttgaccccaaaatctaacttgaacaactgtggataatgagtcctcatgtcggactctaactccctgttggcttcttccaccttgatatttctctagagtaccttgaccaaagctatggtcttgttccgaagaaccttaacttttctgtctagaatctgaactggctgttctttgcatgataggtctgattgtagctcaagattctcataactcagcacatgagtaggatctgaaacgtacttttgtaacatggaaacatgaaacacgttgtgaactgttgaaagagttggaggcaaagcttgacgatatgccacaagttaaaccttctcgagagtctcgaaaggtcctgtaaacctagggcataatttgcctcttttcccgaaatgcttgactcccttcattggagacacccgtag

SEQ ID NO: 135323 - DNA, 584 bp, Cannabis sativa
tcatccaaactctccggattcattgtgttaagtcactaagaaaagagtactccatgaagtatactatacgcaatccaaataagattttttttttctatttttgtaaaatatttagttggtatcaattggaggacaatttagcaatccttaaatagttgatagtatgaaaaactgtacatttatagtattaatgaaaataattattggtagaatcattaagaatgtatttcaaaagacattgaaaacattaataattatgattgtatttattttttttttcagttaattgttatgagtgcgtccattattttatttttatatatgtatgttaattattttatttatatatgtttttactttggcagaaatgatcttttagcctatccaaatagatatatgtatctagttcgataattaaattgtcattaatgatttaatttggctgtgaaactttttattggcttaatatatagaaaagtatagtaaaacacattaaaataaaaagttaattaaattaaaaccgttgaaaacaataaaataaaaagttaattaaattaaaataagtcattacatagaaccgttga

SEQ ID NO: 135324 - DNA, 759 bp, Cannabis sativa
tggaaactaataaaataaattggatacttcttcaatattatgattggaagtgctcaatatgtcaacttgggtgctgggttgcgcaataggtgctcagggcacatggtgcctcaggtgctcaaaaatgaaagtgtttcgattctaattttggtgcctcaaattaatttgtgacaggtcttattcaagtcaaagtacagagttttaaccatttacactaagactaccctaaaactgaaaccctaattgggatgtcaacctggacgctaggtaaaaacactaggcgcctaggttgacttttggaatgttatttcatctctttttaattttcaggcattggacttgattcttcttgtcttcttgattccacagtcaacctaggcgtaaggctagggacctctcccaagttgactactatgacttgggactactcacctccgagatgttttctttcttctcacgtgttaaagattgatgtccacatcaccaggatcagttttcgggcaaacaagaattgattctatttaatttatgtctcagtgtttttggaactaattccttcttattttttaattagaaacgatttctgagttattgtgtgttattagcttttactcattttgttgtggaacggttctgttttaatttacgtatcaatatttttggaaaggctaattagtaatttttccccctgaactttgacatgtagtaaattgtgccccctaaacttttttggccattaaaaattccccccgaactatt

SEQ ID NO: 135325 - DNA, 673 bp, Cannabis sativa
  modified_base (608)..(608): a, c, t, g, unknown or other
aatggaggttgggtttgggtttgggatgacacaagagggtttgattttgggacgacgatcgccgagagggttgggtttgggaggaatacagatgggcttcgaatagggtttggggctgaatgagagtgtgagcgaaagagatgaatgggagagggatattttaattttttaacatatacatttatatatataaagaatctttcccaacagtgtttatcagtgtggtatttcccacggttataaaccgttggctatatttactatttccaacagttataaattgttggaatttattgttttttttttaaaaaaaatatatgtagtattggccacggttctccaccgttggcaatagctatcccattggtttttttcatcggtgttaaattgatggaaaaaacctcccatcaccttttccaacggttctcataatgtaccctcttattaaccgttgggaatagtcctttttgtagtagtgaatatttaaaaattttattagttttctaatgtattttttaggcaaattttaagattagaacaggacctcaaaaatacttaagacgaccctgttcatgtgacataccagaaccattgagtatagaagaggntttaaatgaaaagtacaagaaggagtggtctcgggttgtggatgatgaattaagctcgcttagaa

SEQ ID NO: 135326 - DNA, 925 bp, Cannabis sativa
taacatgacaaacagaaacattatgtaaaatagaaataagcgattgacattcttgaataaacaaaccaaaaacagatggaagtgcaatcgatctatacacaataacctatattataagaataagaataataataaataaataaataaattactatacacaatacatgatcatcattatcaacgaaaagtggcatgacattgtaatacgagtattgctaaaaaatattattagtgcttagcaaccttctcggtattatattgagttttatataatttataaattttttttaagtaatattgttaatcaatggtgagacaacacctataaaaaatatcaagcactaaaaaaggtaaataccattttggaccatgtgttttgcaaaagttatcaattggatcatctgttttgttaaatgacaaaatggaccatgtattttctaaaattgtacaaataggaccctgaactgattttatgtcaaaataaaacttaataataatctaatctaaagatgttatgacaaaactggttacattttctgtatctattcgggttagaaattgtcttaaaattggttatattaaaaaataaaattgttgaaaagtaagctcaggatcctatttttactattttggaaagagaaatgctaaagggcaccagtggtgcttaacaatctcctatgtgtcaatatcgttattggtctaactaaatatctggtcctatataatttaatataatagcttttagggagtatcgctagccaatcacgacgcgacatgtcgagaaggtgctaggcaccagtggtgcccaaaaacaatgctcttttggaaaatataggatttattttagaaatttttacatcaaaaatctaatttactcaatttattacaaaaaaaccctacacgcttacatcatcatttttacctt

SEQ ID NO: 135327 - DNA, 641 bp, Cannabis sativa
tatgcatgtgcggtaatgctcattagcattaattctagttagaaagattttaactatgagaaagaaatagtcgcaagtgtactaaaaaatgtacctagggcaatctagcaagaataattgcgaccttaccaggctcgaagttggtagtgtgggtatgaatcttttattactataagactgggagcaaatgtatgctgtaaagtaagggattaattgagtgacaaggtagtaaaacttacacgattgatttcgagcagcgcaatgatggagaatgatactaagttagaccgattggcaagttttgttttgatgaagcagctaatagggccactaggaaaggctttatggtggaacgagtatattgtttggaatgtagatattggctaaaactaggagttgtctggctttatgcttaggaggttgagctgacccttactgctaagggtgcaagaactggatcacaaaagaaataatatgaagagagattcatgaaagtaaaggtccaatattggatcgggtaaagggtattaaccctaatgatcgcaaggggaaaaggttaccgactcaacagttatgggttctagtaggagaatttgaggtaaccaaagtttctgacgtggtgggaataaagatttgcaaac

SEQ ID NO: 135328 - DNA, 1223 bp, Cannabis sativa
  modified_base (1183)..(1193): a, c, t, g, unknown or other
ttaactccaaaaaacttttctcacaccgatcagtccaaacaaacttcaagttctttcgagtcagctccattaagggtacaacaatctttgaaaaatcctcaaagattcgacgataataccccgctaaacccaaaacacttctgacctccatagctgattttggtgttggccaatcccgaacagcttcaatttttgccggatccaccttgatcccatatttatccactatgtgccccagaaacgagacacaggataaccaaaattcacactttttaaatttagcatagagtttattatctcgtaaccattgcaaaactactctgagatgcaactcatgctcttcttctgactcggaatacaccaaaatatcatcaataaatacgatccaacatttgtccaggtaatctctaaatacctgattcataagatccatgaatttcgcctgtgcattggtgagtccaaaggacatcacaaggaattcataatgtccataccgagtacggaaagcagttttcgggatatcttcctctcgaattctcagttgatgagagcctgagcgaagatcgatcttggaaaacactatgttccccttcagttgatgaaacatatcatcaatttgaggtaaaggatacttgttcttaatggtaagcttgttcaactcctggtaatcaatacacattcgcaggtttccatctttcttttttcacaaacaacactggagcaccccaaggtgagtagctcggtctgatgaatcccagattcagtaactcttgcaattgtatctttaatctttcagtttagctggagccattcggttggtgccttagatactggatccgctctcggaaccaactcaattacaaattcaatctcccatgtaggaggcaaccccggtaaatcctctggaatgacgtcaaggaactcacataccaatcttgtattctcaggccctgatgtcacaggttggttggtatccactgcagtgactatgaatcccagacaacctctgctcatcaggtccttagctttaaaaagtgttattctcagtatgcgtgtcccttgaatcttacccacaaacaccgctgggttagcactatcgggctcaatcaccaccatctgccgtttacaatcaatcgtcgctccacacttagataggaaatccatgttggaattattttaccannnnnnnnnnntactaacatgtatgttggattaacaaccta

SEQ ID NO: 135329 - DNA, 632 bp, Cannabis sativa
  modified_base (321)..(323): a, c, t, g, unknown or other
ctgaaagggcttaaaaatcgcctctaaaggggatttttgtagtagtgttaatacaataaaataaaactcaaccttattaagcttaattgtccatttattgcagcatcttataggataaaaacaaaattttctaattcattattaatgaaccctctctcttattgatgacgaaatccccacatttataatttatacaataaagttatattattttatatatctatttatggaaaaaaatcatatttatagacaagataaactaattaaaattaactaatataatcataattcaattcagcttaattattcttatttattatnnntaaagatgggttggaataccaacaccataaccaatactaaactatctaattattttagccattcgaattactaaaaactatttatattggtatctatctgaacaatgaaaaaacaataaaatcaatactcattaacctttactatccatttattttagtatcttcctaataatagaataaaatcaaaaaaatctcccagtcacttttaatgtctccacctcccattgattataaaatctccacatttataatttttacaccaaaataatattatgttatatataatgaaccttatatttattgtcaata

SEQ ID NO: 135330 - DNA, 635 bp, Cannabis sativa
gtaatgggttttatttagggcacaaaacccaacaattattactccattataaatatgaaattgtattcttttaaaaatatagaatcatatttacaaattttttctagtagttcacgtcctacaattattagttcataattagagttagtcaaattaccattttttccttttaattatcatctgaattttttatctactataattcaatgtgaacagttaatctataatttaattatagatttggatccaactgttagaacttccagaattaatactataagggaactgatattcgatcattttaaaaaatttagattctattattgaaaattctagccacttatgttattaggttcccaaaacaaaagttgtaaaaattatcttgtgtgagaaacttcaacgagttaatcaaataacctaatgaatacaaacacgagttcatgaatacttaggataaagattgatctactagtgattatcgttgtcatgtgaataactcttttatgataaacgacacgttaataaaagatgttactttatatcgttccagtcatgtataatcaaattatacacaatatatttattaaatatctatccacattggggtttgaatcaaaatcacacatactagagta

SEQ ID NO: 135331 - DNA, 2458 bp, Cannabis sativa
gggagaccattcttggcaactggccaagcattgattgatgttcagaagggtgaattgaagctgcgagtgcaaggggaagaagtggtcttcaatttactaaaggcgatgactttttcaaaggcaagtgataactgtttctttgttgatttgatcgatactattgtggaaaagaaaaaggtgatagaagatcctttagaattgagcttagccgaggatgagttgactgagcaagaaggaatggaggcaatgggctatgctaaatggcttgactcctatgggccattgaataggaagtattatgaagagttggggggttgtgccaaagaagcttgtgccatctacagagaaaccaccagagtaagaactgaaggtgcttcctaatcatctacagtatgagtttttgggagaagacaagaagcttcgagtgatagtgtcagcttcactttctgatgtggagactgacaagttgcttagagtactccgggtgcacaataaagccattgggtggacattggctgacattaagggaatcagtccctcaatagttatgcatcgaattttaatggaggagggtgctaaactgactattgatgcacaacgaagacttaatctaccaatgaaagaagttgtcagaaaagaggtggtcaagtggttagatgctggagtggcttaccaaatttcaaatagcaagtgggttagcctagtagaagtagtaccaaagaaaggggggatgacaatcataaagaatgagaagaacgaattaatccctagaagaacggctactggttggaggatttgcattgactacaggaagctcaacaaggcaactaggaaggaccactttcccttgccctttattgatcagatgttagaccggttggctgggcaagagtattactatttcttagatggctattttgggtaccatcaaatagctataacacctgagtatcaagagaagacgatatttacatgtccatatggcacttttgctttcaggagaatgccctttggactatgtaatgctccagcaacatttcagagatgtatgatggcaatcttttcggacttgattgaaacatgtataaagatctttattgatgatttctcggtttttgattcttcattcgatcattgtttggagaatttggagaaagtgctaattagatgcaaggagtcaagcttggtacttaactgggaaaagtgccacttcatggtaacagaggggatagttctggggcataagatctcaaaggtaggcatcgaggtggataaagccaaggtttcaacaatagagaatttaccccctcctgtttttgtaaaaggagtacggagttttctgggccacgctggattctactagagatttattaaggacttctctaagatctcaaaactgctgtcaaatctgcttgttaacggggttccttttgagtttggggaagaatgtttgaaagctttcctagttcttaaggagaaatttatatcagcacctatactcacttcaccaaattgggagttgccattcgagttgatgtgtgatggaagtgactacgcaatcagagcagtcttgggacaacaggttgatagggtgtttcatacctctactatgctagtagaaccctgaatgatgcttagctgaactatgccacaacagagaaagagatgcttgcaattgtgtttgcatgtgataagtttcgaccttatctgattgggaataaggtgatagtttatacagaccactcaacaataaagtaccttatgaccaagaaggatgcaaaaccaaggttgattcggtgggtgctactgcttcaagaattggacattgaggtaaaggacaagagggggactgagaatctaggtgctgatcatctttcaagactcgaaatagtagaaagccagaatgcgaaagaggtgtagataaatgaagagtttctcgatgaacaactctttagtttgagggagagcttgatggtaacttggttttctaattatgtcaacttcttggctgccaatgttactcctccagagatgtgtcatcaacaactctaaaagttcttttcagaggtaaagcattactattaggaagagccgattctctacaagcactgcgctgataagataataagaagatgtgtgcctgaagaagggatgtattctatcttgaaccactgccatgctttacaatgtggggggcattttagtggcacaagaaatgatacgaaggttcttcaaagtggattcttttggcctactctttttaaaggtgctaatgactttgtgaaggcatgtgatcgttgtgagagaacgggaaacatttctaaaagaaacgaaatgcctttgacaggtatcttggaggtggatttgtttgatgttttggggatagatttcatgggtccctttccttcttctttcagcaatttgtacattttactagctgtggattatgtatcaaaat

SEQ ID NO: 135332 - DNA, 837 bp, Cannabis sativa
  modified_base (371)..(372): a, c, t, g, unknown or other
aaaacaatcaatttaacttatatatgtatataaataatatttataaacaataacttcataagtttaaaaatactgtaattttttaagtttcatatcattcatttaactaccaaaacaaatatgaagatgatagaaatagatattttaccttagcaactttaaaaaatttgaggcggccttaaagaatcaacaattctctatttaagtttaatatatataatatacatcagaacaaaaagaagaactgttattattaatagtaatacaaataaagaatcaaagaatataaaaatagtatccattagaacaaaagccactcaatatataggtgttaatataagaaaataaaaaggaatgcttacatgaaaatnnctttcaaagacatacagcatcatcttcattatttcttcatttgagtttagtatacatctgaaaagtgagaacaaaaaaaatgttaataataatagtaatacaaataaagaatcagagataggaaaataggaacatatatagaatataatacactcaaaatattttgcaaatataggaaagataaaaagaaaatgtttatacatgaaaacatcagctttttgcctcaatttatatataaggtttcataaagtttaatcactcttactattacgttattgaatgttatattcatatattataaatttttaaaatttaaaattcattgctaattatttttctgtattaactttcattcattggaaaattatttagttatttgtaactcatatggtatttatgatatgtatatatgcattaagcttacaactaaatgatatttaataatttagaaagttatttgaaatc

SEQ ID NO: 135333 - DNA, 635 bp, Cannabis sativa
gaccgatcagggtcagaggaatgacaatatccaagatttactacctccaccggtagatggacatctgcaagtcatcgttggaggtccgcatactgctcgagatttgggtaaagctcgggagaggtatgcccgaacagcgcagcacgagcaagaggaagttatccagccgtggaagaaagaaagcccaaagttctacgagcaggagggcgtaccataactttcaacgatgaagatgctgttaaaattcatttccacacaacgatctgctggtcgtgtaagtccagatagccaataaaatggtggctagaaccatgattgataatggagcctcatgcaatatcttattcaaaactacttatgaaaagatgggactccagctcaatgatctaaccccatatctccaacctgtctatggtttctctggttaaagagtcgcacctaggacaaattcatttacccctaactgttggacaagctccgacaagcatgactatcatggcacacctcctgatattagatgttccttcagctttcaatgtaatgttagggcggccgacctggtatgacttaaaggctgtcacattaatattccactcgtgcttgaagtttctagcaaagaatggggtagggtgtct

SEQ ID NO: 135334 - DNA, 1777 bp, Cannabis sativa
  modified_base (571)..(574): a, c, t, g, unknown or other
taactaagagtattttaggtactaaaaaataataaaggtcatttgctatattatttttaaaaaagagacattaagttccagtataagtggataaagggccatttactactatttccattgtctgttaatcaaaagtactattatattatatttcattaaaatatacctacttttttgagtaaattgtttaatatactttcattttttatttaagtctagcacatattttacattaacttaaggggtataatggaaacattatttataaaaatagatatctcttaaagaatatgaaaataaagataaacattaaaataaacaaagtaaaatggggatacaatgcaatttcttctaccaaaaagttattcaaatttgcaatttgcatcacaatatagcatgatacaaaatttgcatcacaataaatattatgcttttatatttatcattatgttatttttaataatttattattaaattttaattcacatgtccttttacatgaaatgacttacattattattattttcttatcaaattttatatttacgttatattattattattattattnnnnttattattattattattaggtaatataattgttcttcgtgcggctatatcataatttttttgtataataataaaaaataattatttattaatataataaataataatttaactttactaaaaaaataataataataacttaaataaattattctagtttataataatattataattacattgtctaattacttatttattaatagtaattttatttattttagaaaatgtagtatgacattaaaaggaaagtgttgtatataatatagattatatatgataaggactgatatgaataaagttgtttttatttaacatatcatttactataaagatttaattcatatcataacgataatcaatagtaaatcgacctaaatcttgagtaatcacgaactcctgttcatgttattagtttatttgattcactcgttaaagtttgtcagagaagatgattcttacaatttctattttgggaatctaataatgtggatggctagaacatgatctacaattatggaattctgactttcttaacatatcaaatgctggttccttttatgtgttaattctagtactgaaaaattgcatgcaaatttagatgggatatgaattatacttctattagtgaattaatggtactagaggataaaaaagtaattagaagagtaaaataataatttgatctaaactaattacgaatcaacacatagagggctaatcacttgaattgattatatcaatggacactatagtaaagcttagtaaatataattctatataattactaagagttcaattctatatttttagtgaagcagtcatggaattaataaacaatgattatttggttgatgagagttaaaaaataatctagtttattagaacttaaaattataggttcatgatccccgaatcgtcaccttgaagcactgtcaagggaaagggataaagagtagtataatgatgttaagaaaaaatttattttgaattggcaaaatagtaattatttatttttataataaataaaaattttttaaattaattaaatatgaaaaagataaaagttcttaagacaaaatttattgagataaaagttatcaggataaaagacaccaaccttgtcttaattcagacaaggtagacgcctaccaccatgtagcctgtcccatagagtttgtctttttgggttaattaattattt

SEQ ID NO: 135335 - DNA, 983 bp, Cannabis sativa
aggggtaaaattgtaatgcaaaaatggtttaagtatattttgcatgatgcaaaatatcctagcatatttttagtgtaccatttatttttaagcatatattgtcaaatttccctctttaaatctctctaaataacactattagttaaaaataacatatctatcaatctatttctatatataaagctaaagactctattattgtcggtaacagactccgttattgtcttaaataatgcacatataaagctcaattctaaagacatttttacaaaaaatgttagattttgggcaaaagtttacaattttactgttacacagaattttttacaaatatattgtctttgtataaaacaactgtaaaacaataaaatagaacaattaaaacgacagtggaacaactaaaaaacaaccgtaaaacaactgtgaaaacataacacagtacacagtatttttgaaaaaaaaattcgccccacaataaaaaagtaaaaaagttataaatctcaatatgtggtgtaaaaacctcagtccgtatgcctgattttacatctaacttctcatatttttttaaagaaatttatatgaaaaattaataatgttaaaatttgatgcaattttattaggggaattttcataaatatgggaattgagggtatatatagtttacttttttatagcataaataaataacactataaggttatggttatttttttacatttatatggatttttttatgccatatttttgtaaaaaaaaagtagaaatcccatatttgttaaacaaccataagttttgccagaaaagtcgctggaaaaatcattgtcgccggaaaagtcgtcaaaaaagtcaccgaaaaagtcaacgtcggcggaaaagtcaacaaaaaagtcaacgtcgccggaaaagtcactggaaaagtcaccataagtaaatgtctcagatataactaaaaatataagtggttatatgaataaaaactaata

SEQ ID NO: 135336 - DNA, 998 bp, Cannabis sativa
atgtacatattagtaaaatactttcaacttgtattttgatactcgggatcccgacccatatggttattaagatataaattattaaaattaactttcgagttgattaatataaaatacgggtgttacaattttagcttggaaaaatggtttcgtttttgaatgtattacttgctcccaaaaccataatactggcttggtctactcggaccccccgtcccatccttggttactttcttgtgtgtatggtcctccttactccaatgctaagaaaactttctgggctgagttcacgaagattggggataggtttggaggctcgtggcttatcttgagagacaataattttgtgctaagtgaatcggaaagagttggctctaaagggagggacctgtttatcccgttcatctctaacttggtgaattctacagggctcatcaacttacacattcaaggagataagctcacttgggataatcacagctcaagttcgaatcatgtcaaatctactcttgataaaggtctagttaatggagtgtggattaagttgtttccgagagctatcctttgctcttctcagacttgcaactctgatcataggcctattttcattctgtctggaggcgtggaagaaaaatttaaaagatgctttaagtttgaagagggctggactcgggatgataggagcaagttggtggttgatagtgcctggaactcggttattcacttcactcttgggcccctagcagggtcttcaagaaaattggggcgacccgggttgctcttatgcactggaatagatcccaatttggtaggtttgattccttaatcaaagagctggaaagaaaactcaatctcattcaaagtttgcaagatgcaagttggtactttaagaaactgctgaagcttagaacaaaaattgatagagaagccatgctttgggcgagaatgttgggtttattgccctaaataaaactccatttcaatgtaatccattttat

SEQ ID NO: 135337 - DNA, 1962 bp, Cannabis sativa
  modified_base (51)..(55): a, c, t, g, unknown or other
tttcattgttttagagaattcacatgtaggatgttaatcaacatacttgtnnnnnaatctagatccttgtaaaatattcacaacactcagggcatcagccacaacattggccttcccatgatgataaaggatctcacaatcgtaatcgttaaggtatttctgagtaaagaagtatttcagacttttatgatcagtgtatatctcacatttctcaccatataagtaatgtcaccaaatctttagtgcaaaaattactgctgcgagttgtaggtcgtgagtagggtacctctgctcgtacttctgtaactaccaagaagcatagttattacctttccaacttgcataagaacacagcccaaaccctgtctcgaggcatcacagtaaacaacaaacttttccttatctgaaggaagagttaataatagaacggtaatcaagtgctactttaactttagaaaactttttcacatcgatcggtccaaacaaacttcaagttattttgggttagctctgttaaaggtacaacaatctttgagaaatcctcaacgaatcgacaataataccaagctaaacccaaaaagcttctaacttctgtaaccgattttggtgttggccaatcccaaacagcttcgatattggccaaatcaaccatgatcccatctttatctactatgtgacctaagaaagagacacaagataaccagaattcacactttttaaacttagtgtacaacttgtgatctcgtaaacgatgcagtacagatctaagatgaagctcatgttcctattctaattcaaaataaaccaaaatgtcatcgatgaacacaatcacagatctgtccaggtaatgcttgaactcccaattcataagatccatgaatactattggggcattggtgagtccaaaagacatcaatagaaattcataatgtccataccgagtacgaaacacagtttttgggatatcttcctcttgaattctcaattgatggtaacctgagcaaagatcgatcttgcaaaagactatcgtccccttcagttgatcaaacaaatcctcaattcgaggtagaggatacttgttcttgacggtaagcttgttcaactcccagtaatcaatacacatccgcaatgacctgtaatgaccgcattttagaatatagattagtaagggaaattaacattaattattgagatttttatagttatttatgaatttatttaattttgggtcccattattaaaagtaggcaccagagttataatttttcaatttcgcagatttcattaaactctagaggtattatttgagttatatatgaattatgctatttttataatttttgctcgacgacgatggaaaatgcgatggatggccatttaaataaaataggtaagtctagaaccttttcttagtgggataaatattgcagaaaaataaaataccgagtttgagcggggttatggttttcgaccattttacccctagactttaaattcttaagtcataagctagaagggcattttggtaacttggcaagttggggtaggtggctattttagagctttacacctagctaatgttaattcatcaaggaattaatgaattaggcctttttcacttaggaaaaaataaaaaaattaaagaaaaaatcaaaaatcaagagaaattcattctttttctctctctctctctttgctcgccccacatagaaccagaaggaaccaagtttttacttcatcttttctagaaattcaactaaggttcaaggagtaattggtgtaggtaagcactagaaactcttaacttttgacttccttaagttttgattgattttggtatgtaattttaatgtttaggggatgttagggtttgaatatgtgaaccatgcaacataaaatgttgtttctgatctttattaataagtaaatctgattatatcgaaatgggttttatttagggca

SEQ ID NO: 135338 - DNA, 800 bp, Cannabis sativa
catgaatataaagatagattataaaagtagaacaaaatattattttgtattttattcttaataagatgtatggaatgtatataagtatatgttgtaactattttcttgtatcgacttttgtatgtttatatttttgtgtcttacatatgttatttatgtttatatctacatgtaaagttgtaattcttgcggtatattatatatatatatattagattttgtatttaaatatgtgtatcatattatatataataaaataagtttatgtattacatatatttttttatgttttattattttatgttattctattttaaacattataaatttataagtctataactgttgtttttttttttgtactttaaaataatttttgcattttatcatgtgtatattgaccttttacatgtctattattatatgtagtggaactatgagtgagaatgaaaaagacacaccatcaacatatggacaaatggaaggagactcatcaactcctctaaataatattgattcagaaactcaaactattattgatgatgagaatactcaggtgaagagaaaattgacttcttttgtttggaaacatttcaagaaggtaaaaattgaaggagttgataaggcaatttgcaactactagtcaaaagaaattgggaggatcaagcagaaatggaacgagacatttacatgatcacttcaagatttgtcctcttagaaagaatcgtgatataaaacaatcaatcttgaatccaagtaggaagaaggatggaagtacttctcttgctgcccacaacttt

SEQ ID NO: 135339 - DNA, 1859 bp, Cannabis sativa
tgttatttctgatctttattattaaatctgattatattggaatgagttttatttagggcacaaaacccaacacttttcggcttcaaactagttctattaaagctttctgctttgagaatgcttggctccgtgaagagaattttttttctattattcaggaacaatggggcggctgcacttctaacaacattgttgacaagattgtggcggttcaggaacctcttgcatcttggggaaatgatttgacgggtaactttaaagagaggattcaaagctgcaaaagaagaattggtgctctcaagaattgttatgatagtgcctcagtttctgattaccgtgttgcaaaaaagcagcttgctgagatttatcatcaaaaagaaattttttggcgtcaacgatctaagcaattttggttaaaagaaggggacagaaacacgaagtactttcacgctgctgctagttctcgtcgcaaaaacaatttcattcattagctggagaatgaggcaggcgattgggttaagtgtgagtctagtttacctcaggtaatggttaattattttactgatattttccattccttagggactcatggtaatgatatcctggataagattcagccttcgataagtgatgatgataatgctactttgcttcatccggttttggaagaagaagttcgttcagcggtgttttaaatgcaccctgataagtctccgggtcgtgatgggatgacacttgcgttctatcagaagtgctggcatattgtgggtcatgatgtcgttcgactcgttcagaatctttttcggaataaggtgatgcttaaatatcttaatgctactaatcttgtgcttattccaaaaaagaaaatgcctgtagtcatgggacatttgagacctatttctctgtgtaatgtgctttacaaagtaatttctaaagttttggctaaccggctcaaaggtctgttgtccaaggtgatttctgagtttcagagtgcgttcattccgggttgcctcattacagataatgttcttgtctcgtttgagatcctccactatttgagacgtaaacaacaaggaaagcaaggatgtatggaacttaagttggatatgagcaaggcttatgatagaatggagtggtcttttttgcatgcaatcttacttcgcatgggtttctcggttgactgggttatgatgataatggaatgtctgagaacgatctcttacaacattgtccatgggggggaagttcttgggtcgattatcccaactaaagggattcgtcaaggagatcctatttctccatatctcttcattatctgtgtggaaggtctttcagctcttattcggctttatgaagagaagaaatggatccatagttgccgtgtggctcgtagagccccttacgtcactcatatgctgtttgctaatgatagctttctttattgctcggccactatggaggaggctcaacgtgttctggaattgctacagaaatttgaggaggctttgggtcagaaggtaaatcttaatgattcttctgtattttttagctccaacacgattgatagcgttcgcctcggtattttgtcaacccttcatatgcatgttgctgatgagaatagtttttatctgggtctcccgagcgtggttggtagaaataagaatgtggcttttgttttcttgaaggagaaggttaggaagcgtattcagaactgggatagtaagcttttatcgagagcaggtaaggaggttttagtgaagtccgtgatccaatctttaccttcttacaccatgtgtccttttggttccccttgaaatttgtaaagacattgatcgcctcatgggaagattctggtggca

SEQ ID NO: 135340 - DNA, 804 bp, Cannabis sativa
  modified_base (762)..(775): a, c, t, g, unknown or other
cattgtagaattttccaaatatatatctttaatttgtactattttttattttttatttttttctttcttcttatattcttaaaaaaaaaaatacctataaactaaaaataaaatatagaaaaattctacaatgcacacccttaaaagggatgcactgatgtattctaatctgttttggtattcaaaataattttttagtcaaatttttttttatgatcatgtacgctatagttgtttaaaacatcttttaaaattttaagaaattcagaaaaatttaacacgccaaaaataggattcaaacagtgtgttgcacacgtcactattttattttatacgcatgtgaaatacactgtttgaacattattttttatattgtaaattattccgaatcaaaattttataggatattgataaaggcttaaatttatacattttaagcttttaattatggagataaaatttatataaattaaatattttttaagttttaatgttaaatttattttaattgaaaatatttaatttattctaatttttatgtttatttttcagatttagagtataaataataaaagtgtaagtagtttataagaagaagtgagcaagacaaatgaaagcccaaaagtaatggcctaattttcatctctttacaattcttaatcaatacattttgattaggaaaacttacaaaaatactggaattttggttaacttatacaaaaatgttgtcacatagaatcttttcaaaaatactgtattttnnnnnnnnnnnnnnaaaatacaaagcagaacaactcaaaacaa

SEQ ID NO: 135341 - DNA, 560 bp, Cannabis sativa
ccatcccatataaacctaaccctttaaaacctacctcaaaattagagttgaccgattgaaggattaggtacatgaagtgaaagcccaacaggaagatatccgtagtcattataggcatttcttgcaagagatctcagaaggcaaacgccgattcttgggagaagtagcctggccagaacctcccagcgtgtcctttactcctgtggcaaagctgttgtttttacccagcgtcacaattgaatttgaagtaggtgacttggatttcgaaattatgcctcccaagccacgtacatctaaaactcttcaggatcctaatgtcaccttgaaggcttagttaatagaatcgagggtgtgatctctctcaggctagacgggcaagacgttgaagatctgcgaatttgaaattgggcaataaacaatcatgccaagttagatcagtgcgagagggtgagttcagctgcaacctgttggattttgtgccctgaataaaacccatttcaatataatcagatctaattaataaagatcagaaataatattttatgttgcatggctcacat

SEQ ID NO: 135342 - DNA, 533 bp, Cannabis sativa
aaaaatagcaaaagttagtatatcatgtaaatttctttttttttttttttcattttaaagacaccttttttttaatggttaaaaataacttctttaagtattaataacatttttatattatttaggtatgtttcgatactcttatttatattatttctcattttttttatatttttttctttttttcaaactttaaaagtaattcctgaggttactcggatgagcataaaaaaaatgttgttatgatatattcttcaatgtaaacatgtgggaagcatatatatttttttcactattttcaaaaaaaaaattatttggttactactattgggcccatcttccctgtccttaggccaagtatgacatcaaactagcattgggcccctatcgggctcttcgggccatcatccatatctttagatccaagttttagtcggactagcattgggctccatcggactagaagaaaaaaatcacaaaaacaaaaaaaaaaatacattatctaccgatagcaaccatttcaacacacaaaa

SEQ ID NO: 135343 - DNA, 524 bp, Cannabis sativa
  modified_base (67)..(73): a, c, t, g, unknown or other
aactttatatgtgtttatttcatggttttagaaagttcatatttagggagttaatcaacatacttgnnnnnnnatctaagatcctggtaaaaaaatttccaacaatattctgctatccaggtaggatagtatcccccgtaggccactatttggggctcttccaggttgatatttttctggactctcttctggaagtcttgaaggttggaagctccttcttgctgtaactcgttccaaaatggagtccctgtacggacgcctgcttggagaagagcaagctgttgaccgtcatctactttcttggtttttgaggcttcttccctgaacctctttatgaaattcttcaatgtttccgtaggcagctgctggattttagtcaaggcacttacttccagattgacctatcttgcggcgacaaattgtctcccaaagctagtttgcaacttattccagcaatccacggatcctggttccagtttcttgaaccactcttccgcggatccgcttagagtaagcgggaagca

SEQ ID NO: 135344 - DNA, 628 bp, Cannabis sativa
tcttaaaaactgtaaaaatatttataattccgtaatttgtatttttgtaattatttttgaaataatccctaaaaaaagtcatggaccggtccaatagattccgtaaaaacgacccactaatttcaggtttgtatatatgggcccagcccagccttttgaaacattattcaccatcatttaggcgccaattcggccgttcaccatttcccgctcaatctcaacttcgattatatctcagtcacgaaccacgccgctgccactctcacaatccaagcccccccaactaccaactactaccaacacctgtcaccgcctgccgagtctctccgagtggagccattcagaaggtaacttcaacagttttttgcctcaaaatcgtggcttttatgcttctgtgtattgtgggtttgtgatttttcatctttgtgatcgtttttgtgctgttcttttgattttttttttttttggttgaattagtcattaattttcttctgggtatcgtttccatttcattttcaaaaaatgaagctgaaactaaagcaagtgatcaaccgctccctcccactctcaattgtagagagtgaaagcaggaaagaaaagagagaaagagaatgcaagaaaagctcaa

SEQ ID NO: 135345 - DNA, 758 bp, Cannabis sativa
cactagtagaccccaacccgctcggtctagtgtggcccgaacatgtacattcgccgttcacttcccacactcatggctgatcagaaaaaattttaccctttcctacacagtagagcacccgtgagccaaggccagcaagattgcataatatatcaataacatgtttaacacatatataaaaggtaatgccattctcatatgcctgtatgacatagccctgcatgttacgctcacatgccattaatgtccacgtagcgtagacctacgtgttgcgctcacacgtggaaatcaaataaggccttagaatggttcatctcagttctagttaccaagtccaacctggttatgcctagaacttatagccctaaatcttacatattcatataaccatatatatatcatggcatagctttcatacaacatatatcattagggtaataaccatacgcaattaaaccgctcatcttagggtaataaccctaatcctggttactgatttatcacatatatcatttccaatataagtgccactgcgcatcactctacgtgctaactactgtcttacctaatgtcctgcaatagcagagattccaaatcctcgggtgctcctaaccaggtgccgataatcctagtcataatattgggatttacacaaataggggtaaaccctaaatccacttccacaaaaatataaaatttgcattcaaaattcaaataatcacatagagctccaaaagagctttccaacgatataaaga

SEQ ID NO: 135346 - DNA, 681 bp, Cannabis sativa
gtttgctcttttgctacatgttgctcagcctcctcagcaatcaaggctagctctaccactttttggtacaaagtgtcatgtgaagtggtaatcttcaagtgatgactgattgtggcattcattcctctcacatacttcaatttcttggtgaaatctgtgggcaccagatcaccagaaaatttcgacaactgatcaaattccagagtatactcggccaccgacatcttcccctaagtaagcttcacaaaatcttccatatgtgaagttctcacagcaatgttgtaaaacttttcctcaaatagattcttaaattcttcccaggtcattacactaacatccagggtttgacccacaatgtcccaccagacgcgggcatggtcttgcaacatgaaggctgcacaatttactctctcagttgctgtgactcccatattatccaggatacgggtaatagtgctcagccactcctcgaccttaattatatcaatacctcccagaaaagtcagaggttgcagcttcacgaactgctcaaatacctagtctctatatggcataacaaacccctggttacccaccactggcataggtgctggtggtaacatttgatcaacaggggcacccggtgccggtttccttaatcgtcgcaactcttcttcttgacgaagtatgacacttcgcatt

SEQ ID NO: 135347 - DNA, 1087 bp, Cannabis sativa
  modified_base (1026)..(1041): a, c, t, g, unknown or other
aagtgagttggccgacctgaacggaaagtctcgtgctggatagatgccctaatcacataataaaaccgagtaaatcacatgtccaaaaccctaacccgagaaacccgaaactacagctcaaggttctgttatcttcactaggaactacaatagcctaggaaacaggaaaatacccaactaaggcactgaaatggatcagaattgagaaaatgggttttttggggaacctgccaaaaccggttaaccgatttgtacgaggctccccaaaaaccctaatctcgctcaaaactccaccaaatgctaccaaaccttccggagtacctaaaaagggcatacacaatatatttctaccagtaaatcccagaaaaacccactgaattcaaacatgccattaaagaccaaagtttgggtttcaaagctcaaactttctcaattccaacaccacacatcacaaccagcagcaagagctataccctaatagcccctaaagctaaaaattacatactcaaacaaaacttaaaagcttcaaaagtacaaaaccatggttctagggttaccttagcttgattctctctgaattccttgctgaaaacaccaagaatcagcaacaattcctatggtctttggttggttcgaaaagagagagaagggaagagaggtttcttcaatttggtctttttcgttatttttctctaaatgaattaaggattaagttaattaatccttgctgaaaaaggaatgggtaggtgtcaaatttagggtagccaccaagacactcccttgaaaaaagactaaaatgcccctaaactaataacttaggcatttttaagactaggggtcaaatagtcaaaatccataacctcgctcaaactcgatattctatttcctccaacatacatcccattaaaaaataaggttctaaacctacccatgtgatcaaactagccatccatcgcattttctgttgtcgccgagcacaaattgtaaaaaaataacataactcacatattgttggaaattattttnnnnnnnnnnnnnnnntactcacaagtatgttgattagcaccctaaatatgaacttctaaaa

SEQ ID NO: 135348 - DNA, 707 bp, Cannabis sativa
  modified_base (57)..(71): a, c, t, g, unknown or other
tttaatgattaaaatgtatgatttcatgtaaaaagttttcaaaatgtataagttttnnnnnnnnnnnnnnnttgcacattttttgtaattatattatttttattgtacatttacgaaaaaagccctaaaataaatgtacttgactatcataagtagattgtatttattaaattaattctttacactatatcttatcatcttacatgaaaaataatagcttttcacaggaacaccgcaactttgtcgatactatcatatacaaattatccacagaaaaatgaataattcaattatatgcagacccaattaaaatgaaaagtgcaaattcaaaatacaaatattacactgttatctctgtcgaagcaaaagaaaattaaaacccaaccattaagagtattcttattttttttttcctacaatttttagacatgcgttattttcacctatcaacaatttagagattaaattttaatatttttttatttgactcaaatttaaattatatatgcttttttttaacattaatttttgaattaatttaaaagcaaattacaattaaattatcaaaatttcttaaatattcatatattcagtatttacttttaaggaatttttacactaagtgactttttttaccaatatttgacatttatatttgctttctcttttttttacatttttacattttaaaattttctctaatacta

SEQ ID NO: 135349 - DNA, 1149 bp, Cannabis sativa
aataaaccaggatgagagaaacttacctgagccccttagaaggggtttggcggaggtggctgatcataggggttgaagcaaggtggcatggaaaaatagttagggtcatccacaccaacattcatcctcgtgactagcatattcaattgggccacctgctgctcattgaaaacactccattgggccatgtaattctgcatgtgcatgttttgttgaatcagatcattcaactgatcatgagtgtattgcatagctgggtcgagaggccctacaagacgtggtggttcgatgtcttcatgctcctcttgttctcttgtaggaggatctctctgagttggctgttgaccataagggtgaggtggtttgaagcgaagaacagtggacaaggtaatattgcgttgtggcgctacttttgtatcataagagtactttcgtactccatgtgcctcacacagataattccagcaagcccaagttcaccaccacaagagccctcaacaatcatatcaaatgtcactctaactatgtccaccacattcaagttgtaacctttcataattccataaacaaacttaatcctttcaatctgagcctcagaataatgtttgttcgggaccatacttgcactaacgaagtatagccatgccttggctaccgggttgagttcacaccgatacaattgatacggttctccatcaaattcatggaacctaaggccgggatacccaagggtttcgactatatcctcataattcaaccttcttgctcgaagttgctgtttcaattgttgctattctacagtgaaggttggtagatcataaatagcatgaattgcagctgtggaagcaggcactttaacccccataactctcactttgtcatcctctctttttggccagttggctaagaattctaaagctaaggtttggttgctacgcccagtgacatccacgaacttagtccactgcctatttaagatttgatctctaatggatgcaaatacaggaggaatgtttgcagtttggctcaggttaacaatttctatcaccttatcttcaatgaagggcctatctttcaatttcaaaaaccgctcttgggcatccatattagcaaacctcactctatctagattagagcgacccctaggtg

SEQ ID NO: 135350 - DNA, 652 bp, Cannabis sativa
tattttaaataataagatactataatataacttaaaaataattaattgattattaagatatttacaaataaattttggaggtaactaaattctatctcaaattgtatgatataaaaataatttattttttttttatgtaaaagtaactaattagtttcttatcaacattataagtaagtaaccaaaaggtaagttttgaaaatgtaggtaaattaaaaataaaaagtagaatttgagattaattttatttcaggcatattaatttcgaattaaggtattttttgaagatgtggcaaggtattattgtaaatgagatttgttaaggtatttttgtaattagtttgtattttaagtatattattgaaaaaatccctatatattaatacattcatgccttacaatttaattatggtaatttaaatattaaaaaagttcaataattaactaccaatcaccctcaaacctcactacaataaatatttctattatataacatatattaatatattatttttttaaaaaaaaaaagcatagcatatatattaataatttatcaatataataaaatcaacattaatataattattgatttagcttaataataattaatataattaatttaaacaataaaattatcataacataattggta

SEQ ID NO: 135351 - DNA, 1380 bp, Cannabis sativa
ccaccagtaaactccttctgtacaccagaagatccaactctatcaacattaaactttgagaatggaacatcatcaaagtcatcatctgactcttctcggccaataaactccattccagtaagcaccaataaaccttttatttcatcttcagtaggcacaatatgttttcctttcagctagcaaaacaagaaaaaataattagtttacaaaatataataaaaacaacaaataaacaatttacaaaatataaaaaataccttatttgaagatagaactttcttctcaacttcacttgaattaggatttccaatactcttccatctacaaaacctatatggtttaccagaatcataggaacaaaactttgccttcaagcacaaaggaatggtttcatacaaccaaaccaaaaatgcaaaaggtaaaccaggaagtttataagatcgaggacccttttccaaatgtttccctttaaccttagcaagaggcttagcaacaccttttcccttcataacacccctcagaccaatctttaaattgtgcaaagttaattcaaacactggtataccccatggaaaactaccatactcatcaaccccaattatgttcaaaatctcaacaggaactttttttgagtaaacgctactaatcaaacaattagtaacaaggtacaaaacagccatcttcacagcatactcatctgacttgaaatcactatacataaacctatgctcaacagcactaacagtcactgtctgatcacaaaaatatcgatcaacaaaagcattttctctgtgtgtatacttactcaaatcggcatcaccaacacacagtaaaccagaaacaacagcaaactcagctaaactgaatctgaaattctcatcaccaaacttaaaccacatttctttttcatttttctgatatacctccctatgtaaggcattatgaactaattgagactgaaaaccaacaggatggctatccaaaaaataaccaaaacaagtatcacgaaacaacttacgttgatctttagtcaacttggaattaatatttttgacaacaatgttatcctgattagggaataacatcacttttccctgaatcttttcaccaggcttgaaatataaatcccattcctgtaaaaaaaaatgatatacaaagaaatccacacattaaactaaaaataagcatcaataaacaacttcacaggatacaataatcatttaaatttgtaaaccaatactttccactgtaaacaaaaaaaaaatacacatcaatacctaaaaaactataataaaccataaacatacaaaaataaaccagtaagcttaaacataaacctaaataaacaaaatcgaaaaaaaattaacaaataaactaaaa

SEQ ID NO: 135352 - DNA, 506 bp, Cannabis sativa
aaattatgtatttatttaagggtgctttcactttatagtttggtaaaaaaaaaaaaacctaggttctattcgggcattagagaagtgttctagagtaaacacttatcagttttacattgtgacatagggccactgttcatcgtgtgaatatccattcaagttgatcgacacacttgaattaggaaacaaggtaagattagtataaaacatgtatataaatatgtgtatgtatgtaaattgcatgttgtgtatgtaattcgtatactaccaacactagtacggtagcagtacggagtatattggtacagtatatgatgttcaaagggtacgatctgatgttattaatactagtacgagacgattaggtagtttatgtgctacaacacttagtagtactcagtttagccataccgacactagtacgagacgagtacttagtaaatgtggtacaaaggttgtacttttattaaaaatattcttgatcatctgtaaagccttgtagatag

SEQ ID NO: 135353 - DNA, 925 bp, Cannabis sativa
  modified_base (882)..(882): a, c, t, g, unknown or other
acagttctactttcatgtgtaggtagaggaaaggcaaacgctgaacaggagtgagcttgagcttggatgggattgtacatgtcacggtggtgcgaccttgagtgttcggtctttggatatctgaggttgtcattttgtagtcgatgtgcgacctgattaatgtattttggaacattttgtaaaaatgtttcgaaacgggatcccgactattgtgaatagttatgtaaagtttataaagttttaaagtgaatactaaagttttaatttgacacgattttcgagaaaattctttgattagcaaatatagcagtgcaattgaaaaatcactgtagcgtgcctttgcattagggcattacaattttggtatcaaagcctccacgtggtctaccgaagcttgccaagacatgtacaatcttcatcagagaaagctcggctaatggttcagtaagctcgtacttgtttaatattatatgtgattattaaagcatgttagaaagcatatcagtttatagttatttattttaatgcattgccttaaactccataagagcggtattaagtttttatgatcgctgtctgacctccctggtttattgattcgcaggctaagtcttattaaatggacgcctagcaaaatacaagtagttagggtaatagggtcgagagcagaggtggtcagggaaatcaaattccccataatccccgtggtcgcagctgaggtcgtggcagatttcagggtggtcgacatgtaaatccacctcaagctcctccggattaggagcagagatttgcggaaatgcaacatcatatccgtcagcaagacaaagaaattttaagattaaggtagtagggtcctcctgctgtaacaccctaactagcatnggcgtattacgtgatttttaaatgtactgtgcagctcgttgct

SEQ ID NO: 135354 - DNA, 877 bp, Cannabis sativa
  modified_base (124)..(129): a, c, t, g, unknown or other
ttttggtctgggtgatacgtatattttgggaacatgatagtacaattgagtaggagcgctaatcatagatatagaatctatagcgtctattcggaaatggaagtgaaatgatgattttcttcgnnnnnngctaaatagagataaatgatacaacactcattttagtgattatattagttcatgatgagtccatatttatcaatttatgtattaatgttcatgaattgattctttaaattattgattagtgtgattttaatttgttaggctattttagaaactattcatgcatttagagtcttttggagggattttagcatattttggtggaaaatagtagaagccggcgagctcgattgtacaaggttaaaatgaattgcaaattaggatgaccttagatgaagaattggacttagcgttcaacatgaaagttttagatctcgttcttagctttctagagcatcttaaatcgtcaaattctaagtaatatcgagaaagttatggccaaaatactatcagtcatcacaacaagaaatttctgaaaataaaaatatttaaaaataaagatagattttcgagtagagttgcgattttttttttatcttttttttttcaaaagatgagttatcttttcttttagtgagatattttctaatactattataaatagaatcctaattctaataggattcatctaactttcctatcaccataaataagacctcttaggctaccaatgaaataattctaaaagctacaaattagagagagcaaatcagatagagagcaaggaagagacggagattggcttcgaagtgttcttcatcataattcttttcttctccttctacttttactaaatattatgattttagtt

SEQ ID NO: 135355 - DNA, 725 bp, Cannabis sativa
atttagatcctggtaaaatattcccaataagtacaatatatcgcagaacttacttcactacggatgaatatttaagatattcaaagtccactaagcataaataattaatagcaaaaagttagtgaatgtaaacctgtagcaagctaaaatcttatcaactcgatccaaattaactattcagaaccttgaaaattaactcacaacctacaatataatgaaatacaacgaaattaaaaatttacttatttaagtactacttactagttactaattagtaaattatatacataatttttaaaaaaatttacatatacatacatatataataaattatagcttacactaacaaaaatttaaaaatttcattcctaaactaactaaatctctcctatcttattctcattaaccatacatatatataaagaggtcttatgtaattcctcattatggctcgagggatttgacacctcaaataagacaaaattcataaattatattaataagttatacaattcaattttactttcaatgatcattatatgaccgtgtgattaaatatataaaaatattattttataaatgccactttaatatttataatattattttagaaatttttacatcaaaaatataaaatacaatttttattacaccaataccactacacggctatatcaactttttaactcttcttctttattttattactattttaccacatgcac

SEQ ID NO: 135356 - DNA, 677 bp, Cannabis sativa
tctggtgcctctgtaagtaacacggccagtaaaatgctcggatgctggaattatgagtctgggagccatctgaaaaaataaataacaaataaatgttactgtcaaaaaatttaagaatggtcgacatcacattgacatcatgtcgatattctatcgacattatcaaacagtaaacaacaacataatttggtcgacaacatatcgaaatattgtcgacatgttgtcgatattccaagaaaaaggatcataatttgtagcaaatcaacaatatcgacacaaggttgacatcatgtcgacatgacgtcgacattatcaacttagctatgtggacagctcattgtcgacattgtgtcgacacaaggtcgacatcatgttgacatgaagtcgacattatcaacttagctataacaaatcattgtcgacattgtgtcgacattggatgtcaacataccgtcgacaaattttcgacattaaaggtcacataaagcaccaaaactattgtgtcgacaacctatcgacacaccctacgacatcctatcgatatacattaacaacacatagtcaaagttcacataaacaatgataagtccatcgatatcatatcgataaattatcgataaaccatcgaaaaccctgtacatacatataatttcgccataaacaatccacagaatcaa

SEQ ID NO: 135357 - DNA, 812 bp, Cannabis sativa
  modified_base (32)..(59): a, c, t, g, unknown or other
tttagaaagttcttatttaggatgttaataannnnnnnnnnnnnnnnnnnnnnnnnnnnggtaaaataaattccaacacctctattgtccagttgcttcaatgcacgagcacaatatcttctaggggacccattagttggctctttgcatgtattttacctcattagtgggatttttacaaaaatcctaagcaattcatggacatgtccatatccgccccctttagcctataaatacccttgtatttccatttgaagggggatcgaaatgaaggtagtcgaagctttgctaaaattactctatacttccctcttcttcaagagaaaccaagagtacagagttagagtttcttgtataaacactgtaaaaatacaaacctttaaaggccaatagattgactcgtgaactaaggctcattaacgcttgaaccacgtaaaaatctacatctcatttattacaatatttagttatttcttaagctcttattgtattagtttctgaaaattttggtaaataataacataaagtatttttttttttttaatattacaatttaaatttaaacccattgtacatatttaaaaaatatatttctattattatttttttttactcagtccacatatctaaaaaatatctttttattaatataatttttttaaacaataaaatagagaaaatattatgtttcttaaattagtgtgatggcgttacttattgtagttactaaaaaatattttttattatttttttaatataaaaggagaatgctaatttttaaaaaattaaaagtattataaaattaaaatatt

SEQ ID NO: 135358 - DNA, 819 bp, Cannabis sativa
ggtaaatttagccaccaaatatttgcaaggtctacaaataaatttttagagtgattacaatgctggaatttaagcccctaaccagcatgtatatgtcttgtaaaattgtattaaaatcaacgtttaatgttagaaatttatatgtaaaatatgaggcatatataatcgtgtatggaatataaaataaacaaaatgattgatcatatacatgtacgatgaaagaaatcgaaatacctctaactattaattttttgagcatcactcccacacgatctttggatctccaaaagaaaataaaacttagttggtgtaggtattcaggcttccaagctctctctaactctcttagatagatttaatgtatttcatagaatgagtagtgagcttgaagaacggtatcctatatttataagtgagatacttcatcagtatatgtgccacaatgaattgtcaaaatattttgacaattaattttagaaattaaattgggtaaccaaaatatttagtaattaaatctgaccataattagaatattttaattgattaaaaaataaataataatattttaaaatcaaatcaaataaaatattttatttgttatcatatataaaattattctaatattcacccatttggttaacatttaaattaatttaccacttaaacttcaatgattatctttgctatataacaaatatatgaatcattgcgataagtactcattatacgatgagtattatctttcatgtattacgatatgttttttttttatcaagaaagaaaaatcttcattaatcaacaagcaaaatagccaactta

SEQ ID NO: 135359 - DNA, 635 bp, Cannabis sativa
  modified_base (602)..(609): a, c, t, g, unknown or other
actaattagattgtaaagagttttgtttagggcataaaacccaacagattgtacatgtcgaggcaacgtgacctgaagtgttcagtctcgggacatctgaggttgtattttgtagtcgttgtgcgtctactttataaatgtattttgttaacatttgtaaaagtttaactcaggatcccgactatgtaaatatatatagatataagtttataatatttcacaataatttggcacaatattcaaggaaaatcctttgattagcaaaggtggcacattaattaaaaaatcattgtagcgcacctaagtattagggcgttacaattttggtatcaaagccgccaggtttgtctaccgaagatcgtctagacatgtacaatcatcgtcaaaaaaaagtttggctcacggttcagtaagcctttatttgtttagaatgtatgtcattagcaaaggatgtcagcaagcatagtagtttataattatttattttaatgcattgccttaaaatccataagagcggtataagcctatgtgatcgatgtctgacctgcctgacttgtcccattaaatggacacacagcgaaaaactgttgggttttatgccnnnnnnnnaactccatttcaatgtaatctatttt

SEQ ID NO: 135360 - DNA, 1083 bp, Cannabis sativa
gttccaacaaccgagaaatctacaaaaagcaaacagaggaactgaatatattatattgtttggattcttgttccatagatgttgaatatagcatgctagttaattagtcactcattctcatcacatgtatgaaaatcactaactaataataacaaacaaacaaattgaagaggatgcacacacatgaaaaagggtagaatcttttgatcttacaccatgtttgaaactattcaaaagaactcaacttattcaaacttggttttaatgatgtagttggatatgttttactctaattctcaagaacaaaactttacatcaaaattatgaattctatagtccattcatgaaattcgtttatggtatacataccatttgaaaagaaagggcattgagctgcctaggcctattcaataccagagtcctcacatattgcttctcctccaccaaaacctatggtatcatcatcaaaaacagcgttaaagagtatcaattgaaaaccaaactcatttaacaagatttcaggcaatttcatttcagagaattcagacctggtcttcttcggaacccattacagactgagccctcctccttctacaaatacaatcggagttaagaaccggtgatatcaaatggtaatttaattaaacttaatctctgtacaaaagcaacgtacctaacctctgttaacaaaaatttacgagagagagcgtagatgtacagtaaagtgtgagaatttagggcaacaaatgggaggagagagctccggggactatggcggtgggtggctcagagctcacacctttgattgattgttagatgaacattgcatgtgctctcacgtgactatattttggatttgctaattaggatttttaaattctaatttttacatgtataaaatcatactttttatatgtattttcagattattaaatttaaaaatttttatctaattttattaatagaagtctaatatatatactaggtaggagttacgtgccgaggcacgtaaagattagttttaggtaaagtttagttatttttttttatttcttcttatttagattgtatgtaaaggtatga

SEQ ID NO: 135361 - DNA, 640 bp, Cannabis sativa
taaaataaattccaacacaaagcatacttgaacattagaaaaaatagtgggttggatcttttgttatctccttcatcacacaaagcacgcccttgcttgcatatacgaaatttgttgtcgattatctataatttgccaaaaatatcaacttgtattactcataaaggcatagagttataaaaaggcgatacggaatgtcagacacttctgggatactaaaacaggggaaagaatgtcctctcgaggaccttggaaaggaattgcaagtctatatggtgaatatttgagtttggtttcatttcaattaaggaatggggagaaaattcgattttgggaagatgtgtggattggacaaaattctctgttgaccttctacccggatttagccattctggctagatgtaagaataagtgcatcaaagacatggcaataattgaggaaggtggtttcagggtgtctaattgggactttaatttcaaaaggaatatgttagacagggaagtcccaagtttaatggagctggtgcagtgattggaacatgtgaacatatcccattcctcgattgatagtaggggttggaaaccagagtacggaggctctttctcctgcaaatctgcctttctttggttcacctcaagt

SEQ ID NO: 135362 - DNA, 766 bp, Cannabis sativa
aactgttaacgtaaattttcgttaaccagatatgagcctaaacagttgtaaacttacacagaaaaaataaagacagtaaagaaaaaagtatgaacacaaaagattttttacgtgcttttgcagttaaaattctgtatagtccacgagttaatcttattagatttctgatattgttctagggccttttttcttatgaatttttcgttccttttttattctatcttgcctctatttataattacatagtaggcagttaattactaagttaactaatatcttcacaacgattatcccctgaaattgtgggggtctaattacatatctcgtaaagtaaatgcagttattatttgaatatcacacaactgtgattagtcgcttttactgggtcaaaataaacgtgtatcaaatacgttgcaatagagcagcggtaaccttgatagtgagctggagattttcctatttctttccaaggttgataatgtaaatctcgtcgcttttactctgaaaacataacaccctatctaacaatcacagtttttggtgacgaggtgatcttcaactgtcaatatcatttgaatgtcaatctttatctgacagaactggctcctcagagctgtgaatcttattgaaaagtgaggataccgcgagtatgtcttcttatggcgaggtggatgcctcgttatgacttgctttggttcacttgtctgttatacttagtttgtatactgtaaattatatgccaagtgtcttcacagtcattatatct

SEQ ID NO: 135363 - DNA, 602 bp, Cannabis sativa
ctcttcaactgtgtaatctcatacctacacagcctcagaatcatcacacttgaccttctccaagcgaagtgggattgcacaacttacccggtatttccctcttacgtatcacacgactactgactgtcacaatctatctctttaacactatatctcagctcactctttcttaatctttcgacctatcttagtgaatggccggacctcatcatcgagaaaaagcatacacattcacctcaataatgggtaggtgttgtaaaaaaaattctttaatatttagattagtatgtagtttatttttgatagatctgtgtggttgttgtttgcattggtgttattttgctggtgttttttatcaaaatggcgagatctggctttctcgcaaaactaggattcttatttgattattaggggtgttcgcggtgcgggtggtgcagttcttgactattttttcaaaccaacccgcacatgcaatttttttttttttaattttatttttcaaatcgcaaatcgcacccgcaccgtgaaactaaaaaatcgcaccgtaaaaaaatgtgcagtgcggtttatgcggtttttacggtttggactatcactaaata

SEQ ID NO: 135364 - DNA, 636 bp, Cannabis sativa
ataagaaagaaaagaacaaaatataaaaggaaagggaagagaaatgcaaacaaaaaaaagcttgtgtccttctcttcttgtgcacttgggtcccccttctgttttcttctctttgtactttctgcaattactcccctttaaaaaatggcagcagctcacgttatatagaagatgtagatggtgtacttggctttttcttcttttagttgttgggtccctagggtacaaaatcacactctaaaattagaagcccaatcatttttgcactttggccccactaggtttagtcccccctttacaaagcttccaactggtctcatttttagagacaaatgcattcctgttgatgtggacagctaaatctcgtgtttccacgtcactgccagaatgctgaattcgtttcagcattgcttcagcattctgtcccaatttcagcttttgttcccgcttcttccttgcttccttttctttttcatatcaatttaattcttcctttttcaacaacaaacaagcacaattaattagaaaaacacacttaacaatatccatttttacaagacttcaaagttagcttactaaatagaaaatgaaactaagactaactaaaattaagcaaacaaacacattttcactact

SEQ ID NO: 135365 - DNA, 794 bp, Cannabis sativa
  modified_base (160)..(161): a, c, t, g, unknown or other
cacattttaaatctactaattgtcaaagatggcttatctgtcattggtgataatattgacaaaatttgagacaatgttacttattggtcgggtacaccaaaaagacatgaaaaatttgaggacactacttgtcaacttggagtaccatacaccaaaaaanntcacttgattgtgtaacgaggtggaattcaacttttctgatgcttagcacagttttatcgtacaagataatatttaaacatgcaaggttgcgtttgttgcgttttaggagtgtcccttcggaaattgattggcaagatgttcaacaattgtgtgataagttagagttgtttcatgaagtgatgattattttctggaacaaaataccttaccgctaatatttttttttctaaaaatatgtgaaattaagacaaacattgaatcatggatgtcatcagatgtgccttttaataaggacatgacaactcaaatgatgtccaagttctaaaaatattagggaaagattcacgggcttatgtgtgtggcggttgttttagacccgaggtacaagttcatgttgttcgaatattattttcctgtaatctatggagatgagtaatatgtaactgaaattgcgaatgttcgtgagctttgttgcgagctactggagtagtacgggtttaagctttctcatttgagagaaagagaggttcaggaagaaaatgtatcgacatcgtcttccacatggcgtttggatgccctttctaactttgacagatttgttagagcttcctatcgagtagagaatatgaagt

SEQ ID NO: 135366 - DNA, 520 bp, Cannabis sativa
  modified_base (197)..(197): a, c, t, g, unknown or other
  modified_base (481)..(483): a, c, t, g, unknown or other
aaggaaacaatttccattccattcatttgttttgttgcatattaaagtgttggaatgtcattccaatggaatgacctttccaccatttcggtagaatgataattccatttcgaaatggtaggaaagaccattccaatgcacgatgagaaaaaatttaataatttttttatcaattatttttatacattttaaatttnattccatttctattcccattcccattctcattcccattcatattcctatgttttcattccttccaaccaaacgccaccaagagtcatcttcaatccaaactgaagtttcatttagtcccaaagccaatttttccaattcgtgtgttgtagtattaacagtgcatctcaaatgcttgatcgagacatcagggtaattagataaagcttgtttaatctagaaaattaggagctcgtttggaacgtcgtattaggtcgtattgtactgtattgtattatattgaatnnnattatatatcatgtttttatataatattatgttaaac

SEQ ID NO: 135367 - DNA, 858 bp, Cannabis sativa
  modified_base (78)..(84): a, c, t, g, unknown or other
atgacacactaaataagtgatgaaaatacttatgtgtctttattgataatcaaatgataaagattatattgaaatagnnnnnnntttagggcacaaagcccaacactgaccagactagctcttggttacgcaggttgttctagtagtatggatgccaggtgaaacacaaagagtcaaggtaattcggtcgaatctagtggcggtcagtgagtttagttcccccaaatgtttgtggctgaggtagaggccctaatggcagggcacgcggtcagggtgatgttaacccaccacaggctgcccaagaatgggaaaataggtttgcaacaatgcaagctagaattaacgagtaagacgataagattagatgcttgagacagcagggtgctcctgcaatccctgctccagaaatacaggtagctcctgcccctgctgtgcaggcaggacaagtggctacagtgaaccgaatggaaccactgtatgaaaggttccgcaagtaggcagctctaatcttcctaggaggtcctgatgttatgaaagtcgagcagtgggtaacggttattactagaattctgaattttatgggcgtcaccggcaatgacagagtggcttgtgccacatttcagtttcaagaagacgctctagtatggtgggacatggtatccctgacccataatgttactaagattacccgggaaaagttccaagaattgatcaatacgaagtactataatgaagcagtcaagagtacaaaaataaaaataccttgatggattgaattcaaagataagacatgatctaatgatctctactgatgacaacaccacctatgttgatatggtgggaaaggcactacgagct

SEQ ID NO: 135368 - DNA, 557 bp, Cannabis sativa
caaacgggcttgcaaacatctaagggtattattacaagagaattgaagtaatagactgactttctcttcttcttcttccatttcttttaatatttgaacataatacttgaagatgaagagcatataactctctagtgatattggctataaccagaagatactactctagaatggtagtattcggatcgggtgtacttagattcccaatcctaaaaaaaataaaagaaaacactactaaaaaaatactacaacaacactaaaaaaattaaagtataacaaaaacaagcataaaaaaaaatagaacaaaaataatgaaatcacatacctctacaacccttttcacaattatttcctcaaccacatctgttgattgcacaatctttactggggattaccctttccctaaaatttaacaaaacaaaactaaaacaacaacaatacacaacatgaaaaaacagaaaatcatagaataaaataaacaaaaaaatcaacatgcaaaatgagaaccccaaataatttacagagaaatgaacaatataatgaaaatgtaaaaaaaa

SEQ ID NO: 135369 - DNA, 1460 bp, Cannabis sativa
aactttaatttatactaaaatattatatatttaagtgtccataaaagtgaataccatatatagctttacataaaagataatacaatacaatataatacgacctaatacggcgttccaacttattaatacttactaaagtgtggaatacggaaaactaattaattaatgttgtaattttttgtttaatatttgcagttagcagttgcaaatccaaaatggcaagtgattcacaagctcaaattggccaagtttatggacaaaattggaaaagagaggattttcatgacggtaggtgaagctgtagagggatgccttggatctagattagtgcctaattctgaaattatgaattgttgattattagttgcatgcactcatgcatgttgggatattcaattatatgatattgtaggtttgagtgttgtcaaaaaaatattgtaaaaatataatgaataattaaagaattggaggtgcttacaatatataatttccatgtaaagaaacatatttatgagaatagttagtgaattctctcatttttgttagtgagatggtataactttgcttcctatcatgcatcctatgtcttacaatttttatcacagctaaaattaaaattcaaactaataataattttaataggtataataattttttactataattatattcttaactaaatatataatatgtattaagataaaaataatagttaataaattaaacactataagaaatgtcacttttattgacgcatttttatgttatataataatatatttagtgtaaatatataatatgtattaagataaaaataatagttaataaacaaaacactacaagaaatgtttagtataaatgtataatatgtttagaattttataaattgattaattaaaatcaattaattgagtctatgaggtaatattttctcaactagtgcgaggactgtaaacctatataatcaaattttcaataagtagttctaaaatttactaagtaaattctctatcttattaatttctcatgactcaactatagattcgaaaattgtactattaattatattgaacgctctatatgttctaaatgtagacgctattaattgtctattattttaatccaaataatcaacgattctctatagataatttacatcgagtatggacaaatttaccgttttacccttcaatgtattttatccttacaatacttagctccttgtaaatgatatttcagtaaactaatataattactgaaataagtactccaccatttaatctcgtttagccaagctcgaaggaaatcatcattttacttatatgcatttatagaagctatagattccgtatttgtgactagcgctcttactcaattgtactaccatcttctcaagatgtaagtatcgggaagatccaattggtcaactttaacgaacaagtcaaaaaatacaaataata

SEQ ID NO: 135370 - DNA, 614 bp, Cannabis sativa
tctaaagccttatgtaagtttttcgcatcccgtactttattgttcgtgttcattgcatgcttcactgttcatctgctttttctgggtttgatgttttaagtttccgggaatttttgtcttgagtttctgtgtaatacgttagattcctcttttctggtgtttgagtcacttttattttgcgtattacacatttttttaaggcccatcttttctttacgtaatgaccttcaggggttcagagaggactttatctttctcggttttcaccccttcttttgtttctttgcttattcgtaaggtcaccacctgtgggattcttgcacccgacttttgtccaggaaaaccttctaaggctttctaattgacaaccgtccggagggggccacttttcagcggttagggtttggtatggggcctgactgctggaattttaactcttttttcagaaccaaaatgtctgcatccagttccaagtcttctcagaaaggaggaaaatgcctggccaccctagaggaggtgatgaagggtcccggggcccaggaaggatataagcctcgggccacggggttggaagcggccgagcttcactctacccttacttgcccccaccatct

SEQ ID NO: 135371 - DNA, 513 bp, Cannabis sativa
gtgtcataatacaatatcatgtataatatcattgcaccacctaattaggtgagcccgtgccacaacttggcactaatatatcgcatcatctaatcatacgatcccgctcacggtacttatcatatgtcactaacgcccgtacttatgcgcgatacgtcaccaggaaaaaaacccaacaatggtttcaatctatgccataaccaggtgatttcatactgacacccgtacctacacccgatacattgtcaaaattattacatcatctaatcaggtgaagcctgtacctacgcttggtactcatcatatgtcactaacgcccgtacctatgttcgatacgtcgccaggtatatcgctcaactaattaggtgagcccatatattatgtccatagtatcattacattatcattgcctaatcaaaaaatcgataatttcagaacctgtcatgctatgcggtacattatacttttgttacctcaagtttcggatcaggtatgttggccgacctgcttgga

SEQ ID NO: 135372 - DNA, 1023 bp, Cannabis sativa
  modified_base (26)..(34): a, c, t, g, unknown or other
  modified_base (991)..(996): a, c, t, g, unknown or other
atattaggatgttaaaaacatacttnnnnnnnnntctagatcctggtaaaatatattggaacaactggtattagagctatggtaattgatttactttttcaagtaatatggatttaaaatgatgtatgtgtgatttggatgttgatctatgtgtttgttggtgattgattgatgtttgcagaatttttacgtaaaataattagattttcgttctggaattatttgtattggatagtatgaaaaaattaagcaattcattttttttttacagaactcaatttcaattttaggggtgcacgcgcttcagacatggttcatgtccaagatttctcggtctgatgggcgtgattttgtctgaatggggctatgcgcgcgcggaaatgctgctggcagcatccgtgtgcgtgaaatcagccccaatccgcctagtgcatgcgcctaaatggtatgcaatgcataccatgcgagccaaatgcaattttttttttatttattttttttttcatgctttttcatagaattaatttcgaattttttgtgtaattatgtatttagatttttatttttcatatttgaaatctaattatcaaaatttaattaattaatatattttttaattaatttaagatattagtgatatttgaaccttgaaaataggtaaaaatctatcttttttcttagtttgttatcttatttttcaaaattaaattattttatcttatttttaaatttaaagttagatattttatttttaaattatttaattaatttttataaaatgaccttatttgaaattaaaataagattattttaatcaagaaattttaaattgtaacaagatattttgctaactttcaaatttcgttattttatttaaattaaattataaaattagataaatattatttatttatcatttttattttatgagatatttaattttatttttaaaataacattaaatttgaaaagttgttagcattttttgaannnnnntttaggtttgttgaaaacctaattttt

SEQ ID NO: 135373 - DNA, 1483 bp, Cannabis sativa
aattaattaaaattaatctcaaaattgaaaagaacattataaaatttgaatcttgtgggatcctgaactaataatggatctaaattgagcatgtcattgttggagttgtgggaaccaaaaaaataactgtcttgctgaaccatttactttgtcaatatatatatatatatattggtgaaacatatatcaatccttcaatataagcagcatccaacaaggttctctatcaggttgttgtctgcctatcgaccagacgacaactcgcccttaagagaaatacctctctacaatcttaatgtgtcaacgagatacaatcttatgataacttgtcttgctacatgttacaattttgattgcatgtcatacatgctaaaatttaggataataattatattgtacaattgtagatcttaaatataagggtagcaattcgatcatttaatacatgtctgcctccttcattgttagtatctaaaatatctcatagttatctaaagttaacatatactatccaatttaattgagatcaacggtaatcgagatcattcaaatcttttttcagtgcaaaaacttttcatctatatattatgtatgcttgtctttgacaaagagctataactttttattcggatgctaatgcatatgttattttattgttcaatgttataattaatgtaatacaatcataaatatatattaataataaaaaaatattagacttcctaccacgctaattacaatattgaaatgtttataatataattgttccatacattattgtttaaaataaaaattttaaattataaaattaatttaaaagttaaattaataataaataaaataaaataaatcatgtccttacaagggtagcaattcaatcgtttatagtacgtttgaagcacctcataattatctaaagttgtcatagactattgaatttagatgatatcgacggtaaatcgagatcgttcagatattttttagtgcaaaatttttcatctatttataatgtattttttttatttgaaaaaatttattattcaatttttcagatattattattattattatttttattgcatgtgttatttaattgttgactattatactttatgtaatacaaccatcaatatatattaacaaatacaaatttaaaatttttcaccacaataattacaaatgttacaatttttacaatataagaattattctatattaataaatattaaagaaatttaaattattgtttataaaaaaaaaataaagaactttaaattattaatctaatttaaaagtttaaattaaaaaaaaaactcatgtcttttaaaaggattgaactcatgttattgtacttgatatgagataattttactgcttacactatgattatattattggttgtattgattattgtagcattaaataacttgaatttattgtattaagtagaaaataaaattaattaaaaataaatatataactt

SEQ ID NO: 135374 - DNA, 1046 bp, Cannabis sativa
  modified_base (453)..(455): a, c, t, g, unknown or other
gggatgatttggttgagattggttgctaaattttcgagttttgatggttggtttctgggtttggaacccaggtgtcgcggcatggtttgagcatgctgtggcccgcccccttgaatggaacctgggagttggtcccaagtgccacggcttggcttgggcatgctgtggcccgccctagaatttttgggcagtttgtagttccaactttgaaatttcataactttttattccgaactccgattcgggagttctttatatcgttgaaaaactcgttctgagctctgtatgattatctgaatttttaatgccatgaatatattatatgtgtatggaatcaggggttaaccctagttgtgaaaatctcaaattgtgtgaataggattaccggcacctggtcaggagcacccggggaatcgaaatctctgctactgcgggacaacaggtaagacagtnnntagcacgtagagtatgcgcggtggagcttatgttgaaattgatatatgtgagtaattgtaaccgggattagggttattaccctaatatgagcgattaatggcctagggttattaccctagtgatataaatgagtaaatgttatgccatgttaagtgtatgattatattaagatttaagggttatgcattcaaggcataatcaagttggactcggtaatcataaccgagatgaaccattctaagacattattgtatatagatgtgtgagagcaacacgtaggtctacaccacgtagacataaataggcatgtgagggcaacatgtaggtctgtctcacacaggcagatttgaatggcattattgtttatattgcatgatgagcatattattgatatgtattatactatcttgctaggcttggctcacaggtgctctactgtgcaggaaagggtaagtcgatcgctgatcagccataagtgcaggaccaggatgaagaatgtacatgtccgggccatatcagacaaagcgggttggggtctaccagtgttgtatttttgagactttgttttgccgcttaggccggctaaaaga

SEQ ID NO: 135375 - DNA, 729 bp, Cannabis sativa
  modified_base (369)..(371): a, c, t, g, unknown or other
  modified_base (639)..(646): a, c, t, g, unknown or other
ttattttaattttattaatttataagattagaaaatgatattgaaaatatctatttagttattttcaaatctcttatcttattcgatatttaatttattctgataaaaataatttaaataaacttagatattttaaaattagtttaattttaaatttttgaaacgatattttaggttatttttaacaaccctaaattttcaaaatagttggttacttaaaatgataatttaattatattaatatcttacttcacaatttgttacataaatattgtgtttattttatttaaattatttattcaaaacttttttttaacaaacccattatttatttgatatgaattgctatgattaacttgttgatagatnnnatgatctgattttaattatagtccaattgtcactagatcttataaataatttgtaataggtaaattttatatttcttttatctgtgtaaacctagaaatatgatagggtccatccaaatcaatttgacctgtgtgagcctatatgtttgtttctaggcttaaatgcatataggaagcccatttatttctaaatatttaaatgaactaggtcgctaagtaaaatattactcaaatgatagttttatttaggcccaattagtattggacnnnnnnnntgaataacaattatttaatgaaaggttaaatttctctcatttgggccttgtgtgagagctagagggccattagtagtgggtac

SEQ ID NO: 135376 - DNA, 785 bp, Cannabis sativa
  modified_base (27)..(43): a, c, t, g, unknown or other
aattttccataattaaacataattaannnnnnnnnnnnnnnnnaaactaagcggtctttacaaaactcttattgatgcccaagttaattacaccactattgagaaagagctgtttgatgtagtttttgtctttgaaaaattcagatcgtatcttgtggggaccaaggtcattgtgtatactgaccactcagaaatcaagtatttgatagccaagaaagattctaaattgaggctcatacgttgggttttgttgctacaagagttcagtttggaactccgagacaaaaaagggacagaaaacaaagtgggggaccatctatccaggttggaaaccaacactcacaatagccattgagagggagaattacaaattcaagactcattcccagacgaacaactgctggtggtggagcaagcacaggtaccatggtatgtggatattgtaaactacttagttggaggtgcccacccacctaattttaccaaacagcagctcaaaaagttcattcatgatagtaggttttatttttagaatgagccatacttgtacaaacaatgtctggatcgtataatgcgaagatgtgtgcctgcaaatgaagttagaagcatcttggagcattgtcattcagccccatatggtggccattttggtggacaacacacgactgccaaagtatttcagtcgggttattattagccctcaatattcaaggatgcccatgattttgttcaaagatgtgatcgctgttggaatttatttaaccaggattttagatctactcaca

SEQ ID NO: 135377 - DNA, 522 bp, Cannabis sativa
ttttttgttgcctttcgtaaaaggcctttatccctttcgtttttgacttgattgatatttttccgaatctcttttttatttatttaaagagaaagtacgacgaaagttaccatgaaattcagagttcctagcttttagtttatacatagaatgccagcttcttgtgatctcggctccatccatagaggacagtctgtacgccccatttcccgtcgggcttattacttggtacggtccttcccagttggtggataactttcccgctcgggcttcttcggtgttctgaaaaacttttcttagaactagttcccccgggaggaaattcctgggcctaactttcttattgtattgctttgccaccgcggaacaataattctacattcgggacaaggcacactcccttctttcctcgacgtcgttagcatcttataatctgaggaaagtgttgtcttcggtacttaattcgtatcgcaaagtaggcacttgcgtttccgtcgggataactgttggaaattattttac

SEQ ID NO: 135378 - DNA, 637 bp, Cannabis sativa
aattaaattagtgacaacttgtgactaaatactatgttttcattacaaggaatattttgttgtgactacaggtcacatttagtcacgaaaaaaattatgttgtaactaaaaacttgtcactaaaaattactatgactttattagattttgcatgtggctattgttacatagtaaaaaaaatcaaaataagtgttttataatgatacaatagattttattttaagctattcaagattaaaaatatattgatgactataaaaagttgttaacttttttttatttatttttgtgtgttcttactctaaaatattatttgcagagcatcatattttttagacatcatgattgattatgttgattataaatacaaatttattatattattggaataaatttaaagtcaagtttatacatttatgttaatgctatatcaacaaattatttccacgaggtcactcatcctgaaattattccaggtcatccacgcttaactatggagttctttcgtaatgggctaccatagttaagtgtgcttaacttaagaaaatttaaagatcggtgacctcctgagaagttttcccaagaagcatgcgaatgaggacaaagtatgctggaaacactcgtattactttgtagg

SEQ ID NO: 135379 - DNA, 632 bp, Cannabis sativa
  modified_base (575)..(592): a, c, t, g, unknown or other
attctttagatctatggttatacacttataattatatgtaatatgtttatctataaaattgaatattgttattgcatattttatgagtgataaagaaactaacaacgttgtgttctaagaaaaggtcagcacccattatgttcatgaaacattaaattacaacttagtgtaaataaatgaaagaatgtgttttgaggtatttatccttttctttaggtgaaatgagctacttaaaaattttcattcagttggatcaagatacgtgggtagaatgacataatttttaaaacagattgtcttgaagttactgaattgtaccactttttgaattacatgtgtttctattcgaaaacacggataacacttctaatcgaagttagcatatcgacattatttatttaggcataacaaggtgtgaaaagtggttattcagcacacaacactaattgtgtaatcgcagtatccttggctaaaggcatgccgtaatacaaattcaaggatagtaaagtaaatttggaaatcgattacgtaccccttatgcagtttttggttgtactgttggaaattattttacnnnnnnnnnnnnnnnnnncacaagtatgttatttaaacaccctaaataagaactttct

SEQ ID NO: 135380 - DNA, 677 bp, Cannabis sativa
aataaataaaaatttattaaaaaattcgaaatttttcttcttttttttttcgaaaaatgcactgcataaacgacatgtcggcttttgcaaacgcgaaacgacacgtcattttatcaattccgaaggggctaatatgtatgaaaaaatgacatgttgttgtttgcaagggggaaaacgacatatcgtttacactcctgaagggctgcctcacaagacgaaaaacgacatgtcgttttccacagtgtgcaaaacgacatgtcgtttgcaacaaacgacagctgcaacatatgaaaaacaacatgtcgtttttccacactgtggaaaacgacacgtcgtttagggttgtcttcttcagccaaccgggtcattttgacccgtttttctacacgtgggtccgacagacccgacccaaactcgatcaaaaagacaattccgacgaccaaaaatgcccaaattaattccaaatgaatctcaacgcaaaaatttagacattcatataaatttgatgcatcgaaaatacataaaacaaagactttaaaatcaccaaaattttcgggtctgaaaaatatattctagaaaattttgagatttttttgtttttcaaagtggattttcatgcttagaacaatctatattaatatatgaatgtattgatacatatacaatgcatatataaa

SEQ ID NO: 135381 - DNA, 1041 bp, Cannabis sativa
  modified_base (643)..(644): a, c, t, g, unknown or other
aagttagcttgcttcacgtattgctcacggagtatttttacaccagtcttcttcactctccctattgtttgacacatatatactacttttaagctataaaatatttgagtaatatctaaatgacaagaaaagacacataaaaatggcattttttttaaaaaaaaaagtgtaaaataatgtccaaaccaagcagtgttagagcatctccaatggtaaaaaaaatgaggatgcttacttatgtggatagatgatgtgacaaaatagtgagatgctatatcattagagtgaaaagaatgtcattctagaatttatgggaatgctatacatcagcatcaatgctatcataattatttaataaaaaattaaaactaaaaatttattattgctaaaaattaggaaacatatacaattttttgataataataaaagactttaatagtaaagtattataaaaatattttgtatggtttcaaaaaaacaaatatataatattttaattaaaattaaataattgaagatatatatatataatattaatgtattagaaagagtttgcattttaattaattataattttattattttaaaagttagtgtgatttttttttcttttaaattttatgttaggcatatttatattaanntataatttttttaaatttagtgtgataatgtatttataattaaaaaaaaaaagtaatatattaaataataatatgtgagatcataataattatagtatttttgaagagtgttatactattagagtgtttttagaagtaaaagtgctaaaaatgatgtggaaaagagataaaataaaatattatatttttaaatcatgtggatattgttagcatccttaattggagatgctcttaccgacacatttcatagatttaaacagttaaacttttaagccatgaaatgaaagccccatatattgacgtacgtgagttgactaatttcgtcaactactacttggccaacattgtttatggaaaatttataaaaatactgtaatttagattaatttttacaaaa

SEQ ID NO: 135382 - DNA, 827 bp, Cannabis sativa
tgtgggattaaattgattagggattgtgttttagacctatttttgaatgtgttgaagtttgaattgattgatattcatggctgtttgattttgaagttggaattttgttgatttaagggcttaaatttggttctaatatggtaaaatgaattggagatttaattgatatgttttagtgctttggaaatgttgtattgatgatattgtactgttctagagcttttgggttgctttggtggtgtttggattgattttgtaggaagagaactcaaaaattgcagccctgcgagaaccagtcggccggttggttctggtgcagcagaactggtcgaccggtttgcctacaggggaaattttttttagtttttcctcagggccggttttagggctcgggatgatttccgtgtctggtatagattgtttagaagttgtaaaacctattttggagctaatgaaagatagggtttaccagttatcggaattagggttattaccgaaatgattgatttaagttatttatttgaatattgttgtcgtgacataggacccgggatcgtcaagctttgattccacttaggtcagcatacacgctaaatttctgaactgaggtaagaaaagtattaaatattgtatatggttaacgttatgactgttatagtttctattatgatcgaaatctcggtatgtgttgttgtgacttaaccttagtccagattaacaatatatattagttgtgactcgattatgatcgagggaaaaatgataggaaacgattatcatcgttgtgactcgattatgatcttgggaaataataggaaacgattatc

SEQ ID NO: 135383 - DNA, 612 bp, Cannabis sativa
gggagccaatgggaggctcacatgcgagccgtgtgtccatgtgggggagtgtgtgcgagtgggggagtgtgtggtaatgtggggggagttgagtgtatgggagaagggtgccaagtgtaaggtggcatggagggtgtgaagataaggtgagaggtgaatgcatgacgacaagaatgacattgggagaggaatcaaaggacaatgcgtgcaagggaagagcgtataatcacgccttctgaagacccgaccaagggtacgctgcaaccactctcctacaacctatacttggggaccaccacgtatgtacctagggaccaccacacatgaacccgaggaccaccacgcatgaaactggggaccacgcgcgtgcacctggagacctcacactgcaaccaccctcctgcaacctgcatctggggaccatctaacactagacaagggtacgaggtgccaagatgcctccagcacctgcagcatgcagcgggaaagcgacatattgtccttatgggaccactttgtacacaaggccattatagcctataattaccctccatctcagatgtgagaggggggttggaaaatcatttggtgtaacttaaatattgaattcaa

SEQ ID NO: 135384 - DNA, 696 bp, Cannabis sativa
aacttcaaacgtattttcggtactataaactattcgaaatttttcaaaaatttacagggatgatgttgtaagcatagcaaaaaccctcgtgaaaaaaaaaattgaaaaaaaaaatttcaacatgtgttttcgggcgtgaagattggctaagaggttgtaacatgaggttgatgatagcactcctcgaaaaatatatataggcatccaattttgcacctattttgtaaaattactcattgtattttattgtaccgcataatgaatctcaggtactttaatgttttctaatattttactgtaattttttttatttatttaacaatcgattgttgtaagttttttaatgattatcaattttgcataatttaaaaataaaaaagtacaaaatggtttatgcaaatgatagtttgtgatagttaatagtacagtagtactacagaaggtgggtccatattgtcagcttgagattattttggtcttttcattattttatatattctatgtatttgtgtagtggtagtagagtacgttatatcacatacccagtaaatttatagtttctacttgatgcttagtaaaagtagtgtacaaaatattacatactattggaattattttacgaggatcttagatctactcacaagaatgttatttaacatcctaaacatgaagttctaaaacgatatgaaataaaca

SEQ ID NO: 135385 - DNA, 507 bp, Cannabis sativa
aaggctcattaactccccaaccacgtaaaaaatcctcatctcactttcttacagctctttagtataatcatattttaacagttgccgaaaatctcggtcaacaataaggatgacatagttgtccctagaaacaaaaatgtctctaattaaatcattatcacactcctttatttacattttaattgtaaataaagagttgaaaaattaattattcaatatactattacatgttatcaatttcctattcctaaataaatttggatgggaggtgttcataaaatagtcgatttaattcaatcaaattcgtaaagtatggatatttgcacttgtgcagatcaaattggattagaaaattcaaaatatgtacttgtgcgaattgaatgttgattgacatgtaaaattaactggaaaaattcaaaatccgtacttacgcgaattggatattaattgacatataatacaaatatatttcaaaacttaatagatcaaatgtatatttcattctta

SEQ ID NO: 135386 - DNA, 801 bp, Cannabis sativa
cggtaacttggtagaggccttcctagtttggtctgaaaactcctactgagggatctctggtatttaggagcactctttggagtactaagtcccatatgaagagtttcatttccttcacttgtttgttgaagtacctagcaaccttctactggtaggcatgaaccttgaggttggcttggtctcttctttcttctattttgtcaagggattccgccaacaaggtgtgtttactcctttgtcataggttatcctcctatgagatggtggctctagttctacaagcaacattgcttgatagccataggctaatataaacggtgtttgcttagtggttgtcttcctggtggtcctgtgtgactagagtacctctgggactaatttagaacaattgccttttgccttttctagatgctttttcaaagtgtccttaagggtcctgttcacaacttccacttgaccattcatttaacgatgagcaatggtggagaagcttttattgatgtcgtgtttgttgtagaagtcagtgaacatgtcactatcaaattgtttcccattgtcttacaaaatattttgtggtcatccaaaccagcatatgatgttcttgacaacaaagtcaaggactttctttgaagttattgtcgtcaggggttcggcttttgtcaacttagtgaagttgtctattgcgactacgacatattgtacacctccttttgcctttaggagttcaccaatgaggtctgttccccacccaacaaagggccaagacgactgcatcaatgtgagctcgtttggtggagctct

SEQ ID NO: 135387 - DNA, 1114 bp, Cannabis sativa
  modified_base (992)..(992): a, c, t, g, unknown or other
actcatagactttgtcctactcatggacctcgtcttgcttatggacctcgttaagcttatggacctcatccttgagtaactctcacatttacttgtgcttatgctttctcgatcattattgcgacaagtacattctcctcctcgtgttgatcgactatgggttctcgtgcaccctgaggtaacgctcgcctcttcacgtctcgtccttctcctttgggtatggttcgttgtatgccccctgctgggggatttcttgttccctagttattggtcgccttttgttctcatttatgtgagaaggttttggttgatcatctggttgttcgttctcagggggaccctcagttttcccaggttgttcttcctgagcattttgaggattctcctgagccgtctcttgcctcctggttcgtgtgccacgaggtctgcctcgtggtcttatcactccagggttagtttgattttgtgtgttgttctcctgtgctcccctggctgcagctgcctcccgttctaactcagcatttcgtcggttcgcctccttcaggcggttcctgagacggcggttctccgactcaacaattggcatgtatctagtaggatcataagcgccatcattatcatgttcagtaggttgagggcctccaagatcgggttcttcatcatctactcctgagttctagccattttcatgctgagtcctcctcgaacgtgtggaccgtgtattggggccaccttcaggttgggtcctcatgaaacgagtggaccgcgtacttgggccacttttaggttgagtcctcctagaacgagtggtctgcgtagatcgcgagttgggaggcctatgggagcccattggctcttttccggcacgacattgtgtggtctcttcaggatgagtatccacattttctccgttgtcagccatggagaaagttttttttcttcttttgataaggagggttttttttaagcttttttcacgaaggctctcaatnaaagcaccaaactgttaacgcatatttttgttaactaaattaaagcctatttcgtgatggattgacacaaaaataattgctataaaaggaaaagaaataacacaaagtttttttacgtggtt

SEQ ID NO: 135388 - DNA, 658 bp, Cannabis sativa
agagttaatagaacacaaaccacaaactcgtctcaacacaactaccacagtcttgccacttgaacaaaccatgatttgccaaggatcttgcgatttgagcaaaaaaccaaattttacggtagtcattaagaccatcgctatacgtaatcagattgatatacataatccatagtccacatttcctaaaccagcaaacactatatatcgaacgtacagaattattagaatgtatgcccccaaacgtgtagccttgaacagttgtgggttagattgttcaaagagtttgggatccattggtgtatggacagcaatggggataagaagagttctagattatggtagcagccatttttcaggctatttggctagaagaaatagtaggatttttgaaggcatagataacgtcctttggaagaaggttaaagtatggactgcaatatgggtctacaggacaaaaagctttcagggtctatcttttcaagacctgactaggcaatagggttctattgtattagtgccttggtatggggatatagacataggcctaaatttatcaggttttgagcttattttgtattgggaaatttgattttctatacttacatatacctaatattttatttctaaactaatacatatcatcattgaaaatatatga

SEQ ID NO: 135389 - DNA, 777 bp, Cannabis sativa
  modified_base (87)..(89): a, c, t, g, unknown or other
agctgagctaaaatatcgtcccccaacaattgtggaggaggtggtcttttctcaattttcccatcgtattttttacttctacgcctnnnatcatccatttcaagaaaccttctgtggccaacataaccaatcttgatgtgcaatccaatggaaggagtgtgctccttataggtggggcacgccttgtaccctttggtgctccatccagacatcattgcatacgccgagaagtcattaatggtccacaaaatggcagctcttagtgtgaacacggtcccattgtaagcatctcgagcttggacacctgaatcccacaactctctcaatccatcaatcaatggtctcataaaaacattcatgtcttttccagaggcagtgcgtcctagcaccaaaagagacaacatcaacgactcaagtttcatgcacttccacaggggtaagttgtacgggactaaaataacaggccacacactgtaagcgttactcatgttaccaaagggattgaaccagtcggtggccaatcccaatctcacatttctaggctcaagtgcgaatgatggatgacgtctgtcaaaatgcttccactcttctgcatctgcagggtgtctaatcacgtcatcctctttaggtctcttagagtagtgccaccgcatgtcctctgccgagtgtcttgaacgctataacctcttcagtctcggaattaaaggaaagtaccgcaaaacttttctagcaactttttttctgtctccctttctctttttccaacgactctcgcca

SEQ ID NO: 135390 - DNA, 1076 bp, Cannabis sativa
  modified_base (980)..(986): a, c, t, g, unknown or other
tagaatcggatatccaatcataattggatcggattggatgtaaattttgaaagtccaatcgaaacggatcggtcgttggatcggacatccgatccaatggataaccgaccacactaatccaaatatcatccaattatatttatatatttttaaaatatatttataattttatatatttaatatatgttacttaaaaatatatatcaattgattttaagaaaaaaaatcttagatttaagatattaattctcatcttcttaaacgttaataaaattattaatacgtattaattaaattttatttttaacagttttattatgagatcataagaattaggtaagattaaactaatgtttattatatatattgaattattaagttttaatttatatttttttatatatatattttttaatgaaattaacttaaatgtagctaaaatgaatttgatagacccaatccaatctaataaaaaacccatcaatgtatccaatggttagaaccgatccaatctaataaatccatttgattggatcagatcggatgactcaattcaattggattagatcggacgacaaaattcaatagtataaataattagattgaattagttgggtccaaattcatgtgatgcaataaacaccctacaagcattatttgtgtcgttaaatctcccctacctagctatcatgtatatattatatatttataatgtgccctctaatgtcaacttcccgcaaaaaaatgtcaacttccatagttccatatctaaaaatttatttcgcttaatattatatactaattatatttatttaatcagagaataatattttaggtgtatatattaacgctggaactatatatatagttataataattaatattccatttggccccaaaatcattaaaaaaaaacacatcataaacccagttttttaaattccacttagaccttaattcagggccggccctaggcatannnnnnntaggcccgtgcctagggcccacacttttcgggggcccaaaataaaaaaattaaaaaaaattattaggcttttatttaagtaaaattaagt

SEQ ID NO: 135391 - DNA, 1161 bp, Cannabis sativa
  modified_base (399)..(403): a, c, t, g, unknown or other
  modified_base (605)..(619): a, c, t, g, unknown or other
  modified_base (717)..(728): a, c, t, g, unknown or other
aaataaatagttttggaatttatacggttgaaattgcaaaagtggtatttgcgaaaaatagataaatagttgggaaaaatggtaaaaatctaactagtattgggcccatggccggccactagatccctatttttgctccatttttatcatttttttattccaaataaatcaaccccaaccctaagagaagtagtataaaaggaatagaaagtctcattatccaaaaaatgcttaaaaggcaattaaccaagtttctttctctctaggtttttgagacttcttcttcttttcttctcttattttcgaatccttactcttcttcacaaaacaaaattcaggcattagtgattgcgtgcatgttcacacgtaacaagtgagtcctcaatcatagtatgtaannnnntgaagaatccaaacaattgaaggactttcgggctcagatctttgtgatactctgcgactgaaaggaaaaaagggttagagatcagagtagaaggagtcatttaattctgctgcaaccaatgtaaggtttttcataccttttatatgtttattttcatcgttttagaaattcatattaagatgttaaaaacatacttgttagnnnnnnnnnnnnnnngtaaaacatattccaacaactagcctcagagtcatggtaattgatttactttcaagtaatattgatttaaaacaatgtatgtgtgatttggatgtgannnnnnnnnnnntatgtgtttattgatgattgattgatgtttacaaatttttacgtaaaataattggattttcgttctaatcatttttattggatagtatggaaaaaattaagctattcacttatttacagaactcaatttcgattttatttgaattagtcatgaattttttgaaaaatagaaaaatcaggaggtggtgtcaacccacgtgcgcgcgcggacacgagtgatcacaccgtgtgctcacgcattaggataggggttgtccgaagtttctcggttgttccccctatctgaacacctccctaccacgcgcggaaaggctgcatgcagccttagtgtgcggcaaacctcggctgatcaccccctgggacgcgcggatggtatgcaatcataccaaatgcaattttttccaattttttttatttttttcatgctttttcat

SEQ ID NO: 135392 - DNA, 768 bp, Cannabis sativa
gatcttgtatgtcccgagctagaacttgcctcgtcacgtacatgccttttcctttgggaacgagttggtacatgtcccctactagggtttgtatacgccccttccctatcagtgtgagaaggacgttgacgatgtcttgagggcaatccacttgtcctaggttgagtctcaggatctctctcgttaccacgagggatttcctgttccctagtccagggttgccttctactcgcatttctgcgagaaggctctggtaaatcacggttttcattccattaggttgtaaatcctcgagatctccgtggcacttcttggcgaggtgcctgatcatctagttgttcatcttcatgtgcatccccaggttgctcctcctaagtgttcttggggttttcctgatctatttcctgcctcctggtttgtgagctgcgaggtctgcctcccattccaacttagtgtttcattggtttgcctcctccaaacgtcaccggagttgacgattttccaactcaaccaacggtacgtatcttgtggggtcataggcaccctcactcacaggcgtagaaccgccagcatttgtgttgggtttctcattcccagtttctgggttctggtcaccatcacgttggcttcttcttgaacgtgttgaccgtgttgaacgagttgttcatgaattgggtagcctccgtgagcccattggctctttccaagacggtgagtagtctcttcaggatgagtgttattgttttccccattatcagccatggagaa

SEQ ID NO: 135393 - DNA, 1106 bp, Cannabis sativa
  modified_base (47)..(53): a, c, t, g, unknown or other
  modified_base (292)..(295): a, c, t, g, unknown or other
aaattttattccattcctattcctattcccattcccattcctattcnnnnnnnttcattcctcccaaccaaacgtttccttagtttctttattaggaaactggtttcgattatataaaagtataatttataataaaaaaaaacaaaacacaataaaaaaaatgaaggaaactcattatagtaaaactaatgtgatcgaaaaattactaaaaattaccctataaaattgcctaaaaataaataaaactattaaatgtgggctttgaaaacctaatttatatatatatatatannnnatatcaaataccataaaaatacttaaaaataaaaaataccacataaattggtcaaacttaaaagtgtcatatttaagtaaacaacttttaaaatcctacatggagtgtaaattcctcttttgaaaataccacatgttttttaaataaggcctattttttttcttaggctcactaaaattgacggtcgaccctgatagtgttagccctaggttaaggctcgcgcctagagctcacctaattcaagggccaaatgaaaagaaaaaattcctttaaaattatacaaattgtttcaataatttttaaacataccatctatccttataataaaagccccgaaaatatatatttcttaagattcaattcaactcggccgatcttgtagtggatattggtgctactttttgtaaacacatatatttcaaatagaaattgttagagatattattacaatagaataaaatcaagacattacaacactattgcaatataatacaaggatcaacaaaagagattaaataaaagttacaatacataatatacaatatatagaagaaaatagattacaacacatgtaaaatatatatataacaagagaataatatatatatatatactcactcacaaccttgagtgtagaatagtggggatcaccatgacatgaacaaggtattacacctttgtccaaaagcttatttccccctatttctaagttctaagggaactctctaagaaatagctttgggaattatcaagccttagggttttctagcaaagtgttttcttgatagaaaacttcatctctctcaaatga

SEQ ID NO: 135394 - DNA, 639 bp, Cannabis sativa
ctctttatttggtgcaacaaatctcgattcgaattgctaatgtagtataatatctaagtgaaagtattatatctaatagagattatatatgatacggaccaataagtaattaagctgtcttaatcaaatatatcgtttactatatatacctgatacctaattcatatcataagggtgatcaatagtagatatgcctaaatctcgagtaatcatgaacttctgttcatattattagtttctttgattcactcgttaaagtttcttagagaagatgattcttacaacttctgttttggaaatctaataatgtgaatgactgggaacataatgtataattatagaatcatgactttcctaacagatcgaatgttagttccctttaagagttaattctagaactgaaaaggttgtgcacaaatttagattagatgtaaattatactttaactagtaaattaacagtactaaaggataaagaagtaattagaagggtaagatggtaattttaccaaaacaaattatgaaccgacactaggagggctaatcactagaattgattatatcgatagatactctagtaaaacttagtaaaaataattctataattactaagaggtcaattccatatttatagtgaagt

SEQ ID NO: 135395 - DNA, 511 bp, Cannabis sativa
tcaaatgaggcaacaaaggtgctaactaataaattagtgatcaaacctagaaattagaattaaaagcatgtaagaaaacaaagagagaagtcacttactgtttaaagcttggttttggggcgatgaacggtcctacaatcgatgggacagcaaacgacatgaagacccctctgaatgcttgaagttgaaagttaaatcagaagaaatttgcaggaaaaatgccaacgacaaagatggcatgcaaggtttcaggctaatgtgggtatgggttttttttttacagaaaagctcgaaaaatctctagagtttttgaaatggcaaaggtattgaaaaggtggttccttttttcgttttatactcttggattaatctccgtcaaattaagaaacacttgatccaatgggcaaaatttaaaaaaggaagtggaaaagatggttattaaatgttgatgtgcatcgaaaccacaaaactgccaaaattagaggagatgcattttttcaaaagggattat

SEQ ID NO: 135396 - DNA, 1742 bp, Cannabis sativa
ttgggtgcggagcatttgttcatactccaaaagatgagagatccaagaatgatgataaggcaaaactatgtgttttcttggggtacggtcatgaagagtttgggtacagattatgggatctagtgaatagaagcagggatgtggtgtttcttgaagatcaaatgtttgaaaacaatgacaaagttcagaagtaaaagagaagtaaaagtcccatgttaatgttcctgcgagtactagctcagttccttcacccatagtgcatgatgatcatgggggagatgaacaggaaaaccatgaagagcatgtcaataaagaagcatatgaataagaagatcgtggtgagaatattcattatgatgttcctacaatgaatgatgatggtgagcaactgaacaggatcaagaagcacctccaccaccaccagttgagactccagtaaatagatccacaagagagtgtaaaccagcttcaagatacaatcctcatgagtatgtaatgctcacttatggggagagccaaaaacttacctggaagccattctacatgagcataagaatgagtggatggagccatgcaagaagagattggatccctacatgagaatcacacatatgacttggtgaagttacctaaagggaagaaagatctcaagaacaaatgggtttacaggcataagacttaaaataatggctcacaacggtacaaggcacgattggttgttaaagggtttggtcagaagaaaagtattgactttgaagaaatattttctctagttatgaaaatgtcctctattagagttgttcttggtttagctgctcgcttgaatttagaagtagaacaacttgatgtaaaaacttccttttttaatggtgacttggaagaagaaatttacatggagcagccagagggtttcaaagtcaagggaaaagagaatcttgtgtgcaagcttagaaaaagattatatggactcaaacaggcacctagacagttgtaccagaagtttgattccttcatgtcgagccatggatataccagaactacttctgatcatgtgtgattacaaagaagctttccgatgatgatttcattattctcttactgtatgttgatgatatgttaattgttggccatgatgtcagaaagattgaaaagctaataggatagttgagaaagtcttttgctatgaaagacttaggatcgacaaaacaaataattggaatgagaatttcccgtgacatgaagaatgggaaactttggtgatctcaagaagcttatgttgaaaaagttcttgaaagatttaacatgagcaaagctaaagtagttaattctccacttgtaggccatttcaagttaagctccaagaaatgtcctacaagtgaaaacgattaacaagaaatggcttcaataccttactcatttacagttggtagtttgatgcatgttatggtttgtacgaggccaaatattgcccatgcagttagagctgctagccgattcctctctaatcctagtaaggatcactgtgaagcaatgaaatagatatagagatatctatgaggtacttccaggttgtacttatgctttggcagtggtgaacctatgcttgatgggtacacagatgcagacatggctgctgattgtggttctaggaaatccacgtcaggattcttggtgacatttgcagggggagctgtttcatggcaatcgaggttacagaagtgttgctttatctactacagaag

SEQ ID NO: 135397 - DNA, 772 bp, Cannabis sativa
  modified_base (627)..(629): a, c, t, g, unknown or other
cttatccctaacttttttagatatgttgagaaatattttttttatctattaattaaaaatatttttattatatttcattagaaagtactaggttatccaatatactcttaccatctacttaagtctaccacatagtttatattaacctaaaagtaaacaaaaaatttccttccaaacagaaataattaaggagtatttcatatttagctaggaaaataaaaaataacaaaatacagttgttaatatttttgaacattatttttatggactttaagtgttttttttatataaaaatatgaactattcttttacgatgttgtatttttttttatgttgtttttatgtaatttttatactattttcatgttgcttttacaggattttgtataaattataattaaaaaaataaaacccgtaaaaatgaataaagaatatgaaaaaataaaaaaaaaattattttgaccatatagaattacataaagttctaattttttgtaaaatatttatatttttacgtttaaaagttttttttttacatttttatggtgttttataaaaataacaagaaaacaacataaaagtaatatggaaataagatccaaacaacaacaacaaaaaataacatannnataacaaaaaatcaataacaaataaacaagattacaacattaaaatactatatttctataaataaaatcgtaaaaatatttaaaattctgtacaatatattcttatcataatacttttaaatataaaaagataaaaaaaaaaa

SEQ ID NO: 135398 - DNA, 1303 bp, Cannabis sativa
  modified_base (855)..(859): a, c, t, g, unknown or other
ttccctttatcttgacacgtgtcctccagccgaatttcaggtataacaattgccccttaaaaagatcttttttagtaaaaagagctttttgataattatagagggcattttcttcaagatattttcttggaaaaaacacatcctttaattctggtggttgtacggtttcgaggatcattatgaatcgtctcttcatattttgcacaacttccaaccgttagatttctcaatctttggctttcttgtcactgtacttcgtgtataaaaaggcagctcaagcttgtcatttttcaaaaaccttctgactctttagtgagatccattttcagaatggatcatctctttcctgccaaaatgtccctcttgagttcagaatttcatccttctaaactcataatacccaaatgcaccaaccattttccacttgttcctacagaccttaagcctcaactagagctggaaacgatggattccagggttgaggagcttccgaccaatctaaaccaggggaacccctcagcccaccatggccgatcctcacaagtgatccctgagggtatagatcttgtgagcgatcttaaaggtcctcctcaggctgataaagaattccagaggaaggttggcatggttgcagatgaatctgggaaggaagttggcgtggtttctatcaaagaatccagccaacccaagacctaacctgtactagaagatctttgcgtcaacctctttctggtatcgaagaatttgctgaggctgggaaaaagatctcggcttcaggaaatgggatcttttgatgatgaggggaatgaggtctatgcagagatcaaggctctctacatgtagccggtctttctnnnnntatgtgtagtcggtctttctccgagctaacgtgtagacggtctttttcaagctaggtacagacggtctttctcgagttcatcggcttcccctctcatccatgacttaggaagatgacttaatggtttgcccctagggtcatttttgtaaagacaagtttgtaacctattttaggtttttcttatcttaaataccttatactattttcatttgaacttaatacaattgtgtttgcttgggtttttattcacaatgtaaacaactatattttgatcaaatatacagtacttttgggtttctccattgctcgtaatcttcctattaaagtagttagtaatctaccaaactttatgttttttcagcagttgtcaattctgcctcgcaattgcagttagaatctgccttaagcaaacttaaatatactttaaggattttatcactttgt

SEQ ID NO: 135399 - DNA, 775 bp, Cannabis sativa
caagactcataaagattacttttacgaagtgtagacataattatacaagtagaagtaggatgataccaaagagaatagagatcatatttcacagcataataatcgaaaccaatatatgtatataagataataataaatatatatttaacttgctgacactgaaggctagaacacgaaattcctttttttttttttttttatgatttcaaaccctgatgaagaaaaataaaaagaaaaaactgcagcagttgcaacctaaaatggtgtgggaagtgaagtacgtacagtaagaaatcctaagggttcctaactgctatgcattcctagtcccagaattcagaaaagccgtggttgaattgaattaatgagtgaaatcacagagaaaaaaaaaagaaaaatttgagagcaaaaatttaatcccaacagtaactgcaatgccttccttattccccaaaaacattcatacaaagtaagaaatccaattcagtggggatttcaatcgacaaaatccgaaattgaaaatgcgaaaagatgaaaaggaaaatggggcttctacacgttcgtgaaattgagagagatacctggtttagcagaaaaggaagaagatgaagtgaggtgcggctagggctagcggttcaccacaaaggaaaaaaataaaggcaccctttggggtgtaactgtaaatgccttggtgagattattggattattttggcaatgtactaaatcgtgtctttgaactttttttgccattaaaaattctcctaaactattga

SEQ ID NO: 135400 - DNA, 751 bp, Cannabis sativa
atcagaatttgttaagtattcttcatacaagaaaaacccaactccttgtacaaaagctccttcaatctgcacaaatatatgtgaacagccaagtaatgtttttcttgagaaatcatcaaagatttgggagttatatgtacactcataaatatataaatatatatattttttagagaacggctacattgctgaattagtacataccgtgtgctcccgttcacatacttagactagttacgaccttaggattttatatgatagtgtttactgtaattatagcgaagctctacacattttcgaaattttttagaaaatttagagtgttgcatacaggatccagtccaacataacacttcacacgagtgatggtactggaagttggaatacggtttgcagtaatttaaattattcaaaatttcatgtgtaaggagtttgctataattccaatgaaccccatcatgtaaaaaagaaatttgtatcataatttatctaatgtgtaaaaattcacaatcagtaatgtggtattgtaaatgtttcctactttttaattgttaaatatttttgtaatttttttgttgtttttgtgtatttatgaaattatctaaaaaaaaaactcatctaggcggaaagcaaaagcaccttgtatcattgttggaaatgttgtgaatgttttaacaaaatatataagtgtcttagtgtgtgtgagttggaaagagtcccacatgggatatgaaccctcatttacaagggt

SEQ ID NO: 135401 - DNA, 1072 bp, Cannabis sativa
tctcctcttttctcttcctttttcttcttttttctctctttcttgctttgtacgaacagaggttctatggcagaaattgttcttctcctattttttttgatggaggttgtcttgtacaaaagaaggtctttatttgtaccctttacccaaaataaatcctacacatggcatggatctagtctctccaagtatttgctccaaccaccattcctagaatgccacgccatccccaaaattgccacctcatttaatgaagagacacctcgtcttttgttcatgtactttaacaatcagatatcgctacatttgatgcagcaaaaagttcacagaatttcagcaaaattaacaacttgaataacttgctcttttcttgccattttataaacaaaatttgttaatttcttactaatagcttcaaaatacacatataagcataaaatactaaaaatttcacaaattaaaaaacaaaataactgaaatgaaacacaaattaaataaaaaattagcttaaaataatatcaaataactctttacgcaagagttatcggtcatgcactagttgaaaagaaaaagaagaggtcgggagagtagtatggttcttaagttggatatgagtaaggattataacagggtggattgaggttatctttgtgtaattttgcttcaaatgggattcacggggagatgggttgatttgattcttactcgtgtcacttaagtttctgatactattgtacacggtggtagagagatgatgcctatctttccaactgatggcttctaaaaaggagattcattgtctccatatttatttataatatgcgtcgagggtctttcctcattgattcgagtctatgaatctcagatgtagattagaggaatcaaagtttgtaggtaagatcctattatctctcatatgtttttttttttacttatgatagttatactttgtaaagctttccctgaagattctatgagagttttagatttgcttcataagtttgaggaggcatcaagtccgcaagttaatttggaaaaatctaatgtcttttttagtgccaatgtggcgggg

SEQ ID NO: 135402 - DNA, 802 bp, Cannabis sativa
cgtaggggccgcaagagtagaggtcttcagcgactcgcaattggtggtcaatcaagtctcaggagaataccaaacgcgtggagagaaaatggtcgcgtacgtagctattgtccgagaacttctccatgagttcacagagtacaaagtcaaaagaaaacccagagaaaagaatgctcacgcagactttttggccaagttggcatcagacagtgagatagaggcactgggggtggtacccgttgaacacctcacggagccgagcatcaaaatcaaaaatttggtggtagcaattcagcaggagccaagttggatggaccccatcatcagatacataacgaaaggtgagttgcctcaggaaagggccatatccagaaggctacaatatcaggcacatcaatatgtgatgatggataatattctctaccgaagaggactcagcatgccgtacttaaggtgtctatcggaccctgaagctagacaaatcatgcaagaggtccatgaggggttctgcggagatcataccggaggtccaagtctctcaaagtaaatactgagacaaggatacttttggccaacaattaaaaaagactgtgtagactatgtcctgaaatgtgattcgtgccaaaggcttgcgaacatactaagagccccccaacaagattaccctacgaccggcccctggcccttcgcggtgtggggaatagatctcgttgggtctttcccaacgggaaagagaggggtaaagtatgctatagtagtcgtggactactttacaaagtggacagaggtcgagcctatgaag

SEQ ID NO: 135403 - DNA, 543 bp, Cannabis sativa
  modified_base (475)..(479): a, c, t, g, unknown or other
tgtggacgccataaattaggatttagatcataaacagtttcgaatttttatttttattatcttaattaataatgtgaacgggtacatacatcaatctcaagtatgaagtaagtgtttggtcaaagtgtcctggaaactttaacaatataacaaaaaaaaaagacagctaatataaggaaggacaagtcaattttgctttataatttattattattattattattggttcataatatttattttaatccaacaaattcttctacgcgttttttattataaggcatagtgaagtgtagggttaatctgttgtaattatagtcaacgtcgacacaggtcacatcgcctcaccacttgccatacataaattttattggtacatataatggaccccttaaaatagacgcacccgttttagttctaaaataactttttagttaagttttttatcatataaattatagttatttaagatatnnnnnaaaattttaaaaaattaaaaaaagtttaacacgttaaaagctagattcaaatagtatcttgcac

SEQ ID NO: 135404 - DNA, 596 bp, Cannabis sativa
tactaaatcaggtacgtagcagaaaagtttcgtattatccgattatcatcgtaccatgtctcctaggatctctatatgaatgtacaataaattaaaataataaaaacaataagtttagagtatacctcttaaagccaatcagggtatcctaaaaacttcttgtaagttttatcccttaatccagttgatgaggaatatggaatttagacttacaccagtatcttccaaattgatccaccacatacaaggaatagtgtgtgatattaaataaagtgtataaccttgttcttgttgagttctcaacacatgagcaagaagaattaagagaaaaaatagttttcttttcttgctattcatttcgaaaatagcagtgtgaaaaagagtgattctaaatcaaactcctatttatagtagttaaatccctttaattaaattattattcaaatatttaaataaataattttttataactgattcagttactgatatttataagagaatctctcaactacttgagagaaaatatctataaccttgaaaaatctataaccacttttcaaattagatattacctaattaaattaattaaataatta

SEQ ID NO: 135405 - DNA, 546 bp, Cannabis sativa
gattacacgataatcgaaggggctagtgacggctccgttatgaagtatcacatcaattaaggaaggataaagattaatctcacctaatccatatgatacctacggcataagttatgcatgccctatgttgtatctcttgggaacttgtgctcatacattactggcactgaaagacaagttaccccttttaaactatcccaccaatctctataaatactcctgagaaaaatgggaaaggggatcgaaaaaagagagaaaaaacacaccaagaacattctctgtacaagaactctcaataataacaaagactcgttgactacgactcattgatgcttgaaccacgtaaaaatcatctgcattaattatcccaaagctcttatcgttatttcatttaattggttatcaaaaatttcggtcaacatttattaatctatatatatatctatataatatataatgaaaacatacaagatggtgacataattctttaaaatctctctaattagcattatttcttctcttcttaattctctttttttttttttt

SEQ ID NO: 135406 - DNA, 625 bp, Cannabis sativa
aggcaagcattctagctttaatcttttcaattgccttattggtccgttgtactgactctggacctaggtatttcttttcccctgtcttatcctagtggatgggacatctacattttcttccatataaaagttcatagggagcaatccctatcgtactctgataactcttattataagagaactctatcaatggtagatacttgttccaggagccctcaaaatccataacacaggctcgtagcatatcttccaatatctgaatcatcctttcggactgtccatctgtctaaggatggaaagttgtactaaatttcagttttgtacccatagctcgttgtaaactctaccaaaacttggaagtaaacttctgatctctgtccgaaattattgattttggtaccccatgaagccttattatttctttaatatacaactctgctaactgatccactaaataggtttttttaactattagaaaatgagcagactttgtgaatcgatccaccacaacccaaatagaatcaaataaacctgtggttatagataacccaaccacaaaatccatcgtgatgtcctcccacttccattcaggtagggttaaaggctgtaacaaccctgctggtct

SEQ ID NO: 135407 - DNA, 1852 bp, Cannabis sativa
  modified_base (300)..(302): a, c, t, g, unknown or other
aagtgaaagtgatgatgatgcacttgatatgtcttatgatgaattatcaaaatccttcaatgatttgtttgttgattttgaaaaattgcttgctaagaactatactcaaagaaagaaaataagtttattgcttgaaaaagttgaggctttggaagtaaaagaaaaggagtttttgattgaaacccaatgcaaaagttgtatcttatctgaaaaagatattgtaaactagaaagctaaaattgatgatttaaaccaagggattacaattttacaaaaggaaaagagaattttgaaatgatnnntgggagtcaaaaatgtgctttttcaaaaaattgtataggatacaacacttgtgtgaaacaaaagttttttaggaaattcattgtcaaatcatcttgtaatttgaacttaacttgcacttattgtaaccaagatggtcacactaaatcctatggccatgtgaaaaaggaatgcctattttggtaaggctatttggataccaaagactttaaagactaacatcaaaggacccaaagttatgtgggtaccaaaaagaaagatctaattttgttttgtaggtatcaataaagaggaaccaaagttggctcttgggtgttgatgcttaaagaagaatgtcgagttcctacattacccacaagtctcaaaaagtatagaaaaataatgtgtcaattcttgaacacaacctaaatgaacaaatttgggaaccggtaatatcattcttattcattctacttattttgatgagactaatatgcatagatggaaaaaagtggaatatgaagtgttttgctaattcacttacttttgatccttcttgttcattctcttatgcatacatgcttaattggtacgtcacatactatttctatgaattaaagttttgattagttgagtattgacattcttgaactatacatgctgaaaaattcagattataggtcattatgcaaattttcggtgaacttcggatatactttttaacaagtgtatatgtaaatttttgcatgtgtggctagtatatgtgtttatatgtttgaacatgtccaaatgagtgtatttagcatgcctaaaggtttctctagattgaaatatgctttgaacaaaattttagtatgtcatttgcttattttcaactttttaaggccataatgggtgaaatttgccaaaatttcatattgctgagaaaattgttgttttgaaagcttgtacatctctaaatactcatatataaattttctcaaatagaatttttcaaaaataatgctcaaatctttattttggtactattttacataatttttgactttttaagacctaaaagagtatttttcaccaaacttgctcaattttcattatttttcaattcagtaagtttgtacagctcacatttgatattttggaactactagaaaagaacttttcaatttggttgcatagaactcatttttggtagatttctagttttcaagcaaatcgaaaagtttaccgaaaagttaggattttggacatttttcttattttcttgtttgagcatgttggttgttatcacatatcatcttttgaaaaagattttgcatgaaaattttgcataaaatcaatttttggtaagtaagttgcttaaaatgataaaaacgagtaaaacttgccaaaatctctcatttttgaagctttttttgtttttctagattgtacacttcatatcaatcatatttaagctaatacaaaaataatgtttcaagaaggatgcataaaactaatttttggtacatatgttgtttttgcttaaatttttgaaaaacttaccaaaaagtctcaattcttgtcatctaat

SEQ ID NO: 135408 - DNA, 592 bp, Cannabis sativa
acctttgttgaattaattgaaaatcttatggtttggtttacgaaattttgggattttgaaaattaatattttatttatttatttatttatttagaaataatacgatttggcttctgtcagtttaatattcttaatacatctaatatatatactacaattcgattatcattattattactgtatgtatataattacagttaatatatatttataaaaggcttcactttcttttatcgtggcttaagatatcacactgtatatatatttggtaaagatatataatctatttagatgttttgcttgaatttgagtgtgtgatttcagtgggagtacatatatattctttcgtcgactaatttggcttcaaatttaacttgacggttgatgtcagcgtgcgtatgtatagatttgaaaacagcgtgtgtatatatttatatatacaattttttttttattatgtataatgtttgagatttgatttaactttagtttatgctatcaatttatattacatgctgatatttcagatttacatatataattagacagttttatgaaattttggaaataataaaatttaaattttggtgtt

SEQ ID NO: 135409 - DNA, 637 bp, Cannabis sativa
tatatttttttaataatttattaatttgtttgatacatcaaattttatttaaatttaaatattgtttatttatttattaataaaatataaaaaatactttatagtaatatcaagctatttaatgtatatttactttttaaattaaaaaaaaaaataaaaataaaaaaaaaataaaagttaattgttttttaataaatattaaatattttattatatgtgtcaaaaaaaaaaaattaaatgacataacaaaataaaagtatacttatatatatgctattatgatgatctgtgagaatggtcagacttattattactaatgcattgagagagaaaaataaaatgtcagaagaaaaaagaaaaaaagaaaaaaactagagaagtgtgtgcgtcaatgtcagtgtaagaaaaacaaacatttttttaacggtatgcatgtaacggtatatatgccaattaattgaccaacaatattatgacaattaattttaaattttagtatattgatgcaattaattctaaattctacttctgtggtggaaagagcaaccacagactataacaacatatacagttccgatttgtcatggacatgtaggttgtggttgttaggctatttttagcctatattttggataga

SEQ ID NO: 135410 - DNA, 723 bp, Cannabis sativa
gcaagggcttgctattcaaatccaccagaatgtttgtaccagtttggctagctgtggtggccagatttgtggctcctgtcgtgatgacaagattgaccacatctacagtgttcatgggaattctagttgtggctggaacatgaacattaggatcaacagtttgtgggtcctgagggagacctaaagatgcagatggtgtgactgaggttctcctcatgttaacaatgatgtttgattagatacgatatccacttgctctcaatgaaagcaccaaactattgaccttaaaaagtggtcaaccgacagcgagttcgtatgaatctgatgtttgccacatgttacacaattagaattagaaagtaaagaacaccaaaatttttatggaggtttggcccctttagatagcaggtaatcacctactccccttataattatattgatatcgagggataatactattctaattgctataggtgggatctaatatagctcccttaaggatacaaagaaggaatcaatggttgcaaatctcaagtgtttgagaatgcttgtatgggcatgagagagagagagtgaggaagagagttatcagacatagagatttaggcttagatctttatcacttggaggctaaaatcactactagaaaattgagttttagtgacacacattgagtaactctaaaagtgtatagtgacacttcaacgcgcgtcactaatgagg

SEQ ID NO: 135411 - DNA, 670 bp, Cannabis sativa
  modified_base (641)..(641): a, c, t, g, unknown or other
tggtgtatcatcttttttcttcatatgggtccaggcttcttgtacggggccaacgactgggttgctatatatactctttctatattttttgtcaaaatagtgaatgcagtgtctttggaatgattctcccggggagtatgtccggatttatcagtgaactttcctttcttcccgttccattgcttgtggttgttgctggaacgcttgccacttgagcttgaattatttgggtagttcggaaggtgggcggatgttccagtgaaaggagcctttgacttgcccggcttttgttcaccttatgctcgttgaatggcttcttcgagcttgatgaagcctttggctcggtcaaggaaatcactcattgagtctaccggcctgttcttccttatatccttccaaagttcaccgaggacttcgatgccccccagtatcacggataactttccatcctcggttacccgtgaaacttaggtcgcctccgttatgaatctgcaaatgtatgctcggagtggctcgcctggtcgttgcttaacttcgaccaagtctccccaatgcaatgggagttggcaggaggaggagaattgcgcatggagttccaaagagaaggttttccattaactaaactttccaggagccaactngaaataccattgctgagcggcttcaaaca

SEQ ID NO: 135412 - DNA, 821 bp, Cannabis sativa
tttaccttttgtttcttggctggaggcactggcttgtcatgacttcgagatgatcgaagttccttctcgatagaagcttgctgggcagaagtgcgagtggaaggaccagttggagtagaagtagcaacttcttttactgatgcagcaggaggagaaactgcagcaggtggaggagatccctttgaagatcaagaagatgaggtccaagttttgtatgggcacacagattttcgagccacttgtttaggaattcgtttgggcttcacgggctgagattcacgctgaggaaacgatgaatctcctatttttgcagcagcaggaggcacggttgaagtagcaagaggaagattcgagggggttgcatcgatttcaaccacctttttgggatgccctagattctttgttctaaccatggtgatctgaaagagagaatgaacaaaaaacaagcaagaagacaaagaaataagatcgggtaggtggtgagaataaatgacaaaaaaaattgttttaaataaacatggaagcatgaagaaaaaaggaaaccaattttgagattttgacaaataaccgccagcccatgaacaaaaaggaaaccgcccactatcttgaaattttttttcccctttccctttttcttaaaaaaaaaaaataaataaaaggaaaatagaataaccaacattatttcgaaaagtaagacaatctttcaagagtaaaaacacattaccatataagagaccaaactttaaatggtaacatatcaaaataaatcaaggaagaataaatattgatacttaccacttaagcacaaaatttccttagcc

SEQ ID NO: 135413 - DNA, 1680 bp, Cannabis sativa
tcaatattttctttgagagactcggacctccggtatgatctccatagaacccctcatggacctctatcataatttgcctagcttcaaggtctgctacacaccttaagtatgacatgctgagtcctcttcggtagagaatattattcatcatcacatatcgatgcgcttggtactgtatccttctagacaacgccctttcttgaggcaactcgcctttggttatgtatttgatgatgggattcatccagtttggtttcggctcgactgtaggcacaatatcttttattttaatgcttggtttcgtgaggcgttcaacgggcaccacccccagtttctcaacctcgctgtctgatgctaacttagccaaacagtctgcgtgggtattcttttctctggggatttttccactttataatctgtgaactcatggagtagctcccggacaattgctacatacgcgaccattttttctccacgcgtttcatactctcccgagacttggtttaccaccaattacgaatctatgaagacttctactctcgtggctcccacagttcttgctaattttagccctgcaatcagggtttcatattcagcttcattgttagaagccgagaatttgaaacgcagagccgcctggagtcgtagcccgttcggagatatcatagctatcccagctccggatccattttcgtttgacgctccgtccacgaatactttccatgctggggtttgtagtactggtacgtttgcactagcttctgcttcattgcattctgttatgaagtcagcaagggcttgtccttttatagaagtgagtggtatgtagtgtatgttgaactggcttaattccatggcccacttgaggagtcttccggacgcttccgatttctgtaggacttgttgaagcagatggtttgttaataccttgatggggtgagcctagaagtaaagtcttaactttcttgaagccaccaggaggtagaaaacaaacttttcaatcaatggataccgtatctcagctcctatcatacgcttgctgacgtagtacacaggatattggactttttcttcttcccagactaaggctgcgctgacagcgttcttgaagacggccaagtataataataagtcctctccgtgaactggctttgatagaattagaggttttaccatgtgttcttttagttttctgaatgcctccttgcattcttttgtccactcaaatttctgacacttctttaaagtttcacttgtctgttgatcgggaaatgaatcggcttagggcggaaactttttcggtcaacctttgcacatctttgtgcttcttgggggaaggcatgtttagtaaagcttgatttttttaggatttgcgtctattcccctttggctgacgatgaatcccaaaaatttccctgacttgaccccgaaagtgcacttcttcgtgttaagtttcattccatacctccggaccacttcaaagcattctgcgagatcgtctgcatggctcatgcatgcttaagacttgactagcatgtcgtccacgtaaacttccatatttcgtcctagaaggcccttgaatattcggtccaccattctctgatatgttgcaccagcattttttagtccgaatggcatgaccaggtagcagtatacccctttatcggtcctgaagctagt

SEQ ID NO: 135414 - DNA, 700 bp, Cannabis sativa
ccatttcgtcctcttcctcactcaatctctctttttctctctcttcaaaacacagaaggaaacccacaaaccaccatcaccaccactctctggcgacccaccactggctaccgaccagacccatgcaccagaccattcgaacccccaggtgccagcgacctcaccccccaagcggcgccgcttctttcgccgccattagctcagaatcgcaagtcaaagtttggtggttcaaactttgaacggattttccaatcacctctggtgtccgtttgacgagccgtcttcaccaatagactcagcttgacagaagaacaacccacacttagctattttgtccaactcgctacttttttcggtgacatttttgtagctctgcccctatccgacaactttctggcgacatcgtgtactgttttgacaaacagttagcatgggtgtgatctactcgtcgaggtggtcattttaatatacagtattcctatttttggcgacatttccggtacattgatttttacgaccatcgatagttaatgtacaccgcttaggtgaggcttcggaaccctaaattttaaatatagtcatattttatgttgttatacttagttttagatgtagaatgggatgatgataattatttaactatttgatggtataggtgagagtaacatctaagattggactaaacaattggagctcggga

SEQ ID NO: 135415 - DNA, 1267 bp, Cannabis sativa
cagtatttgtttttctaacatcttttctgtagttagttgcatctgttttcactaatttcattttagtgccatgtcagctttctgcaagtttgttagtttgtgtctattgagcacatttttttctcactattgagctcgtgtagtccatgtagtacattcacattttcacaattaccatatttgttcacgtattgtctctgtcgagtttgagctgctgggcttttaaatctgctaatgggcttgggctttttatgttggatccaaagggtatttttgtcttttccattcatcgataataaatatcttttttttaccatcatttgaaattcacataccctgtcagtggaactattcatcttctcccagctctgtgttcgttcgctgagtgttcatcattttgagtcttcttcagcctcgtctggttgtgctgggttgtgaagctatgggcaaacgggcaaatcgtcgcgttaaaacatctgcattgattgaagatgattctccgtctcgcatgcagtcggaggaatcaagtgggtctccaaccaggtctgtcactcctccatgtccaccactcttaggtacaccttcttcaccctctaacctacctaggcggtttactaggtctatgtcaatcccatttgcctcgcctaaggtccctactcccattgtgactgactcgtctcaacctcccgtgtctaagcattcacctaaaagaaaaaggggttcctctgatgctactcattcgtcagggtccaagaaaattaaaatccatccacctagtgtgtctgagtcaaacacatctaatgcacccttttactcaaacgataagttacttagatttcaggagaatgtgtgtcgtcgtccattgtggcctgaatatcgggttaaactcaagtatattcctaggatacaggagttaattgaacgtcgtgggtggtcactatctgttactcatctccaacccccaaatgagaacctggttagggaattttatgccaacctagatgaaagcattttgaacaaaaaaagtcagtttctttatcttgcatatattagaggtaacaggtttcggtttgccccctcaaccattagttgtgtcctaaaaatcaaaaccatcacccaccctacatttaatgatgagtataagcctgagtttaaggatgttggtgttgaaattactggcaatcccaactttgtgtggaatgggaaggagttacatgtcacagttctatcagaattttacagagtcctccataaaatagctatgtcc

SEQ ID NO: 135416 - DNA, 733 bp, Cannabis sativa
ttttttttttttttaagtagttaattaattttatattaattgttaaattaaaatatgtgagggatgttatgatattatatgtttttttttatatataaatgtaaaatttaaatgttcaagataaattattatgaaccacttgaggctagctcaagtggccataggaggtgcatgtacgttggaggtcttgagttcgattcttaaattatgcatggttgtaatatataaacgcttaaataaaaaaaaaaagacaacttattatgttctaattaaaaaataaaataataataaaaaaatattcttatcattattttgtgagagagaaatacaactttatctatggtgtcgtttaataactttgttaattagttttttatttttaaaattaaaaaagtaaaaatatttttcaaactcatattctataaaactgttttcactttcaattttttaattgagaattaaaattttgaaaattgtgaaaacaaaaaaaaaatcactttcaatattttttttttaaaaaattttcttttatttaatattttagactctggatctagaccaaccttaaataaaatcaaaaaataaatatgaaaataaattttacagaacatacttttattttttgtctataaaattaaaaaataaaaatggttataaaacgtatttttgtttttcaaaaataaatttttaaaaataaaaatttttactttatttttgtgattaaaaaattaga

SEQ ID NO: 135417 - DNA, 501 bp, Cannabis sativa
ctatcaaggcttcatattcggcctcgttgtttgaagctgagaagtcaaaccgaagggctgcctggagtcgaagtctggtcggggatatcatagcaactcccgctctagatccgttttcattggaggcttcgtccacaaatactttccatgtggggaccgatggtatcggcgcattcgcagttgcctcggcttcattatattcggtgatgaagtccgccaaggcttgcccttttatggagatgcggggtatgtagtgtaagtcaaattgacttaactccattgcccacttgagaagccttccggacgcttctggcttttgcaggagttgccggagcgggtgattggccagtaccttgattaggtgtgcttggaagtacggccttaattttcttgaggccattaggaggcagaaaactaatttttcgatgatggggtacctcgtctccacccctatcatgggcttgctgacgtagtacacgggatgttgagttttctcttctt

SEQ ID NO: 135418 - DNA, 840 bp, Cannabis sativa
ctttggtgagatcttttctttttacaaacttgttctagacctcttcgatttaaagcatccactaccaatttgcttcccagagtggtagggaattacaccattataatcttcaaccagctctaaccatcgtcgttgtctcctaattaaatccttccaaatgataaagtatttgaggctcctatgattcgtggaaactttgcacttttgccaaacaggtaaaagcgccaaactcccaaggcgaaagccactgctatcaattcaatatcataactagaatactattacttacacttcttaaactgtttagaagcacagacaataactctcctggtctgtatcaaactataatctaatccttgtttagaagtgtcacactaaatcacaaatttctcctcactgagtgacaatgttaacactggtacaatagttaacctctatttcaattctttcgacttaattccagtaagagtgtagacatccatcaataaatattttgtagcaccttgttaattcccaaaaacctctatcctcagttgcaagcccgagtggaagccaattctaaaccgctttaatcattacggaatctatcaaaatactatctatatgtacctcatgctctaagaaacttacttagggccaaaaaaactcgcatgtcctgcatgtagcctaaagcttatgctcccaatgacattgcgacaccatccaaagatgcctctcatatgcctcctctgaatcagaagaaatcagaatatcatcaatgaagacaattacgaagtcatcaagtatgaaaagctattttgggaatatcatcctcttgagtcttcaactagtaataaccag

SEQ ID NO: 135419 - DNA, 1258 bp, Cannabis sativa
  modified_base (144)..(155): a, c, t, g, unknown or other
  modified_base (401)..(406): a, c, t, g, unknown or other
  modified_base (882)..(889): a, c, t, g, unknown or other
  modified_base (1198)..(1198): a, c, t, g, unknown or other
agatttgggtgaagctgcttatgtgttttgtattcagatcattagaaagtggaagaacagatcccttgctctctctcaaaatgcttacattgataaggttttggagagattctcaatgaccaatgccaaaggggcacagatgcnnnnnnnnnnnngtatccgtctatctaaggaacaatgtccaactgatgctcaagagatagaggatatgagaagggttccttatgcttcagcacttgcgagtctaatgtatgcaatgttatacactaaacctgacatatgctatgcagtaggaattgtgaacatgtatcagaaaaacccaggagaggaacactggactgcaaataagcatattctgaaatatttgaacagtactaggcattatgtgttagtctacaagnnnnnngctttaaatcccgtaggctatacacacttagatttccaggcttgtcttgatgacagaaagtctacatctgggatagtttttactcttggggatggaggagtcgtttggagaagcactaagcaaactgcaatattagactctaccatcgaggccgagtacatagctgcggctgaggttactaatgaacttgtttggctaagaaagttcttctcaggacttggtgttgttcatggaatggaagctacaagagaagaaaacacatagagaggaaataccacatcatcagagaatatgtggcaagaggggatgtactagtggagaaagtggaaaccgaagacaacttagttgatccattcaccaaagttttggctccaactatatttgaaaagcatagattgaatttaggattaattgaaatgaactgatagttttatgttagtgcaagtgggagtttattgggctttgtgccctaaatnnnnnnnnatttcaatgtaatcttttttattcaattatcaataaagaaacagatttaatttaattgcttgtttaatgtgttatttagttcatgtgatcatttatttacttatttgattaataaattcatcgaaacccttatcacactatattcttgtttattatgttgtcaacaaagtggaaagtaagcaagattgtgtgattaaatgtgttgacctcgcttttagccaacgacagtgagtctaattttgtaagcgacaagtagtttaaaacaaattgaaatgtaataaagcgaataaagacacaagaattttatanaggttcagccccgagcagtttggtaatagcctaatcctcgttatttgtattgacttaaga

SEQ ID NO: 135420 - DNA, 664 bp, Cannabis sativa
  modified_base (407)..(410): a, c, t, g, unknown or other
tattaggctaattacattagtttattaatttattagcaacaaaattaattttatatgaatttaaaaaaattatatttaatttaagaaataattctatataattgatttctaagtaaataatttgtattttttcaagtatttaattaaatataaaatttatatttaagttatatttttattaaaatcaagatacttaaatattagataatttgtgatatttaattaaataagaaaacgatatttgtgttaaaaaataaattttaattaattttaggtttctcagattaggattttggcatgttgtttacccgtttatgtaatgtgactagggcatccatccaacacgagattttccgtttaggtcagccaactcacttgaattcagaaacgaggtaagaatagcatannnnatattgtatatatgcaaatgtatgtatgtgtgatatatatatatgcatgcttgttgtgattcatacactaccaatacttgtacagtagcagtatagagtgcattggtatagtgtaaaatgtttaaagagtatgttacgatgttactagcacaagtacaaaaaggtacgaggtgtgtgtggtacaacacttagtggtactcggggtacaagataaaccctaccaactctcgtacagtgatggtacgtagtgtatg

SEQ ID NO: 135421 - DNA, 942 bp, Cannabis sativa
ttagggcataaaatccaacatttcatactctgtatataatcatcgtgctattgtgtttgttttatctttaccaaattctttgtataggtgtagatgccccccaagtgactgagtaaacttatgactcttggtcactaattttctacaagtatacttttttatctgttcggggttttaagctcgaccaaaccttttgtacgcactcgatggtaaattatcaacatgttagtaatttcgactcaatttgaattttgaaataaacatccttattcatttattgatcaaaaatgtgtttgttaccgtactaagttacagcagagcaatttgatctaatttgttcttttagcttaacatgaaataaaacaatttgtagaaattagaaattgtactttaaatggtggtcatccaacctgagtacattttcatttttattgaaacctttgggcatagtccacccatcaggccattcacataaaagtaaatgttttttcagtacttagtatggtcgtccgacttggtactttgtaggtagtattttcttaaatgttccccattccaataccgtggtactagaacaagttgcattttttcttcatacttacctaatttgtatgctcctgattcgagaactttgaccacctgatatggtccttcccagttaggtccgcgcacacctgtcatactgtctttggtgtttagaaatactcttcttatgaccatatctcccacaatgaatttctgagccttcacttgtttattgaaattccgagctactttttgttgatgcgctatcaactttaagtttcctgtggttcgcttctcttcgatttcatcaagcgatttggccaggagtacgtgatttacttattggttgtacgttaatcttctgtgggatggtggctcgagctctacaggtaacatagcttcatacccatatgccat

SEQ ID NO: 135422 - DNA, 1047 bp, Cannabis sativa
taatgacttgacatttaacggtcatgtacctacggagttccaaaaatataactcatgtattattaccgccaaaaattaaaattaagtatttatttgcaaccgataattaaatttaggtatttatgccgcaaattactcaaaaatttaatgtttaataattctgtaactaaatataaaaataacatgattaaaacataaatataaataaaaactattgtatttatagtgatttaaattgttaagtgagctatattttagttttacattatttattcgtacagtagaatttttatttaagaatactatattcaagaataatctaaatttattataataaaattaagttctaatttgagttggttataaataagaataacttctaaattataattaattatatatttatttaagtctcgtattaagaaagtatacatctatataagaataataatatcttaataaaatatatacatatagtttgtaaatttatttatgtagaattaataaataattttattctaaataaataattaataatacatgtataaatattatatttatttaaaaataattttattataatatagtattaaggattatgtaatattcgaaagttaaagtttaattgtgattaattaagcatgtttaatgaaatatgaagtaatataggtataaggagaataaattgagtaagattttaatcttactaagttaatatggaaagatatgcttattttaataaatgaaaaaattaagcatgatttattaattatggagattttattggactatatattatttaaatattaattgagaaataaaatttttcaggtccagcaatagtagaaacttgattgattggttagaaatatcacgacagtattagtgggtattgttgtggtattgggagattatatttcatacttgagaattatggagtaagatggttattgttaggttatatttagcttatgtttcgggtttgataagtaagcattttctcggttattggtatcttttggagcggttttacgcttgattttcctt

SEQ ID NO: 135423 - DNA, 644 bp, Cannabis sativa
gggacagagactggggtgcggttctaggtcccggtcccaattttgtgtcccaagtctggttttatgtttgggtttgggtttgggtctaggttaagcactgagtctaggtatgagttgggatctgggtttgggtctcgacttgggtttaggtcttggttggagtctggcacctgttccggttatagttctgggtctaggtttaagtccggttacggttctaggtctaagtcatagttctggttatggttccagtcccgttcccgggtcccggtctacttccggtttcgtttcaaatttttggtcacagggtacggattcgggtccaagtttgggtttgggactggttttggtccgggtcttggttcgggtcctcgtcttattctagttagggtcccgggtcttgggccgggtcctaagtttaggattgggtctgagttcggggttgtgtcccgatagtcaagtccttgttttcgggtccaaggttgggtcccgtatctctggggtcgagttttgggtcttcatcccaatttcggtgcctagtttcaaatccaagtcctcaatcaagatccggatcctttgtcaaaatttgtgtccatgttcgggtttggggcccaagtcccccatctaggtctagatcttaggtc
